United States Patent Application Publication US 2019/0348154 A1 - sequence listing, part 94

SEQ ID NO: 351426 - DNA, 381 bp, Pseudomonas aeruginosa
atggtgctgccaatccgtcccggcgttgcacgcagcggcgcctacttactgctgagtaccctcctgatgacaggactacccctggccgccaacgctgacacgccggcgcagcgccaggagttagccgccgctgcccgccagcttgagactctggaacacctcgtagctcacagcgctgccaacgccaggcttacgccgggcgagcgctaccactttgactacacccggctacgcaatgacctagcccgcgtgcgaagcggtctccgagactacctaacgccacctcgcgcccaaccccgagaccccgtcgagttggccggccagtaccgcaccgaacaagaagcctccggttatccaatcgatagcgagcccaagccatga

SEQ ID NO: 351427 - DNA, 234 bp, Pseudomonas aeruginosa
atgaatggtgctcagctctcagcatttcaagccaacagcggtttcacgcccgcagtgatggccaccgtgctcgttggggccgtatttgcggtgctgctgctatggggagtctgggcgatccgtacagcctatgtgggctgggccgaaagccgaatcaaccagcgccaattcctcggcgtcgtcgtgcgctttcttgccatgtacatcgtgctgacgtttttccttatctcatga

SEQ ID NO: 351428 - DNA, 399 bp, Pseudomonas aeruginosa
atgtccgaggatcagcatgtgagggcggacggcacggtgtccttcctgccgcaccggctcaaccgtcatccggtggtggtgcgcggcctgaccgcagacgagttgtggatctgctgcgggctgtccggcgctgccgggctggtgatcggtgcgccgctgtcgtgggtgttctcgaccatcgcgctggcaccgacctttgtcgtcgccggcgtggcttttggagtgttcattggtggcggtatcctgcgtcgccaaaagcgcgggcgacccgacacctggctataccgccatctgcaatggtggctgacgacgcatcaccccatcgtctcggacaggattggcggacgtgcgctgatcacgcgctccggcttctggtcggcacggagggcatcgcgatga

SEQ ID NO: 351429 - DNA, 687 bp, Pseudomonas aeruginosa
atgagccggttcaagaacgaggtcgcgcacctgcaggcccacatcaagaccttgcgtctgggcgccgcatcgctgttgctgcttgcgctggtcatgggggggggctggtggagtgcgccgcgcgatctcaccgtccatgtcccgccggatctgcgctcaggcagcacgcgcaagtggtgggaggtgccgcctgaatcggtgtacgccttcaccttctacgtgttccagcagctcaaccgctggccgaccaacggtgaggacgactatgcgcgcaatctgcacgcgctctcgccgtacttcacacccgcgtgccgggcctttctgcaagccgactacgactatcgccgcaacgcaggcgaactacgtcaacgcgtgcgcgggatctatgaaattcccggacgcggctacggcgacaaccccaatgcacgcgtacgggtcgtctcggaccgcgactgggtagtgaccctggacatcagcgctgacgagtactacagctccgagcaaatcaagcgcgcgctcgttcgctatccaatcaaggtggttcgggcggatgtggatcccgctcggaatccgttcgggcttgctctcgactgctacgacggcgcgccgcagcgcattgctgcacccgaggcaccacctcagcctcccgcccgcagcggactgggcgtccaaggagaaacgccatga

SEQ ID NO: 351430 - DNA, 903 bp, Pseudomonas aeruginosa
atgaataagcaggtcgtcctttggctgagtgccgccgtggtcatcgcggtcacgcccatggtgcaggcggtggagactcttcgctgggaacgcctgccgctggccgttccccttgtcgtgggccaggagcggatcgttttcattgatcgcaatgtgcgcgtcggcgtaccggccagtgtcggtgagcgcctgcgcatccagagcgctgggggtgcggtgtatctgcgcgctagcgagtccatcgagccgacacggctacagctgcaggacgtcgacaccggctcgctgatcctgctggacattgctgccgagcccgcacgcgaaggtgcatcgccgctggagccggtgcgcatcgtggacggcaccaatgcagcgacgcgttacggcgagccaacggccgacagtgacgccgccatcccagacaacgctcaacccgcgcagaccaagcgcgagaccccgattgccgtcgtgctcacgcgctatgcagcccagaatctctacgcgccgttgcgcacggttgaagccgcgccgggcatcatgccggtcaacctgaagcgcaatctggcgctcgacacgctgttgcccaccttgccggtcaaagccaccgcgcttgctgcctggcgcatagaggaccactgggtcacggcggtccgcgttaccaacaccagcagcgcctgggtcgatctggatccgcgcacgctgcaaggcaacatcctgacagcgacctttcagcacccggcactggggccgcaaggccggccggaagacaccacggtggtttacctagtgacacgacgccatggcctgtcgcagtccctgctgccagccatccaacgtttcgatccagcggtcaatctgcccgagccaaccacatcggcgcatggagacgaccatgcgcagtaa

SEQ ID NO: 351431 - DNA, 435 bp, Pseudomonas aeruginosa
atgcgctcgaactggactaaagcccttgtactcgcgctcgccgtgggcaccctcgccggctgcgccaccaacaaggaagacctactcacccatggtgggcggaccatgcaggacatctggcaacaggaggctggcgacggtggctccggtcaggttgcccagcgccagttgctcgatgcgcgtcagacactgcgccggccgttgctcgaggtagacatcgccgcggcccccgccgaacaggcccgctatacccgcacagcggtgaacgagatctaccgccaattccatcgactgcccaaccccgacttggtgatgtacgtcttcccgcatctagcaggtacggatcctgtacctgtgccgggctacaccactgtgttcccgctgtaccaacgcacccagtacgccatgccgggcgagcgcgtggaggactactga

SEQ ID NO: 351432 - DNA, 2880 bp, Pseudomonas aeruginosa
atggcctggatgctaccttggcgccgccggacgcagcacgacgcctcatcctccgagcatgcacagcccgatggctggcagcgccatgtgcaggcgctgcgcgacgcaggcgtgcggatgccgggagaggccgtgcgaggcctgcgcgccgccacgaccgccgatgagcaagccctctacgacgtagcgccgtcgttcgtctcgcagctcccgtgggtggaatacctgccagagtcccagtgcatgttgctcgaagacggccaatcggttgccgcgttcttcgagctcacgcccctgggcaccgagggccgtgaggcggcctggctggctcaggcgcgtgacgcactggagaacgcactgcaagacagcttcgacgagttggacgagaacccctgggttgtccagctctacgcccaggacgaagcaagcttcgaccactacctggagatgctgcgccgctacgtccagcctcgcgcacagggctcacgcttcagcgagttctacctgaagtttttcacccaccacctgcgcgccgtcgccaacccaggaggccttttcgaggacaccgtggtgacccgtctgcgctggcgcggccaaagccgccgcgtgcgcctggtggtgtaccgccgcgcgcagggccagagcagtcgacgtggtcagacgccagaacaggccctcaacaccgtgtgcgatcgcttggccggtggactcaacaatgctggcatccaggcacgccggttggatgcgcctgcgatccatgcctggctgctgcgttggttcaatccccaccccacaacactgggtcccgatgcgcaagaccgtgagcgcttctaccaactggcggcctatcccgagaccaccgaggccgacgaaatcgagcttgccagcggcacggacttcagccagcgcctgttcttcggccagccgcgctcggacgtggaccagggactgtggttcttcgatggcatgccgcaccgggtcatggtcactgaccggctgcgcacgccaccggtcacaggccaccttacaggggagacacgtaagggcgatgcgatcaataccctgttcgaccagatgccggaagacaccacgctgtgcctaacgctggtcgccacgccgcaggacgttcttgaagctcacctcaaccacctcgccaagaaggccgtgggcgaaacgttggcatcggaacagaccctcaaggatgtccacgaggcccgctcgctgatcgggagttcccacaagctctaccgcggcacgctggcgttctacctgcgcggtcgtgatgaagccgagttggaccggcgaggcctgcagctcgccaatgtcatgcttaacgccggcctgcagccggtgcgcgaggaagacgaggtggcaccgctcaacagctacctgcgctggttgccctgcctctacaaccccggcgcggatcgccggcagtggtacacccaactgatgttcgcccagcacgcggccaacctgtcgcctgtctggggccgcagccagggcacgggccatcccggcatcacgttcttcaaccgtggcggcggggtgatcaccttcgaccctttcaaccgcctggacaggcagatgaacgcccacctgttcctgttcggtccgaccggctcaggaaagtcggcaactctgaacaacatcctgaaccaggtcgcagcgatctaccgtccgcgcatgttcatcgtcgaagcaggcaactcatttggcctgttcggcgacttcgccaagcgcctgggtcttacggtaaaccgggtcaagctctctccgggttccggggtcagcctggcaccgttcgcggacgcccggcgcctgatcgagacccccagcgacgtacagaccctggacgccgacgcccttgacgaagaacagcccgcacccactgatacgagtgaggcagacgagcaacgcgatgtgctcggcgaactggagatcaccgcacggctgatgatcaccggcggcgaggacaaggaagaagcgcgcatgacccgcgctgaccgctcgctgatccgccagtgcattctcgaggccgcgcagcgctgtgtcgcggccaaccgcaccgtactcacccgagacgttcgcgacgccctgcgcgaacgcggccgcgacaccacgttgcccgaaacccggcgttcccggctgctcgaaatggccgacgccatggacatgttctgccagggcacagacggcgagatgttcgacagaccgggaaccccatggccagaggcggacgtcacggtggtggacctggccacctatgcccgcgagggctacaacgcccagttgtccatcgcctacatctccctcatcagcacggtcaataacatcgccgagcgcgaccagttcctggggcggcccattgtcaatgtaactgacgagggccacatcatcacgaagaacccattgctgtcgccctacgtggtcaagatcaccaagatgtggcgcaagctgggcgcttggttctggctcgccacgcagaacgtggacgacctgcccaagtccgccgaaccgatgctcaacatgatcgagtggtggatctgcctgtcgatgccgccggacgaggtcgagaagatcgcgcgctttcgcgaactgaatcccgcacagaaggcgctgatgctctcggcccgcaaggaggcaggaaagttcagcgagggcgtgattctgtccaagtcgatggaggtgctgttccgcgcagtaccgcccagcctctatttggcattggcccagacggagcccgaagagaaggccgaacgcttccagttgatgcagcagtacggcatcggtgaactcgaagcggccttcaaggttgccgagaagatcgaccgcgcgcgcggtatcgacccgctgccatacaacgacgtgttcgcctga

SEQ ID NO: 351433 - DNA, 735 bp, Pseudomonas aeruginosa
atgaccagcacatcgcattccgttgtcaagaaatcccagcgcacctggtggcttgctgcaggctgcgcggtgctttctgcgtcgttatggggattcctcgcatcgcctcggcctgcaggtcctgtggccgttcagcagaccggtgccgagcagatggccgatccgccttggcgctacggccccgcctcggcgcgcttcactatcgtcgtctacgccgatctggaatgcccgttctgtcagtcctacactcccgtgctacgaacctggatcgatgaacatcgcgacgtcagcctgcagtggcatcaccttccgctcgcgacacatgagccggctgccagcgaggaagcacgttgggtggagtgcgtgggagagacattcgggcacgctcgcttctgggaggccgtcgcctgggtgtatcagaatacgcgtggtggcggccaaggattgccgcctggcacggcctttcccgacgatgcaacggtgcaagcctgcttgaacagcgagcgttccgagctgacggtgcgccaacaagctgaccaggcgcgcaacgatggtctcaacgccaccccgtcgattcgcctgatcgaccgcagcacgaatcgctcgatgacgctcacagggccaatcgtgggtgacgcactattgtccgctcttgactatctggcttccgagcaactcgatgaggcgcaggcaacccagatgcccgctgagaccccaagcgccgacgcaaagtag

SEQ ID NO: 351434 - DNA, 1002 bp, Pseudomonas aeruginosa
atgccctatgtgattcagccgtgggaggccattgccccgaactaccgaggcaccgccatactgggaaatggcgccagcattgcggtaagcccgagcttttcctatggctcgctactggagcatgcgcgagcgaacgagctgattgccccggacgtcgagcggctgtttgcgttcttcgggacgacggatttcgagctgatcctgcgcatcgtgtggcaggcctcgaacgtcaatcaatcactgcagatcccggaccaacgaacgcatgaggcatacctgagggttcgggactgcctcattcagagcgtccaggctatccatcccgagttcgacctggtcagcggccatttgccggcgatctaccgattcctcaagcacttcgataccgttgcctcgctgaactacgacctcatcgtctattgggccttgatgcatggttacgaccatgacgaggaacacgccatcaaggactgcttcggcgcgggcgggttgttccaggacgattggcgcagactgagaacgccgattcggcgtcagcgatcgaccacgttggttttctatccgcatggcagcctggtgctgtgccgcaatcgtgtcgagcaggagcgcaagatccacaacgccgatgccgggctgctggaggccatcctgacgcgctggcgcagcgaagaggttgtgcctctgttcgtgagcgagggaacctgtcagcaaaaagttagttcaattcagaacagctactacctgtccacggtttaccgggaagtgttgggctcggagcgcgagacgctcgtcatctatggatgggggctgggagagcaggacatccacctgctgcagcggatgcgaggtacaggcatccggcgcgtggcggtctccgtgtacggcgcagaccagatctactgcaatcgggtgctgccgatcatccagggggctttgggtttggtgcctgtggagttcttcgacagtcaaagcgccgggtgctggaatcaccagggcgcctag

SEQ ID NO: 351435 - DNA, 408 bp, Pseudomonas aeruginosa
atgcgaaatatcattctcctgctcggtcttgcgctactggtctcaggcgcggccagcgcccaggaggtctgggccgtcaccgattcgggccatcgcgtgaccggcaaggccaccgtccaccgcctcatcgagctggacatgccgcagcacttcgaggctgagttggccgcgcagttgccgagcgatccgcagcgcgccgccgtgctggtccaacagcgcctaaagcagggcggccagcccctgcagaagcgcatgcgtgacgcctaccaaggcgtggccgacgcctggagccttggaattaccacactcccggccgtcgtcgtggaccagcgttacgtggtctacggcgagtccgacctcgacaaggccttggcacgcgtcgcacaacaccgcaaggacaagccatga

SEQ ID NO: 351436 - DNA, 942 bp, Pseudomonas aeruginosa
atgaagacccgtgttccccgccgactgcggatctctgccgctgctgcgctgctctgtggcgccacttcgagcttcgcgctcaacaccgcgaccatcgtgtcctcgacgctctcgcccgactgcctggagtaccgggtggtcggcatctgctactggctctactgcacctggacaggatgcactgtacgcacctcgatcaaggtgcggcactacattcccgacgcggtggtgtccagctactccaacacgggcgagaacccctggaccgagatgcgtgcgatgagcacgcccaacccgactgcgcaggccggcggagatggcacgaccaaccacgacaacgagaacaacctggccaagttcaagaacgccgatgtcatcggccatcctggcggccaggtattcagccagttcgcgagctcgtcgggctacgcgtgcgagggcgcaggcacggcattcatgccctacctgctcagcacgctggacaccatcgcgtggcgctacaacgtgccggaagccgtgtaccccgaagcgctgattcccggcatgcgcgagatcggagctcgcaccagcctgaacctgtggggagcggtctacccccggggcggcttcctgcaccagaccgacgaccataagtccggcgccgtcgttgcacagcgcgccggtgatgtcgtcacccgccgcggccaactgcacgtctaccaacccctcctcgccaacagccgcgatggctactggccggccggggcactggtggaaagcgacgcctcgaccggcaagtggcaggaacttacgccgcgcctgtcttcgtcttgcgcggtgttcccgaacagcggtccgctgacccaagcccagcaaggcgattacgcctgggcgctgtggcgcccctacagctgctgccagcgtcggggccaggtgttccttggcagcgtcgacttcaactaa

SEQ ID NO: 351437 - DNA, 1395 bp, Pseudomonas aeruginosa
atgaaccgtcaagacaacgcctccccgcctcgtcgtctgtcagcacgctggccgtcctcgctgctcgccagtgccctggtactggcaaccgggttggcttgggcacaagccggatttcagaacagcggcagcgtgatcggcgatgaggtcatgtactcgatcggaggcggcaacgccgtctcgatgagcggtgccgccggcatgcgctcgatcggcgtaggcgcgggttggaacagcaacctgatctgcggtgacatgagcatcagcacgacgatccagaaccagctcaacgggctcacgaacgggttccagaacatcatgagcaatgtgatccagagcgcgaccagcgcggttgcctcgctgccggcactgatcatccagcgtgccgaccctggcctctacaacctcttgaccaatggcgtcctgcaggcccggctggacttcgaccgctccaagctgacttgccgcgcgatggcagagcggatggcggacgcggctggtggacagctcggctggaaccagatcgccgaaggcatggcgctgcgtcaagcggtggccagcaccgacgcggtatcggccatcgagcaggcggagagcagccgcggcaacgatggtgtgccgtgggtgggaggcaataacgctggcggctcgggccaaccgtccatcaaggtcgtgggcgacgtgacgcgagcaggctacaacctcgtcaacggccgtggagtggccgatagctctttgatcgcggcggccacctgcaacagcctggcctgcgcgacctggtcgacgcctcaagctgcggcagactgggcgacacgtgtcctgggtgagaaggagcagcgcacctgcgagagctgcaccaagacccagaccgtaccgggcgtcggactgacgccgctgatccaggaagagtacgagaccaagctggaggtgctgcaggagctcatcaatcgcacccgcaacaccaccgtggaaaacctgcgcgcggccggcagcacgtcgctgccgatcactcgtggggtggtcgaggctcttcgcgacgaaccggaccaggacatcctttcacgccgcctcgcatccgaggtggcgctggcatccgtgctggaaaaggcgttgctgctgcagcgcactcttctgacgggcaagaaggagcccaacgtcgcggccaatgaacttgcggtggtcgccgtgaatcacgagagcgacacgttggaccgggaaatccaaaacctcaagaccgaactcgaactgcgccgcgagctggctaacaactcgccgatggccatcatccagcgccatggcacccgggcctctggttcgcgcggggtcttcgagggtgaccccacgcccgaccggctcaaccgtctgcagcggtcggcaccgagtggcacgccatga

SEQ ID NO: 351438 - DNA, 345 bp, Pseudomonas aeruginosa
atgagtgctcattggctgcgcatgaggtggctgttcaaccggcgcaacgcgaaggcagtggcatgggccgtcttcctgctgggcctcgcggtggccgccaatgtggccggcatttacctgatcggcagcgtggcgggctgggaacgctggatttcggcgtcggccggctacttcctggcgtggcggctttgcctctacgccgctactttctatggctggttgtggatgcgtaggcgcctgcttgcacgcgaggcttctcccgacgcgcgtcgccgcctggtgcgcgcggaggtcgcaggcgcgatcgccatcgttgttctggaagccagcctgctgcaggcgtag

SEQ ID NO: 351439 - DNA, 1524 bp, Pseudomonas aeruginosa
atgactcttttcaccaccgactacctcgagtactacctgaccttggtgggctggatcgtgcacaacgggatttggtccgtcctggtctccagcggcgtgttcgccattccctttgtggccatcattattcaggagtggctgaaggctcggtccgagggcgcagacgagggcaacaagggtgtgctgtcatccatgcgcatcgagaaccgcgtctgggtggcgatcgtcgtggtgatgtttgccggcattccgttcatcgacgtggacctcaacatgattcagctggatgaagcgcgctcccagcaatgccaggtcagcgtaccccagccttcggagacgggctggggccagtcctttagcacactcaacaaccagagtgcgaaggtgcccgtctggtgggccttcgtccatacgctttcgcgcgcggtcactggcgcttcggtggccgccatcccgtgtggcacggatcttcggcagatgaggatggagatcgacgccacgcgcattgacgatccggtgctggcccaagaggtggcggactttacccacgactgctacgggccagcacgggccaagctcttcatgaatcgcccgagcctggacgagtcccagatgcacgatgtcacctggatcggctccaactacttcgtcaacaccggcggctactacggcacctaccgtgccagcacacctcgcgatggttgggcctatgacagcaaccgcgatgcgggcctgacacaggtgcccagcggtgccggctacccgacctgccgccagtggtggagcgatggcggcaatggcctgcgtgcgcggttgcttgccgaagttgacccaaccctcatgaatcggctggccggctgggccggtttcctgagccgcgcccaggtcgatgactcggtgatccgtgcgatcgcctcgccgcgccagcagaagctcaaccaaggagcggtctactccgactacggcggtcagatcgacaagacgctgccgaacatcgtcacccgcgcggccggcgatgtgggtctggcggtgggctcgctgggcttcttccccgctatggacgtggtacggcaggcgctgccgatggtgctctcactgctgaagatggccctggtcatctgcatcccgctggtgctcgtggtcggcacctacgatctgaagacggtggtgacggtcagcgtggtgcagttctcgctgttcttcgtggacttctggttccagctggcccgctggatcgacagcaccatcttagacgcgctttacggatgggggtggggctggaaccgaccgcactcgaacttcgatccggtgatgggcttgagcaacgccttcggcgacgtgctgttgaacttcgtcatggcgtcgatgttcatcgtcctgccgactttctgggtaatggccctgggctgggctggcattcgcaccggaaacgttcttcaggggcttgccgggggaacgggagatgccaaagccgcgggcggcaagggttccggaacggccatgggtgcagtcaccaagaaataa

SEQ ID NO: 351440 - DNA, 759 bp, Pseudomonas aeruginosa
atgagtggactttctagacatcaggtaatcaagcatctgcaagcggaccttccgcggggggcaccgttcgatctgcaactgctcgaaaccttcggcgtttcgccccagcttgccgctcgctacgtagaaagcggctggctggtgcgcctcggccacgggacctacgcgtttcccaacgacaactttgacgtcaccggcgcgctgcgcttcctccaacagcgtgtcgcaggcttgcacgtaggcggcaaaagtgccctggccatgcaaggggtgcggcacaacctgagcacacgcgaagtcttagtgctgtggggagaggctcgcttcagcctgcctgcttggttcagcgcacgctttcctgccaggtatgtcaacgcgcggctgtttgactggcctgacacaggcgtggccgacaagactctgcacacgcctccgggccagccgaaggaactgcaagtggcggtgcccgaacgcgccgtactcgagatgctgtacgaagcgggaactcgacagagtctggaagaggttcgcaaccttttcgacggactgcgctcgccccgtaaggaaatactgggccagctcctgtcttgttgcaccagtgtcaaaaccgtacgcctgttcctgacttgggctcgcgagaccggcgtggttgatgtagatgcactggtacagcaatacccgctacgcaccggcagcagcaagcgttggatgagccgcatggacgacggcaccctactgagcctcaagcctcatggataa

SEQ ID NO: 351441 - DNA, 927 bp, Pseudomonas aeruginosa
atggataagcaatacgcggacactgtccgcctcctacttaacatcacccccgacgtgttcgccaacgacatcttcgcgatgaagggcggaacggccatcaacctattcgttcaggacatgccacgcctgtcggtcgacatcgatgtcgtctatcttccctggcaagttcctcgggatgaggcgctcatggccatcaatgaagagctagccgcgatcgcccaacgcgtcgagccactgggcatccaagcccgtttgattcgcagcaaggagctgggtgacaccaagctgattgccgaggacgagagtagccaggtgaaagtggaggtcaacgttgtgttccgaggcaccgtcctacctgttgcccaacgccccttgggcaccaaaaccagtgaccggttcggcgtggagttcagcgtgcctacgttggacgtggccgaactctacgccggcaaactggtcgcagctctcgatcgtcagcacccgcgagatctatttgacgtctggcgcttgttcgagacgggaggtatcaccgacgagatggtcgagtgcttcgttgtctaccttgcgggccacaaccgtccgatccatgaagtgctgttcggcaacgagaaagacatcgccaatgagtttgaacgtgcgttcgtcggcatgacagaacttgattgtccgcttgagcaactaataagcactcgcgctcggttgagacatgaattgcctaaacgcctgagtagcaagcatgagagttttctccgtgggctggcgcgtgcgcaaccagactggtctctgctgcagtgtcagcatgcggagcaactccccgcgctgcgctggaaactatcaaatttggtgaaattcatggatagcaggccacgcgatttactacttcaagccgacatgcttgatgctgcatttgagagtgttcggaagtag

SEQ ID NO: 351442 - DNA, 1824 bp, Pseudomonas aeruginosa
atgtttaaactgtttcagagaaagccaccagtagtaccccgcaccgaagtggcagttacggccgaaaaggtcaacggattcacgaatccaaagggagcagcggtgctgctcgccacgccacgccgccagaagctgctcgagcacatctggcgacgtacttcattgccgcggggaaaattcgcctcgctctatcaagtaccgttggaacgctacgccgaactagtccagcagtttcctgcatctgaaagtcatcatcatgcctatcagggaggcatgctcgatcatggtcttgagatcgttgcatatgccctaaaacttcgacagtcgtatttactgcccaccggttcaacaccagaagaccaagccgagcaagccgaggcctggactgcggcgacagcctatgcatccctattgcacgacatagggaagcttgcagtggatctgagcgtcgagcagtcagatggcgccacgtggcatccctggcatgggcctttgcagttaccgtatcgatttcggtaccgcgagaatcgtgagtaccgcttgcatagcgctgcgacaggactgctatacaaccaacttctcaatcgagaaattctcgattggctcagtgggtatccggcgctgtggtcggcgttgctgtacgttctggccggacagtatgagtatgctggtgttttaggtgagctagtcgtacaagcagaccgcgcttcagtggcacaagaactgggcggcgaccctgcacgagcaataacagcaccgaaacatgcccttcagcgcaagctattggatggattgcgttacctagtcaagcacgagctaaaactgaaccagccggaggcttctgacggctggataactcaaaatgccttgtggctcgtaagcaagaccgtttccgacaagctccgcgcacatctgctatctcaaggcatggatggcattccatccaataacactgccatcttcaacgtacttcaagagcatggcttattggttcctacaaaagatgatcgggcaatctggcgtgcagcagtcaataacaacgctggatggtcgcatagctttactttgctgcagatttcgcccgcattgttttggcaacctaacgaacgccccgcatcattttcaggaactgtgactactctcgatgaccaggaggacatcgacgcagcgattcctttgccgtccacaatgacagcactaccggcccattccaacgctaccgcacactggaccgcatccgatgatggggagactgaatcaattgatgggcagaactttcccggcacacaagcggtggatgatcttttgtcaattttctcttcccaagaagaaggaactgcagaaaattcgtcaccacgtccaaaacagtctccctcatgcgataagccgtcagtgtcatctgatgaaagatcattccaacagcctcctagccccgccactctgccttcagcaaagcactttattttctggctaaagcaaggccttcagtcgcacagaattcttataaatgacgcgaaggcccttgtgcataccgtcgctgagaccgcatacctcgttagtccgggtgtatttcagcgttatgcacaagagcatccagcgatttcatcaatggcaaaagcagaagaacagcagaattggcaatggattcaaaaacaattcgagaagcttcaaatccaccgcaagcagcaaagcggattgaatatttggacatgtgaggtagttggcccacggcggtcacggaaactgcatggttatctactggatgaccccaggcaaatatttaacgaatgccccccgaataatccgtacctccaagtgttgtga

SEQ ID NO: 351443 - DNA, 765 bp, Pseudomonas aeruginosa
atggacattcctcgagtattcagcattatggagagtgcgcaccgcattcatattccattcacccccgacaagttcgccacgttgggttcggcattgagtcttgaagcagggacgcaagtgcttgatctaggcagcggatccggtgagatgttgtgcacctgggctcgtgattatggcatcgtgggtactggcattgatatgagcccgttgttcactgaacaagcaaagcttcgcgctcaagacctgggcgtagctcaacaggttaagttcatccatggcgatgcagctggctatgtttccgaggacaaggttgacgtggctgcttgcataggagctacctggataggcggaggagtcgccggcacgatcgagcttctagcgcgaagccttaggagtggaggagtcgtcctgataggtgagccctattggcggcagttgccgccgacggaggacgtggccaagggatgtctcgcctactcgatctcccactttcttgtgcttccaaggcttatcgcctcgttcggcgagattggctatgacgttgtggaaatggttctggccaatcaagatggttgggatcgttacgaggccgccaaatggctcaccatgcgccgatggcttgaagcgaatcctgaggatgagctgactgagatggtccgctccaaactgacctctgagccggagcgtcatgtcacatacacccgtgagtatctgggctggggggtatttgcattgatgtcacggcgtccgttcgacgcggcttga

SEQ ID NO: 351444 - DNA, 765 bp, Pseudomonas aeruginosa
atgaattcattaaagggacagcgcgctctcgtggtaggcattgccaatcaagattctattgcgtggggctgtgccaaggcgctgcatcgttgcggagctaagttggcagttacctggctaaatgcaaaggcggaggtgtacgttcggcctcttgctgagcaattggacgcggagatcatgctgccgttggatgtcaccaatcccgatcaactggaagaggttttttctgaaattgatacacgatgggggaaacttgacactttggtgcattcaattgcctttgcaccaaaagatgatttaaatggtcgattaatcgactgttctgcaatcggtttctcgaaagcaatggacgtgtccgtccattcttttctacgcatgcttcacatggcagagtcacggatgaccaacggtggaacttgtctcacagtttcttttcttggtgcgaatcgggtagttgaaacctacaacatgatggggcctgtaaaggctgcgcttgaatgcgccatgcgttacgcagctgcggaacttggtgaaaaaggtatccgtgtgcacgccctttcgccaggacctatagcaacaagggccgcatccggcatagatgattttcatgagctgatggagagtgttatcaggcaagcaccaacgcatcgcttggccacaattgaggatgtgggggagatggccgcgtttctggcttcacccgcggcggggaacctcacaggtggagtgcactatattgacggcggctattccatcgttacttga

SEQ ID NO: 351445 - DNA, 1815 bp, Pseudomonas aeruginosa
atggctcaacacgacaaagatgcgcattcaaaaaaggatgacggtgagctccatgcagcatgggcgaaagcttggtcgcatttttcacctgaatcaggattgcttgcctggatggactggtctctacatctcgcatcaagtccggccaagctgaatgatttgattaagttgggggatgaccaagccaagcatctgtccaatttaatcatgcagtcttgcattcatgtggctcaaggcgatccgttgcctcaacttcccatctccaaaaaccagcgcttgactgatcccgcttgggatgagttcccctacagcctttttcgcgaagcctttcagcttcagtcgagctggtgggcagaggcaactcagggaatatggggagttgatccgaagtcacaacgtattgtcgaatttacaacgaagcaatggttggacgccctctcgccattcaatgttggttttctcaacccagttgtccaggagagaacgcgcgctgaaaatggtgcaaaccttttgcgtggattctccaacttaatggacgattttaatcgcagcgtttctggagaactcccgcctggagctgagaactttcaagtcggccgagacgtggccgtttcgccggggaaagtagttcttagaaatcgtctgattgaattaatacagtacgagcctacaaccgaaaaggtcaactcagagccgcttctgatagttccagcatggataatgaagtactacatcttggatctgtcgccacataactcacttattagatacctagtcggtcagggattcacggttttctgcatttcttggcgaaatccttcatcggaagatagagaactgagcatggaggattatcaagtgctaggtatccaagctgctctttcggcgatcaacgccatagttccgaagcgccaggttcatgctgcagggtactgtctggggggaacgcttctgtctatcgcagctgcggccatgtcacgggatggggacacacgtctggcttcactcacgcttttagcggctcagaccgacttcagtgagcctggtgagttggggctattcataagcgagggccagttggcacttctcgaagctcacatggctgtcgcaggctatctcgatgcccgtcaaatgagtggcgcatttcaaatgctgcgctcctacgatcttgtatggtcgcgcatagtcaatgaatacatgctgggagatcgtcggccgatgaacgatttgatggcatggaatgccgacaccaccaacatgccagcacgtatgcattctgagtatctccggcgtttgtatctcaataatgatctgagcggaggacggtatttggtggatgggcgccctgtttcgctaggagacatcaacctaccgacattttgtgtgggtacgacatctgaccacgttgctccgtggcagtccgtttataagttgcatctgttttcccagacagaaatcacttttgtactcaccaacggggggcacaatgccggtattgtcagtgagccggggcgtccacgtcgcgagtacctgatacatagacgcctcgcacgtactccctaccaagctccagacgaatggcgtcagattgcccaaagccgcacgggctcgtggtggcccgcttgggtggattggcttaacagtcagggtgggactcccgtcaatccaccaaggattgggaccgtaggcaaaggctatcgtccttgcggggacgctcctggaaattatgtcaaggagcgtgcttccgaagtggagcacccaaagagctatggagccaatgacgttagtgctttctcagagcctccacacagttag

SEQ ID NO: 351446 - DNA, 1722 bp, Pseudomonas aeruginosa
atgagtcagatcgcagacgctctaattctcgtccttaactgcgggtcatcgagcattaaattcgctgtattcgatgcgtcgcttccggttatccctcgcaaaccactttggaacgggaaggttcaaggtataggagaggagcgtccggactttggtgagacagggacggcaccgtatcgcatcaatctcagcactgagcacccgtttcgcgatgcgttggaacatatccttgagcaggtctttcatcgactgaacggacgaggcttatgcggcatagcgcatagagtggtccatggtggaagcaagtactttgcgccggtacgcattgacgctgatgtgttggctgatttgaaaagtttcattccattagctcccctacatcagccagtcacagttgaagccatagaacatctattgcgtgagcgccctgagattccgcaaatagcgtgcttcgatacggggtttcaccattccataccaaagctcgaacaggtgctaccgctcccatatgaagcttggcagcgcggtgttcgccggtatggttttcatggtttgtcgtacgagttcatgtcgacgactttggccgagcaatatcctcagacagcccgtgggcgcacgattgtcgcgcacctcggaaatggtgcaagcctatgcgccatgctaaatctggagagcattgcgaccaccatgggattctccgcgcttgacggactgatgatggggacgcgtacaggtgctgtcgatccaggtgccgttctttacttgatgagtaacgacaagctctcgcttgaccaagtcaatgatgtcctgtttcgcaggtccggcttgctaggtctttccggcgtatcggcagagccacgagtaattcttaagcatgagtctgatcccggcgaggccggtgaacgcgcacgcctggcgctagatctctatgtccgacggattgttcgcgagataggcgctttagttgccgttctgggcgggcttgatctcttgatcttcactgctggagttggtgagcacaacgactttattcgtgatcgcgtctgccgtgaccttgagtaccttggggtgaagattgatgcacaagcaaacgccctcaattcgcgagtgatctcatgcgcagatagccgagtcgtcgtaggcgtcgagccgaccaatgaagaatgggtggccgcacgccatgttcgccgcctgctgcgtttgccattttatcgtcctaactcttggaaaaaagctatgtactcgcgaatactggttcccctagatagcagtgaaacttctcatcacgcgatggagcatgccgccgatctagccaaaacgaatggtgccatgatcgttcttttgcacgtgatcgaggaactgagactcagcagcggctttgagccgccaaaggtctacatcgacgaagtatttccggggttcttgtccagaggtcaggcaatgcttgaccaagctgcgacccgcttgcggcaagatgggatcgctgtcgagacagcgttgattgtcagtaagggcgagcgcgtttctgatttgatagtgaagcaggtcgagagcacccgttgtgatgtcgtggtcattggcactcatggccgtagagggctggaccgtgtcctcatcggcagtgatgcagaacaagtcgcgcgcctcgcacctgttccagttctgctggtccggcagtcccatccggcgacagtaaatctgccagcgctgcaagaacaataa

SEQ ID NO: 351447 - DNA, 1407 bp, Pseudomonas aeruginosa
atgcaagatgtctccgtattgcgcaatcagattttcgatgagttggctgttggtgatgtggccagcatcgaacgcactctgaccgctcaggacgctcagctcttcgcgctgcagtccggtggcttcgagccgcccaacgctgatccgaagtctgatatgtctctccagtttcaaggtgttgttgctcatagcatgtgggcagcatcactgttctccggaatcctgggcactcgccttcctggccttggttcgatctatcgacgtcagaacttacagtttctgcagcccatcaggattggagactcgctaagagtcactgtaaagattcttcgtcttgatccgactgacctaggtgtcgttcttgactgccaatgcgttaatcaggatggagtcgttgtgatcgaaggcgaagccgaaatcaccgctacgcgagaacacattgtggttgaccgcacagcgctgcctgaagtgcgtctattgacgagcgcaaaggcaggctcgaaggcgcttatcgactatgcaaggccactcggtccgatccggatagccgttgtacatccctgcgatgccttgagcttatctgcagcattggacgcgcataaggctggtttgatcgagccggtcttggtggcacctgcggcacgactacatgccatcgccgctgaagcagcgctcgatctgacgagcctgtccattgttgacgtcccacatagtcatgccgcagcggcacaggcagtcaagatggcagcacagggcgaagtacaagccttgatgaaggggagcctgcataccgacgagctcatggctgcggtgctgacttcatcagcggggcttcgtaccaagcgccgcgtgagccattgcttcttgatgcagacgccattctacccacgcccgttcatcatcactgatgcagcaatcaacattgcgcctagtctgctggataaagccgacatcatccgaaacgcgatcgatctggcgcatgtcatcggtgttgagcggcctcgcgtcgcaatacttgctgctgtggaaaccattaatccatcaatgcctgccacgctcgaagccgccgcgctgtgcaagatggcagaccgaggccaaatcagtggcgcagtgctggacggcccattggctctcgacaacgccgtgtcgccagctgcagcaaaaatcaaagggattcgatccgaagtcgctggacaggcagacgtgttggtggtccccgatttggagagcggcaacatgctcgcgaaacaaatcgagtacatgggggatgcggccagcgccggcatcgttattggcgcgaaggtgccgattgtgctgaccagccgcgcggactctcgcgaggcaagaatctcctcatgtgccatcgccgtgatgctggccagctattacggcaactcaccgccgtga

SEQ ID NO: 351448 - DNA, 2400 bp, Pseudomonas aeruginosa
atgagcaatgaaacattcaacactcagcagtggacctcgctcatgagcagtccctgggccctgacgcaggccgcggcaacgtatacggtcgatgcatggcaaagggcgatcctgtacagcgatgttcggcgacaacggggtgatcagtaccgagcgcatctgatcgaagaaactcccaacgttctggactttcctagcgagttcgtaatgtccggcctggatctaccgcggccggtcaattacgtgatggtgcgcatcctgccaaccatcgaccaaccgactgacgagggcaaacgccctttcgtagtattcgacccgcgcgcggggcatggcccaggcatcggaggttttaaacccgacagcgaaattggtgcggcactgaaggctggtcatccgtgctacttcgtcggtttccttccagatccagtgccaggtcaaaccatcgaggatgtcactcgcgctgatgctgagttcgtgcgtagggcgagcgagttgcatcccgagagcgtagggaagcctgctgtgattggcaattgccaggccggctggcaggttctcatggcggccgcactatggccggacctgttcggccccatcatcgtggcaggtgcaccactttcatactgggcgggcaacaatccgatgcgatatgcgggtggcttgctaggtggaagctggctgacggctctgacaagcgatttgggagctggccggttcgatggtgcttggctggtgcgcaatttcgagagccttaaccccgccaatacatggtggagtaagcagtacaacctgtacgccaatgtagataccgaagcatcgcgctatctgagttttgagaaatactggggcgggtacgtttttcttaacgatgtggagatgcaatacatcgtggacaacttgttcattggcaacaagctgtcttcggcagaaattatcacctcagacggcatgcgcattgatctgcgcaacatccgctcacccattgtggttttctgctcgtacggggacaacataaccccaccaccacaggcgctgggttggatcacagatctttatagagatgactccgacatactaagccacgatcagaccattgtgttcgcaacgcatgagagcattggtcatctcggcatcttcgtctcaggcagcgtgggaagaaaggaacatcgcgaatttactgcaggtatcgacatcatcgaccttcttcctgctggggtctaccgtgcagacgtggtggacgcggagaagccagaagtcgctgccgatggcaacttcacaatgctcatccggcctagcagcgtggatgaggttcggtctatcgttaaaccagatccgcaaagtgaccgccgattcgctgctgcggagcagatatccaatatcaatcttggtctttaccggactttccttcagccctgggtaaaggcatgtgcgtcgagttattcggcacagtggatgcaagcactccacccactgcgactgtcctacggctggtggtctagcgcccatccattggctggagccatccagaaaactgcgcagcagattgaagaacagcgccatccagtagatgacgccaacccgttcctggtcgccgaaagggagctgtcgggatctattgaatatctgctggatcgttatagagaccatcgagaccagcttcaggcgttgatcttcgaaagtatctatggcgcgtcatgggttcaagcgtttgcggcacagggaaatttagatgacgagagcattcgcccacatcctggtgactccccagaacaccgtgatttcacggagcatgagctagcccaagctcaggttcgtatgtcgcaaggaggtttgctggaagccggcttacgcgctctgttctacgtgttgcgcaatcgcaccgaaggcaacgcgacacgctatcgccatgctgcacagctgagcgacgagcgacatgagaatgaacgctacgacatggccgagtggcgccgccttgtgcgtggccaggcgctgctgctggcatatgacatggatgcggccatcgccgcaatcccaacactgctcgtaagcgccaacgcgaatgaaatccacgcattggcctcatctgttgagcagatgattcatctcgctgaaactgaactctccgacgacgaacgaacgtcgcttgcacgcatgcttgcggtatttaacgttgcggcggaacagcgcaactcaagtgctgcaccgtctgagagtccgatacccaaggcaatcgacgccccagtgcttggcgcattgcagaagccaaagcaaaaggccgcttctcaacgagtaactacgcaacctaaaacgccaagatcgcctgctcagcaaaaacctaaggctcaggtcaaacaaccacccgccaagcgagtgccggcaaatcgtagaggacggtcgtga

SEQ ID NO: 351449 - DNA, 1086 bp, Pseudomonas aeruginosa
ttgattcaggccatcctgcaacgcaccggtgtggctgtccaagagatcgacgaagtcattctcgggcaggtgattaccgccggcagcggccagaacccggcgcgccaagctgcgcttgctgccggactgccgcatcaggtatcagcactgaccatcaataaggtgtgcggttcgggccttaaggcggttcagttggcggcgcaagccatccaagcgggcgatgcccagttggttctggcgggcggccaggaaaacatgagcctcgcaccctatgtcttgcctaaagcgcgaacagggctgcggcttgggcatgcgccgttgcaggacagcctgattcaagacggcctgtgggatgcattcaacaactaccacatgggcatcactgcagagaatctcgcggagaaattcagcttaacgcgcgctcaacaggatagcttcgccgccgcctcacaagacaaagctgccgccgccatcgctgcaggccgtttcaaggacgaaatcacgccggtgagcctcccgcagcacaaaggcgatcccattgagttcgacaccgatgagcaaccacgcgcaggtacgacggcggaggctcttgccaagctgaaacccgctttcatgaaggacggcaccgttaccgctggcaatgcctcgacgatcaacgacggcgcagcaatgctgctgctggccagcgccgacaaagcacagtctcttgggctgccggtgctggcttggatcaaggcatggggaaccgcaggtgtcgatcccgccatcatggggatcggacctgtcccggcaactcggcgtgcgttggaaaaggccggctgggctcttgatgaactggacttgatcgaagccaacgaggcatttgccgctcaagcgcttgctgtgtcccatgacctggaacttgatgcgtcgaaagtcaatgtcaatggtggagcgatcgcattgggacacccgatcggagcatcaggcgctcgcatcctcgtaagtctggtgcatgagctgatccgtcgagacgcccacaaaggattggcaacgctgtgcattggcggaggccaaggtatcgctttggcaatcgaacggcactga

SEQ ID NO: 351450 - DNA, 747 bp, Pseudomonas aeruginosa
atgagcgcggaaaaacgtaccgcccttgtaacggggggcatgggggggcttggagaggaaattgcgcgttcattgcatgacgccgggcacaccgtgttagtgacttactcgccgcagaacatccacgttcaggcgtggctcgcacagcagttggcgcacggttatgcgttcactgcctatgaggcggacatcagcaacgatgtggtatgccaaggcatggctgacaagatccacgctgatggccatcaggtcgacatcctcatcaacaacgccggcatcactcgcgacgggacgtttcgcaagatgaccaaggagagctgggacgcggttctgcgaaccaacctcgactcggtcttcaatgtcactcgtccattgctcgacaggatgttggaccgtggctggggccgtatcgtcaacgtgtcctcgatcaacggcaacaaggggcagttcggtcaaacgaactactcggctgccaaggcaggcatacatggattcaccaaggccttggcccaagaggtggcgcgcaagggagtaaccgtcaacacggtctcgcctggctacttggagaccaagatggtcacgacggtggctgaggatgttctgaagcagatcgtcgcggcaattcccattgggcgcctgggcaagcccaaggaaatcgcggcgttgatcgcattcatagtgagtgatgccgctgctttcatgaccggcagcaacgtatcgatgaacggtggacagcacatgtattga

SEQ ID NO: 351451 - DNA, 453 bp, Pseudomonas aeruginosa
atgagcatcgaagcacttcccttgaatctgtacaaggccaacaccgaacttcaactgcggctgacccggctgctgcaggagagtggccatcgctggcttgaagccacccagcaggcaagtagcgagaacatctctgaaacgacggcggagatcgaaggcctgttgcgatcggccaattggcaatcgttgactactttgccagccgagagtttctggaggctcttccagtcgcgcatcaccgatacgcagacgatcaaccagatcgcagtcaagaatcaagccgccttcaccgctggtgtgcagcaagcgttggaaagctggcaaaagtcggtgacggaggtggtgggagccaccacttctgcccagcctttcccggacattttcaagcaatggggtgccatttggcagcccgccgctgaaaacaccaaagccaaggctgagaaggcgggttga

SEQ ID NO: 351452 - DNA, 1125 bp, Pseudomonas aeruginosa
atgcgcagcctcatgaacatcctccggcttgggcgtaaggagttttggagtctgatacgagaccccatcatgctcctgctgacagcgtacatatttacgctcgacatctatagcgcagcaacgcttgtaccggagccactccataacgcatccattgcgattgtcgatgaagatcaatcgttgctttccgagcggatcgtctcggcgttttatgcaccgcaattcacacagccagagcggatttctgtggcggaaatggatggtggcatggatcgcggaaagttcaccttcgtcctgaacattccacccagttttcagcgcgacgtccttgctggaagagttccggagatccagctcaatatcgatgccacccagatgagtcaagccttcattgggcatcagcacgttgagcagattgtttacggggaaattgaagagttcgtcaaacgcttccgcaatacgtccgtgcagccggtcgacttggtggtgcgtgcacgcttcaacacgatgctggaagcgtcgtggttcggcagcgtcgccgaactgatcaacatgatagcgatgctcgccatcattctgacaggtgccgccctgattcgtgagcgcgaacatggaacgatcgagcatctactggtgatgcctgttacgcctggcgagatcatgatttcaaagatctggtcaatgggggcggtggtactggtctgcacgggactgtcgctcatcctcgtgatccatggagcactgcaagtccctgtccaagggtcattgcttctgttctttaccggtgcagccttgtgcatatttgccatgactgccttgggcatctacatggcaacccttgcgcgaagcatgccccagtttggattgcttttgatgctcacgctttttccgctacagatgctgtctggcggtatgacgcctcgtgagtcaatgcctgagctcttgcagaacctcatgctacttgcgccgacaactcacttctttgaattaggccaatccatcctcttccgcggtgctggattggaggttgtctggaagaactttctggcgttgttggtgatagggacagctcttttcgtcatgtcactacagcgctttcggaagacgatcagccaaatgggctga

SEQ ID NO: 351453 - DNA, 2754 bp, Pseudomonas aeruginosa
atgaacgttggggtgtctaacaaggccgttgcgcgggtgggtggactgagcctgcgctatggctccacggtcgcgctttccgctctggatcttgaagtaccgtccggatgcatggtcggcttgatcggccccgacggcgtcggcaaatccagcttgctgtctctactggccggcgcacgtgcaattcaggacggacagatcgaggtactgggcggtgacatgcgcagcaaggcgcaccgcgatctcgtatgccctcgtatcgcttacatgcctcagggattgggcaaaaacctctatccgaccttgtcggtggaagagaaccttcagttctttgccaggctgtttggccactcagaagctgaaaggcgcaggcgcattgacgacctgacgcagagcacaggcttgaattcattcttggaccgccctgccggcaagctttcaggcggaatgaagcaaaagctgggactgtgctgcgcactgattcacgatcccgacttcctgctattggatgagccaactacgggcgtggatccgttggcgcgcgcacagttctgggatttgattgatcggattcgcagtgagcgcccttccatgagcgtcattgtggccaccgcttacatggacgaggcccagcgcttcgactggctggttgcaatggacgacggtggtgtgctggccactggtacgcccaaggagatcttggagcgcacaggcagtgcaagcctcgaagaagcattcatcaggttgcttccagaagagaagaaacgtggtcacaaaccggtagagatcccaccgcttcaaaccgatgtggacgacatcgcgatcgaagccaaggatctgacaatgcgattcggcgacttcaccgccgtagaccacgtgtccttccgtattcggcgtggcgagatatttggcttccttggctccaacggctgcggaaagtccacgactatgaagatgctgaccgggttgctggtggccaccgaaggaaatgcttggctgttcggacatgaagtagatcccaaggatatcgatacgcgacggcgcgtcgggtacatgtcgcaagcgttctctctgtacagcgagttgactgttcaccagaacttggtgctgcacgcgcagctattccacgttcctgctggcgaaatcgccggacgcgtcgatgagatggtagaacggtttggcctcgctcctatcctcgacagccttccagacagcgtgcccctcggcatgcgccaacgtctatcgcttgccgtggcaatggtgcacaagccggaattgctgattctggatgagcccacctctggggtggatccggtcgcacgtgacgggttctggcacctgctggttgaactttcgcgtcgcgatcacgtgacgatttttatctctacccacttcatgaacgaggctgcgcgctgcgatcgcatgtcgatgatgcacgccggaaaagtgctcgacagtgatgcaccagcccggttggtggaaaagcgcggagccaagacgctggaagaggcgtttattggatatctgatcgaggccggcggtagtacatctgacaatgaatctgaggtggatggcagggctgagaagagttccgaaagcaagcctcacttggacgcagtgagcccaaaatccttcagcttgcagcgcctcctgagctacgcctggcgtgaggtactggaattacgaagagatcccatacgggcgacgacggcactggttggctctttgctgctcatggtcatgatgggctttggcgtcaacatggacgtcaaccatatgcgtttcgcagttctggatggcgaccaaagcgccgtcagccggagtttcatacagagcttatctggctctcgctatttcctggagcagccgccaatcagctctcaagacgaattggatcgacgcatgcggcgcggcgagctgacagtcgccattgagatacctcccggttttggccgagacctgacccgtggtcgcaaggtagaaatcgctgcctggattgacggtgcgatgccatcccgcgcagagaccgtaaagggctatgtgaacggcgtgtatgcccattggattgccgagcagtccggtctgcgcccgaactctgcggctcctgaacaggcttctatacaggcgcgttatcgctacaacccagatgttgagagcatcaaggccatggtgcctgcgatcgtggctcttctgctgctgatgctgccggccatgctgactgccctggccgtggtgcgtgagaaagagttgggctccatcatcaatctctacgtcacaccggtcacccgcacggagtttctcatcgggaagcagcttccgtatgtcggcctgggcatggtgaattttctgtgcatgtgtgtgttgtcgatcaccctctttcaagttccgatcaagggcagtttcatcacgctcacgctatcggcccttctgttttgcatcgtttcaacgggtatgggtttgttggcatccgccatcacgcgtagtcaaattgcggcgctcttcattgccgtgataggcacgcttattccggcgatgcagtacaccggcctcatcaacccagtgagttctctagaaggaagctctcgaacttttggggagatgtatccagcaacgcacatggttttgatcagtcgcggtgtttttagcaaagcgctcggaatgaatgatttgtacctgacggtgatcgcgatgggcatttccatcccgctgatcattgggaccgcaattttctttctgaagaagcaggagagatga

SEQ ID NO: 351454 - DNA, 1080 bp, Pseudomonas aeruginosa
atgaatatgtctatttccatgaaaaacaaagttttacctgccgtgttgatagcaggcgcgcttctagctggttggtggtactggtcatcgcagtctggcgatgcatatggcgaaggattcgtcagcggcaacggaagaatcgaagcgattcaaacggacatttccacaaagctcgggggacgcatcgagcaggtgttggtgcgcgaggggcacgtggtcaaagcgggtgagccgctggcacggatgcaagtggacatcctgcaggcgcagcgcgcagaagccgacgcggggcgccagagagctgagcacgctgtcagctcggcagaagcccaagtggcattgaacaagagcaacttggtcgctgcgcaagctgtggttgcacagcgagaagctgaactggacgcggcacgtcgccgcgtcgctcggtcagaggtcttgtcgaaagaaggcgcctcgtcagttcaggagttggatgacaacagagcggctgtacgtggtgctcaagcagctgtggcggctagcgtcgcgcaggtgtcagccgcgcaggccgcggtcaaagcgagtgaggcggatgtggtgggcgctcgatccgccgttgttgcagcactcgccacggtcacccgcattgatgccgacatcaacgacagcgagctgcgcgctccccgagacggtcgcgtgcagtttcgcgttgccgaaccgggtgaagtactaagccctggcgggacggtgctgaacatcatcgacctgtccgatgtttacatgaccttctttcttccagagaaagcggccgggcgtatcgaacttggcagcgaagttcgtattgtcctggattcagcacctgacaatccgatcaaggcaactgtctcctttgttgccagcaatgctcaattcacgcccaaatccgtagaaaccgccagcgaacgccagaagctgatgtttcgggtgcgcgctcaggtttctgaagatttcttgcgtcgccatgccaaggaggtcaaggcaggcgtgccaggcgttgcttgggtaaaactcgatgccgagtcttcttggcccactccacttgccattcgcgcgcaggagtga

SEQ ID NO: 351455 - DNA, 1533 bp, Pseudomonas aeruginosa
atgacttacaagcctggcgatcaaggcgctagtacgccacgcctatgcgcctctcggaggtctccaggcgcaacgcctctcggcagtgttgccgctggggttttgatcagtttgcttgccggctgcacctcgatggccccgccggatgcgactccgccgttgcctgttcccaatgcgtggctggacgtcagcacgcgaacaggtagcgaaggccgacaagcaactgagcttgcttgggaccagtattttgccgatccacttctgcgccaacttattgcaacagcgctggaaaacaacaaggatctgcgctccgcggtgctacgtgtcgaagaagctcgtgcagctttccgcatccagcgctccgagagtttcccaggggtaggtgttggagggaaagcagcacggtcaagagtcccggcagacctcaatccaccaggtgtaccccaggtgggcggggagtaccgagctgaggtaggcctcagcagttgggagcttgatctctgggggcgcgtccgtagccttaatcggtcggcgctggaaaactggttggctacggatgctgcgcatcaagctgtacggatcgccttgatcacgcaagtcgcagatggctatctagggctgcgagaactggacgatcgcgtcgcgatcgcccagcaaacagtcgccagtcgcgaagagtcctatcgcattttcgaacgccgatatcaggttggatcgacctccaaactcgctcttacccaagttcagacgcttctgaaccaggccaaatctctgcaggtgcagctcgccaagcagcgggcgaatcaatatcacgccctggcgcaactgcttggcagcggtactgacctccagtggtcggcaaaacaaatgcctgagcctgcggacttcgttgaattgacgcccgggcttccgtcggagttgctggtgagccgcccagatgttctttcagccgaacatcgcttgcgtgcggcgaatgccaacatcggtgcagcgcgtgccgccttctttcctcgtattgccttgaccggcacctggggcactgcaagctcgcagctcaacgacctgttcgagtcaggtagtcgagcgtggacattcgtacccacagtttccctgcccatcttcgacggtggacaaaggcgggccagtctcgagttgtccgaagtccgccgtgacatggcgatcaccagctatgagcagactgttcagacagcgttccgagaagtggctgatgcgctatccgatcaacgatggctcgccgaggagctgagtgttgcgcgcacctctttggatgttcagcaggaacgtgcgcgccttgcacaactgctctacgacaacggctctgcagcctatctggaagtgttggacgcacagcgcgacctacttgattcccagcagtcactcatccaggtacgtcgctcgttcctctccagtcaggtggcgttgtacgccgcgcttggtggtggagcagatcttgaatctcgctccatgcccgtacatcccgcacgggcagagacaccttcctccattcggtga

SEQ ID NO: 351456 - DNA, 573 bp, Pseudomonas aeruginosa
atgcgctcaagcaatcgtacaaagatcctcgacgcggcaattcgtgtcgtcagtcgagaaggaatcactgctctcacctatgagtcaatctccgccgaagccggtctgacccgcggtggaatgttgtatcacttcccttcgcgtgaagcattgctgttggggcttctcgaatatgtttcccagcaatgggaaagcgctctggaggccgcggccggaaaaactgcagaggaggctacgacgcaggagcgtttcgctgcatatgtgaaggtggccacccaaatgagtgccactcgcgtagagctgcagttcatggttgaaggttccaccagtcctgagctggcggccccttggacgggcgtcatttctcggtgggcaccaggctttgtcggcgagacaccggatcatgatgcgatgcactggattgttcgcttagccgccgacggtctttgggcatatgagtcaatcacgaaccaaaccatccctgcggagttgcgtgaacgtatcagcacgcagctgttgagcatgctccctggagcgtccgtcgccgacaaagacgagaagggctccgtatga

SEQ ID NO: 351457 - DNA, 1512 bp, Pseudomonas aeruginosa
atggaaatggcaaccctctcagcatcaaagcgatggctcctactggtcacagttgcgacgggcctgctgctggtcacagtcgactattcggtgttgtacaccgcgctgccaatcctcacgcgcgaactgcatgcatcgccgacggagggcttgtggatcatcaacgcctatccgctggtcatggctgggttgctgctgggggcaggaaccctcggtgatcgacttggccatcggaggatgttcctcgtggggctggtcatttttggcatcgcgtcgatagctgccgccttcgccccgagctctaccgtcttaattggtgcccgcgctgccttggctgtaggtgcggcggcaatgatgccggccacgctggcgctgatccgtatcacctttgtcgacgagcgagagcgcaacattgcgatatccatttggggctgcattgccatcgtcggtgctgcgctcggtccgatcattggtgggctgcttctgacgcggttttggtgggggtcggtcttcctcatcaatgtcccggtggttgtgctggccatcattggagcggtgctctttgccccgtccggttcgatcgaaagggaaaagccttgggatcttgtttcatcggttctagcgctagtggctctgtcggcgctgaccctcgggatcaagcatcttgcgcaggcccatcctgactggcttggcgctggcattgcttggttggttgccgctggggcggggtttgtcttcgttcgtcggcaagctcgattgcctcatccgctgctcgacttctcaatcttccgcaatccagcgttctccgcaggagtcatcgctgcggccctgaccatgttctcggtcggaggcacccaattggccaccactcagtacttccaattggtcgcaggctttagccccttgcaggcaggcctgcttgtgtccgtagtcgtggttggcacgattccaacggctctgatgggcggagcatttctgcacaagctcggcttgcgaatgctgatttccggcggcttggccattgcggccctaggggcggtcgccacatctgcaggtcttcactatggaatcggttggcttgtggctggcatggttttgaatggtgctgggctcggtctcgtgatggccgtggcgtccgccgctatcgtcggcaacgcccctcccgagcgagctggcatggcctcgtcagtcgaagaggtttcgtacgagttcggcggtctcatcgctgtggcgctgctcggtagcctattgggaatgctgtactccacgggcgtggagcttccgccaggtacgcctgacatcgctgcttcgggcgtcgcgcaggcttttgagctcgccacgcaaggggggcacacggaacaaacgattattgaagccgcttcatcggcatttgcaaatgcctacgtcgtggtgctctgggttgttggggcaatactgggtattggcgcagtcgtcgcacgccacatgctgcgtacgtatgggccgggctcatctgcgtcctcaattcattaa

SEQ ID NO: 351458 - DNA, 942 bp, Pseudomonas aeruginosa
atgctcatcaagcccaaaagggctcaatggagacgaatggaactacgacatttgcgttgcttcatggcattggccgaagaactgcacttttgcagggctgcagcgaggcttcacatcgagcagtccccgttgtccagagccatcaaggagcttgaggagcacgttggtgcacgcttgtttgaacgcaaccggcgagggacgcatctgacgccagctggagaggcattccagcgagaagcgaggcgggtcttcctcgcgctggaaaatgcgattgaagaggcaaaagctgccgcagcagggcaggctaactcttatcaccttgcgatttgcgacgggcttacccagccgagacttgcagcatttcttgcaaatctaagagaggagcaacctgagatttcggtgcgaatatcagaggtgacgttagcggagcaattgcgtggacttcgtgatggcacctttgatattggtttttctcgcatgagcagcgccgtggacgacatcgtttcagtgcctctatggcaagaaaggctcgtgctggccatacctagacgacatccattacttgcgtacgcaagagtgccacttgatgaactacttcgatacccattagttgggtgccacccggaggtgtgtgaaggctatttccatagcatcggaaacttattgcgtggatccagcgttcagcccacttttgtcgagcaagcaacatccttgagtatgctcatgacattggtagctgccggatatggtgttgggtttgtgactacccctcaatcggacgcttgcaaatgctccgacgtcgtcacacgcccaatatccatgcaaagcccaatgctgacaacattcctacttcgaaagatgcgtaaggacacgccagagagcctgacgggattcgtcgaccgcgcacttagggagttgggcgatgatcttagcgactgctaa

SEQ ID NO: 351459 - DNA, 1098 bp, Pseudomonas aeruginosa
atgcctcaagaggcagccgaagtggttgtagagcatctcggcactctctggtacgacgctgattcgggagagtctcgctacggagatgacgatccctggtttgtcctcaggtcgtcaatggctgaaccgctcgggcatgcctggcgcgagatggaggacagcctgcgctctgaagtacgctacttcaatcctaaggcgctgacgttgctcaacacgatcttcggcgagctcaccaatgatcgagacaaggaggggcagccggtcgtcatcgaagcaggaccaggtacatcattgaggacgctctacagggggcgagtgttccaaactgatgatgcgcttgtttccgcgcttcgttggcctgagcgctttctggggtcgccggcggcaggcctcggcgctgccggccgaatgaacgggcagggccagcctgccttctacggtgctacggctcctgatatttgcattgccgaggtacgcccgccagtgggtagccggattgctatggcggcattcgaagtgatacgcccactacgccttttggaccttcgaagactggctaccgttgagctcccacccggcactagcctctttgatccggcaacacttgctgcagcgcagagacgcgactttctgagaacgttgggcgagcgcctgtcgacgcctgtggtccccgaacagcaagatcgagactatctcgtgacgcaagccgttgctgactatcttgctgcccatcgcaacttggctgtcgacggcatcatctatccatcggcacaaagccgtcagccggatgagccaccggcaggcgataacgtcgtgttgttccgcaaagcttgcgatgtgaccctctctgatggcgagggcgcgacggcccaagtcgcgctatgggagtacgaggaggaagggcctggacgctggtttcgtccctcgatccatttcatggaccggaacgcatcgtggcatgggcaccgtgcggtacatccggcgctatcgttgaggcgggattcgattgttatttatgacatttctgccgtgcgttactacagcaagccgcatcccgtggaaagtgtcacttcactcaatgaccgacattatggatga

SEQ ID NO: 351460 - DNA, 2385 bp, Pseudomonas aeruginosa
atgccaagcaaacgggcgacaactgaagagacggaagccgatctggaggcacgcgtccgggcggcgatcaaagtggcatttccttggatgcccgacggcgccatcaagcaccagatcaagttcacttttaaattcggacggcagaccctggaagtcaatgccaggaaatcccgcgccgaggcccgtctcgacatccttctggagaaggatgaaaagcctctggccatcttggaacttaagagacccggcatcacgctgaccgatgacgatggcgcgcaagggttgtcgtatgcccgattggtccaacctccggcgccgcttgtggtgatcacgaacggcaccgacgtcaggatacttgaaacctccacgggaaatccctggcaaccagcagcaccgacagaagaagcgtttcaggacctcataacgcgagcgagccgcgtcgcaggtgccgacgtcaggcatgccgtcgataccttaatgggtaccgcaccgaatgtgtggatgcaggccgttcgcctcgtgtcctcggagacgatcgcagagctcacagcgtcctgggacgaaccagctcttccgttcgctgctgaattcctagctccacgtgctgcaacacatcagttgtggcggaacttggttgctggtgagcgattactgattctagaaggctcgcccctcactggaaaaagcaacgtgcttcgcgaactttgcgcacgcacggagcaaagcgatacgctcgccatcctgtacgttgagacgggtgttggaggtggtgcgctccagacattggccgatgccatctcgcgatctctgagttggcccgtgtctccactagaggcccgtaactggctgatccgtgtctcaaaccacgacggcgtgcgtttggtcttggcgtttgacggtttgcatgtggccgacaccacttccctgcgcgagatcgaagatctcacctccagcgctttcggcgcctcactgtcagtagttctcgcgatggatgacactgtggcgcagagcgtgctcaaagcacctaaccagcgctctctttctccattggggcgccgatccaaggtagtgcgagtgggatatctgagtgaccgggagttcaagcttgctcatgccctattgggaaagcgccgcttgtacctgatgcatggcgctgatatgagccccgagtatcgagagccatgggtgctgcgggcgatcagcggatatggtcatgcagcactcacaggcaaaccagatacgcaggccctctcactgccctcgctgctcgggccacggttgatgcggctcgtacgtacacgtttcgcaaacgaccatgaactgcgacggagattcaggggcttagcgcgctcaatgattgcggatgcacaagacagcacgcggccaccagaaattgcgctccaacaaatggagatgggtgtaatccgccgtgctgcggtaaaagcggagcttgaacccgatgatctgcagtggctgattgatcatggattcgttcgccctgacatgcacgacgtcgcaggagctacgattttgattcgactgccagagctgctggcaagcgagatggctcacgctctgacagatgaaatcgtgcagcgttcaaagaacgacctgcacgaaactgctgcctggatttccggtgcggcaagtaatcttccgctcggcgaagtggttgtggctcaagccgttgtagatgcggccaaacggccaagcggcctgcccgtcggcctcatcagtgccctagtggacatgccgccagagcgcgaggtactggatggaggtggccactatgcaatggcgctacctgatggcactttggtggacatcaagcaccagcccgatggcaaagcctttgtggtcattgaagggattcagcacgagattgatctcggtgatgaggaacaggtcgcctacaagaacatccacccctggctgattctgtctcacgtggcgtccacgcctttcgaggtaggaggagaacatggggtgagcagagaagacccgaatctgctcctgcagattgcgacgtgtcctatgcctcttcgaggaaatcgtggcccgcaatcgctgcgaatgctacccacggtggacttgcccaatggcgtatcaatcgtggatgcagaagctgggatcattgagcccatcacgctcggcatccttgactatctttccggcgatgaggatcaggcggacaactgggtcgcgactgcggccggctcgggctcaatcgctttgctctctcgggtgcatacggccctcggggtacttgcggctttcgagacacacgccagaagtgaatgggcgaagtcccaactcagcgcggtgattcttcccaaactaggtgaagcccttgatgatgcgggagaatcaccgccgcaaaactga

SEQ ID NO: 351461 - DNA, 1932 bp, Pseudomonas aeruginosa
atggcactctctgatctgatcgtccgccaggccaagtccactggcaaactctacaacctccccgatcttgatggcctgggcctggtggtctcaccggtcggcggcaagtcgtggcacttccgctactactggctcggcaagcaaaagcgcatctcacttgggaactatcccgagatcggcttgcgcgatgcccgcatcctgcgcgacgaagccagggccctgctggccaagggcatcaaccctcacaccgatcgcaagcagaagcggcacgccatccagctcgccgcggagcacaccttcaaggcggtcttcgacgcttgggtagagcatcgtcgcaaggaactcaaggaaggtcgtcagagcacgctctcgcagatcctgcggatctttgatcgcgacgtactgcccagcctgggcaagatgtcgatcttcgacattcggcggcctcagcttctaggcgtcctggcaaagatcgaggaacgcaaggccttcaccactgctgaaaaggttcggacttggttccggcagatgttccgctatgcgctggtgatcgccgaagggatggaggtcaatccagcctcggatcttgacgtggttgcggcccccaagcccccgacggcccacaacccctacctgcgcctgcatgaactgcccgagatgctcctgaagctgcgggattaccgtcggcgcggtctgcagacgcagttgggcatccgcctcctgctcctgacgggcgtgcgcaccggagagctgcgcctggcaacccctgagcagttcgacctggatcgtggcctgtggattattccgcccgagttcgtcaagcaattgcaggacgagatgcgcaaggctggcaagcgacctcaggatgtcccgccctatgtcgttccgctgtccctgcaggccattgaggtcgtgtgctatctccttggtgaaatgaagccagctcagcgctatctccttacgcatcgcagtgagctcaagatgcgcatcagcgaaaacacgctcaacagcgcgttgcgccggatgggctacgaagaccaactgaccggccatggcatccgtggcacgttgtcgacggcgctcaacgaggttggctaccccaagatctgggtagacgcgcagttgtcccattccgatccgaacaaagtcagctctgcgtacaaccatgccaagtacgtcgagccccggcgccggatgatgcaggactgggccgaccgcctggatctcctggagcaggggcatgtcgaggctgcgagcgcgcacctgacgatccatatcgaaggcgtgccggcaatggctgacgacgagaaactggccgaggctgcgattgcagcagcgatgggcggtgtgccgtctgcgggtgacgtgcctatcgttgttagcccggggagtcagggcgtcgcattccggcgcctatctcctgtacccatcgtgcagcccccggtggcgcaggaaccggaagtgtcggagatccagcgcgagcgagaggagatgttgacgatctacgagtcgccgagcagcttgcccgtgccgctgttcgccaagttggcgggcaagtccaaggaccagatcaaccgcgaactgaaggcgggcaagctgttgtccatcagcattggtaaccgcggacagcgcgtgcccgactggcagttgacgccgctcaagctcaagcttgcgcaggtgatgctgaagcatgcctctcatgctgaatcatgggcgctgtatcacctgctgacgaaacctcagtccgggctggacgatcgcgcagccatcgacgtggtgacgccgaccaacctggataaggtcgtgcaggcattgctgattgctgcacaaccggaaccggaggggctcattgactcgcctgagctcccggatcaagttcgtgaaagcgtgaggcgtctcgtgggcagtgcagccgtgctcgagactgtgtag

SEQ ID NO: 351462 - DNA, 153 bp, Pseudomonas aeruginosa
atgaacctgaaaccccattgcctcgccctggccctggcttgcgccggactcgccggcccgctcccggccctcgccgcgacgccggccgcggctcagtccgcgcaagtcaccagaccgtgtaaaaacgttggcatcgtccttgctgtgatttga

SEQ ID NO: 351463 - DNA, 726 bp, Pseudomonas aeruginosa
gtgccgcccgcacgcctggccggcgccgagggcgaggccgacgccagagaggcgcccacccaggccgccgccgtcattcgccaacccgaggatgaagcccacgtggatacggataccgcgctcgatatcggcaacgataccgagcatctgctacaggacgtgcagggcaccctggccgacctcgccggcatggcccagcaactgagccagcagaagcaggaagcgctcaagcagcaggagtcgctggagtcgctccagacgcaattgcacgagaaggagcggcaattgcaggaaaaggaaaagcagctccggcagtggcacaagcgcctgcaggacgaccgccaggcgctggagcgggaaaccgagcagagcaaccgtctcctggccgagcgcagcgcggccctgcaacaactcgcggaaagcgtcgaagcccgcgagcgcagcagcgcgcggcgagccgaagtactgcagatcgaacaggaacgcctcgaagagttgcgcagccagcagaacctgcgtcaggccgaactggaaaagcgcgaagccagcgtccagcagcgcagcctggaactcggcgagcgcttcaagaagctggaaagcgcccgcgagaagctggcgcagatcgtcaagggtttcaacgagaccgtacagttcaataccgctctgcacgccatcagtcataccgggttgaagcgccaggaagagagcgcagccgaactggaataa

SEQ ID NO: 351464 - DNA, 378 bp, Pseudomonas aeruginosa
atgtaccgcagcgccctggatttccgccacttcgtcgaccacctgcgtcgccagggcgacctggtggacgtgcacaccgaggtcgacgccaacctggagatcggcgccatcacccgccgggtctacgaacgccgcgcacccgccccgctgtttcacaacatccgcgacagcctgcccggcgcgcgggtactgggcgcgccgacagggcccgcgcccattcgcgcctggcgctgcatttcggcctgccggaacacagcgggccacgggacatcgtggccacgctgcgcgccgcgatgcgcgcggaacctatcgcgccgcgccggctggagcgcgggccggtgcaggaaaacgtctggctcggcgagcaggtggacctga

SEQ ID NO: 351465 - DNA, 351 bp, Pseudomonas aeruginosa
atggccaaggatacccgcgatacccagaccctcgacgccttcccggccaagccgtccaggggccggcctcgcaaggctgacgcgctctccaatgctgagcggcagcgtctctaccgtcagcggcaggcgggcaaggcaccccaggtggacgcggatgccctggtccgtctgcagaacgaattcgaccggcacgttgatgatgcgcgcgccctggtcgcccatcttcgaaataccattgcgcagatggagcttgaggtggatctgtgccgccaagagcgatccgatgccatgcgcgtcaacagcatttaccgcgagcgcctggagcttgctggtctccctacagactactag

SEQ ID NO: 351466 - DNA, 351 bp, Pseudomonas aeruginosa; identical to SEQ ID NO: 351465

SEQ ID NO: 351467 - DNA, 1062 bp, Pseudomonas aeruginosa
atgccccgcctttccgtcctgctgttcctcgccctcgcaccctggctggcccaagccgaggagaccctgcgcgtctacaactggaacgactacatcgacccgcaggtgctcgagtccttccagaaggacaccggcatccgcgtcgaataccacaccttcgccaccgccgaggaactggacaaggcgctgcgcagtggcgaggcgatcgacgtcgccgtcccctcccacgacaccctgccggccctgctgaaggacaacctgctgcggccgctggacttcacccagttgcccaaccgcagccatctcgaccgtcaattgctgagcaaactggccgcggtcgaccctgacaaccgccacgccgtcccctatctatggggtgccgtaggcctggccatcaataccccgcaggccgaagccgcctatggcgggccgctgcccaacagctggagcctgctgttcgacgccagccagagccagcgcctgaaaagctgcggcatcagcctgctggacgcgccggacgaaaccctggcgatcctcctcaactaccagggccgcaacctcggtcgtaccgctccgagccaggtacgccgcgccgccgaggcgctgcacggactgcgaccgaacctgcgctacgtcgacagcgagcgctacatcgccgacctcgaaggcggtcgcctctgcctggccatggcctgggtcggcgacgccctgcgcgcggccaaggcgggccagccggtaagtttcgaggtaccgcaggaaggctcggtgctgttcatcgacaacctggtgattccggccagcgcccagcatccacgacaggcgcaccgcttcatcgactacctgatgcaaccgaagatcgccgcacagatcaccgccgccaccctctaccccagcggcaacgccgacgccgccggcttcctcgatcccgccctgcgccagcaacccggcctgtatccggaccgcgacaccagccgccgcctgttcgccctggaaacgccgccggaaaaactccggccggtggtcgacgagatctggaaggccttccgcggcgccagccactga

SEQ ID NO: 351468 - DNA, 318 bp, Pseudomonas aeruginosa
atgagcctgccgggtcgcgagcggcccttgcaggcacgcctcgccagcacccataacagcgccggcctgccggtctggcgcggcggcctggtggacggcgacgaggcggaaagcctgaccgtggtgcgcggcagcctggagacccacatcaatgtcgccaccctcgacggcagctactcgatcatcgtcgacaaccgcagcggcaagacccgggtgatcgacgagaacgacatcgccgcgcgtagcgacccgcatggcgatcatgtcgacgcgccgctcgccgagctgccaccgatgccgccgcccgcccagggctga

SEQ ID NO: 351469 - DNA, 234 bp, Pseudomonas aeruginosa
atgatcggcctggccatgctcatcggccgcttcggctacatcctgccgatcctcgccatcgccggcagcctggcggcgaagaaggccagcccggtggggccgaacagtttcccgacccatggtccgctgttcgtcagcctgctcaccgtgaccatcctgctggtcggcggcctgaccttcctgccgaccctggccctcggcccgatcgctgaacaactgagcctcggcttctga

SEQ ID NO: 351470 - DNA, 1362 bp, Pseudomonas aeruginosa
atgaacagccacgagattctcttgatcctggcctttttcgccctggtcctggtgcctgcaccgttcctcgggcgctactgcttcaaggtgatggaaggccaacgcaatctcctcagcgcgccgctggcgccactggagcgcgtctgctatcgcctgttcggcgtcgatccggcgagcgagcaggactggaagacctacaccctggcgctgctggcattcaacctggccggcctggtcctgctgttctcgatcctcatgctgcagggcagcctgccgctgaacccgcagcacctgccgggcctggaatggaccctggcgttcaacaccgcggtcagtttcgtcaccaacaccaactggcaggcctacagcggcgaggcctcgctgagctacttcagccagatggtcggcctcacggtgcagaacttcgtcagcgcggcggtcggcctctgcgtgctggtggccctggcacgtggcatcagccgccgctccacacgacagctgggcaacttctgggtcgacctgacccgcggcaccctctacgtgctgctgccgctgtgcctgctgctggcgctgctgctggtctggcagggcgtgccgcagaccttcttcgactacgtccatgccaccaccttgcaaggcgccgagcagaccatcccgctcggcccggcggccagccagatcgccatcaagcaactgggcaccaacggcggcggcttcttcggcgtcaactcgactcatccgttcgagaacccgagtgcctggagcaacctgttcgaagtggcctcgatcatcctgatcccggcggcgctggtattcaccttcggccattacgtgaaggacctgcgccagagccgcgcgatcctcggctgcatgctgctgctgttctgcctcggcctgggcttgtcgctgtgggccgaataccagccgaacccggcgctggcgcagttgccggtcgagcagggtgcaccgatggagggcaaggagagtcgcttcggcaccgccgccagcatgctctgggcgatcaccaccaccgccgcctcgaacggctcggtgaacgccatgcacgacagcctgagccccctgggcggcatgctgccgctgctgaacatgatgctcggcgaggtgatcttcggcggcgtcggcgccggcctctacggcatgctgctgttcgtcctgatcgcggtgttcctcgccggcttgatggtcgggcggacgccggagtacctgggcaagaagctcgaggcgaaggaggtccgcctgctggtcttcaccctgctggtgatgcctgtcggcgtgctggtgctcggcgccattgccgccagcctgccgggaccggcctcggcggtgaccaaccccggctga

SEQ ID NO: 351471 - DNA, 489 bp, Pseudomonas aeruginosa
atgactgccaggatctaccgggaagtcgtcaacccgggaaaactcgacgaaacacagaggggaaacctcgcaagcgaactctacgcgattcacgccaggatctttcatggcgtccagtatgaatccttcgctcgcgaggtcatccactccaccgcccgcctcacccgcatcgccatctaccgcaaccgccagcacgagatcgtcggctactgcgccgtgcatttccacgactcggaagtcttccagtacagcaaggcctgcgtgatccgcgccgagtcggggatcctcccggagtaccgcgggagcaaccagagcattcccttccttacccgccaggtgctgcgctacaagttgctcaaccccggcaagcgcctgctgttcctcgacacgctgatccatccctccagctacgccctggtgaccaagtacgtggatgacgtctggccccaatgtcatcaactttggaaattatccataaatatcatataa

SEQ ID NO: 351472 - DNA, 369 bp, Pseudomonas aeruginosa
atgcgtctggccatgtcacgcggtctgcccaaagccatccgcacggataacggcaaggaattctgtggtcgggccatgctgacctgggctcatccacgaggtgtacagctgttcctgattgaaccaggtaagcccaatcagaatgcctatatcgaatcctttaacgggcgcttccgtgacgagcgcctgaacgagcactggttcaccagcccaccacacgcccaagtgggcgtcggagcgtggcgacgggaatacaacgaggaaaggccaaagaagggtctcggcgggttaaccccgtctgcctatgccaagcaactgatcgcgaaagccgttaaattgatccaggactctaaagccagctgctactga

SEQ ID NO: 351473 - DNA, 138 bp, Pseudomonas aeruginosa
atgaaaaaacgtttcacacaaaagcaaattattggcttcccgcgcgaagcagaggctggactgccgatcaaggagctgtgtcgtcggcacggcttttcagaggtcagttactacctcgtagcaagtttggcgggatga

SEQ ID NO: 351474 - DNA, 885 bp, Pseudomonas aeruginosa
atggctagcgcaatcaacgacagactccagaaaacgctgaacggtctcaatgtagatagcaggctaagtacttggctatggctcttactgaagagccaaacctcgcacgccgctcctaggaaaccagaggaactaaaggaactcgtgaaaatcggggaactcggcagccctggcatgcgagatcgtatggcagatctcatccagaagactcaaggaagcgtagaatttattgaggaaaatagcgccttattcttgctgccagaaaaagatttagagtggataacaaacaataaaagacaaaatttatttatatctagaaagcttattgaaaaatacggttatcagcccatcctgccgccaaccaacttgacgggcagagattttaccattgccatggtggatatatgggcaatagaaaaaacccacaagtcatggaacatcaatcaaataaaatttgaatgggaacagcactcgagatcagaccagatattcaaatggtttgatggcagcgacatcgagcaaaggctagaaaccgcatgggtaataactaaaaagaaattcccactcctggcataccaagaaaacgccccaaaagaaaaagaagaatttataatcttactcgaaacccagtccattaccacatcagataaaatactactcatggagtccatcaagaaacgatggagccaaaataaatatcgagcaaaattaacaggaaaaaagcaatacaacttcatcctatctgaaaaggcaattaatcgccttgacaagctagcggacaaatatgatttaagaaaaaccgaagtactggaaatacttctgcaaatggaagaggaaaaaggaatttatattccagaaaggaaagcactaactaaattgacctag

SEQ ID NO: 351475 - DNA, 1326 bp, Pseudomonas aeruginosa
atggccgagatacgacgcccgctgtccgcggtggaacgctggtactggctcagcgaccagttctccgcgctaaacgtgatttcccgggtgcgggtccatggccagttgtccatcgacgacctgcgccgcggcctcgacgcgctgcaggcgcggcatccgctgctgcgcgcgcggatcgagcacgatgccgggctcgacccgcgctgggtgccctgcgagcggcccatcccgctgcgcgaggtgcgcggtggtggcgaggagcaatggctgcgggaaatcaacgagcgcgaattgccggaacgcatcgatccggacagcgggccactgatccgtaccgtggcgatcaccaccgacgccggtgcccacgacctgctggtcgtggtaccgcacatcatcgccgacggcactaccgtgctgaccctcgccgaacaatggctgaccctggccgccgaccccgccgcgcaaccctggaccgccagcgccctgccgccggcggaggatctgcgtccgcgccgcttcaccggcgacgaaggcgcggcgcgcctggccgagcagaccgcccgggacgaagcgctggtcggccgccaccgcccgggccggatcgagccgagcaacccggtgccgctggaagcgcggcgtacccgcctgctgcaccgggagctggacggcgcgcagctggaacagctgcaacgacgcgcccgcgaacacggcaccacggtacacggcgcgctgaccgcggcgctggccatcgccgccggccacgaccaccagcgccgcccgagccacatcgccatcggctcgccgatcgacttccgcgacgaactggagccgccggtgcgccccgacgaagtaggcacctacgtcgccacggtaccggtggtgctggacatcgcccgaccgttctgggaggtcgcccgcgcgctcaccgacgacctcggcgaacgccgtcgccagggccatcatttcaacctggtcaccctggtcgccagcgctgcgccgcgctgcatggccgacgcgcggccattcatggccttcatggaagccgaagggccgatcaacctgtgctcctccaacatcggtcgctatccgttccccgagcggatcggcgccttgcgcctctccgacgcgcagttcctcaccggcatctcggtgaacggctacttcgtggccgccatcaactccagccatggccggctgttctggaacttcacctatatcgacgaagcggtccccggcgaacgcgccgaacgcctggccgaagattgcctgggcaccctgctgtcggcgatccacgccccccaacgatccgccctcgaggagcaatga

SEQ ID NO: 351476 - DNA, 1143 bp, Pseudomonas aeruginosa
atgattaccaacctgcagctcaagaacttcactgcctttgcagatctgaccatcgacttctcgccgggcatcaacatcgtgctcggtgagaatggcacgggtaaaactcagctgctcaaggccattctggccttgagcgggcaagaatactctggggcgcaggttggcgagcagttggcgggtaagctgtgtcggctctatcacccgcttaacaaccaacttggcgaacttcgccgtgcaggcactcgcgctggagccctgctcagcgctacctatgcatccggtcaactcatcaccgccaaattcaacggctccgctaccgaagccaaggtcagcgttggcatgggaagtgggcggcttgcgccagccattttcatccccaccaaggaagtgctgtcgctggtgcgcggcttgactgctgagcagccccacctgcctaccattgagcgcatctttgacgatggctatctggatttggcaaacacgctgcggaaagaagatgacgggaatctgcaaaagaaaactcagaccaacccaaggttctccagcatcgtcccgagattgaccaatctgattggtggacgctacttacttaaagcaggtggcttctgcttccaagcgggcatgtacgtcgatcagcagggtgagagtgctgctgatgaggaacttgcccctcaaagcttcaaagattcgaagcttcgcttcgtaccaaagcagtcgccactgatgtccagtggcatgacggccgagggcttccgcaaaattggcgtactgcagcgcctgctcagcaacggcagcctcaaccccggcactactggcccgctgttgtgggatgagcctgagtccaatctcaaccccaagctgatgaaggatctcgtgttggccctgctggagcttgcccgcaacggccagcaagtcatccttgccacgcacgactatgtgctgctgaagtggtttgacctgctgatgaataggggcaagggggatcacgtggtcttccatcgcctttatcgcgaagctggcagtgatgacatccagcgggaaagccaggcggactacagcattgtcggtcgtagtgctatcagcaacaccttcgctgagctctacgacgaagacgtcaagcgtgcgttggggggcgagtga

SEQ ID NO: 351477 - DNA, 1506 bp, Pseudomonas aeruginosa
atgaaaaagacgaaaggaagctcttctaatcgctacctcgggatttatcagatatccagtgatcaaaacctggtcggtgagttagcgctcaatggagaaggcacaatcttgaaggttcatgccaatgagccccttcatgtgggaaacgttgagcatgtaaatgggatcgcttatacaggggactacatcactcttatcgattgtcttagctcggggcatgggtcgcgttattcaagggatggttcatgccggtatcacgctgacatccttccacactatgtatcaattggctcctctcatcttgatccagaggcgtcatgcatcaaagcaattcactttacagctacggatttgcaggatctgttctatgactttgacgcattcagcactgttataaatgcgcgcccaattatcgattctgttctgaaagagcgccgtaagatgcgtcctgtccaagccggagagcatccaatagttgcttactacacgggcaaggggtgtgtgattgaggcgccatcgtccataggtaagatttcagtccatcaccggccaagctatggcatgggagggcctgccggtgtctacatcaagaacaggatggttgtgtcgatagaacccagcgaaccagccacactctctgaaagtctccagagaatgtatgacatcggttgctttctctccgtagtggcagggcgcgctcaaggtataaaacacattcaactagaaactttgcagtcggttgacggcattccagtagtactttcagtatttccttgcttcccatggaaaactggtcggaaaagcgagtactacaagcctcatcccggagacgtgccactagatccgattcatgccccagaagagttccgcgccgtcttggccaactgggttgaacgccacgaatcgtggcatacagcacgagcgcgatatctaggctgccttcgcaaaggaaataactacgactttgaccgacttgtggccgctgcgaatatgttcgacattcttcccgcagatgcagcgccagctaaaaaccaactatctccagagcttgttgaggcaaagctagcttgcagggaattgctcagaaaaattccacagggggttgatcgagatagcgtgcttggagcgttaggccgaatgggacagccatcgctgcccaaaaaggtggtttaccgtgcaaccatcgtggagagtcagttgggggataaagtccctgatcttgcgttcgcagctggcatcgccgtcaaacttcgaaattattttgtgcatggtagtttggatgggcttgaatacgaaaaaattgaacctttcctggcctttttaacagatacgcttgaattcgtttttgctgcatccgatctaatagatgccgggtggagtgcccagcattggtcacgtaggtctctcggttctggacatagcttcagtcgttttctaaccggatataaacacctgcttggtgagcttcgaatcgccacaatcccagatgcgcaagcggccacctga

SEQ ID NO: 351478 - DNA, 1335 bp, Pseudomonas aeruginosa
atgggggtcgcgttccaccatgccgggctccctgacatagccagaattgaggttgaagagctttactcggacaacgtgattcgacatcttgtgtgtacctccacactgctccaaggcgttaacttacccgccgacaagctgatcgtaatcaaccctgccaacgataaaactccgctaacttcttttgagttcatgaaccttatcggtcgtgcgggaagggttagcacaaacttgtatggtgaggtctactgccttgatgttcaggatgaggagtggggacaggatcggctgaatgacgacaagaagaagagcattcgccccagaacaatttcatcgcttgaggataaaacggctgaactccacagctatgccacaaagaaaaagcgcgaaattctagagactgaggacggcagaaagctttacccgtcggtctcttatctgcgtcatctatatgcagctgataaggcacattttgaacgactgctggcgacagcatcgcttacaaacgctgaagctattggcttatcgagtgcattggaaaaatctgtctctaaactccagatcccgacgcagctcctccagcagaacccatatgtggatccgctgcttcaggatgaactctatttaaggatcagaaatgactctatttctgcctggatccccaataaatatccattgcagcgtcaagctgaagatttttccgagtctgaaatatctccaatttttgaagaactcaccttttatcgtcagtttgaaagcattgccctgagactcaacgaaattttcgacattgaagatgaggtaaatcacggtaagttcaatgactacatttccattggcaggctggtctttgatgcctatcaatggatgtctgggaagtcacaccgcttcttcattgatgactacatagaaaataaaaacaaacacgagcaagagaatggtgaaatcgcatcaagcgaagaagaaaacaaaattgatagagcagcaagatttgtaaccggacacataagtagagacatcacctttatcctagtgaaatacttctctctatggtcagacgtggtttcatcattcttgaatgaaaaggagcaggagaaattcgcctacgctctgagtctaccctcaatgattgaactaggaagttacgatcccaaggtgttggagctgatgtcactaggtatcaacagaagcattgcccttagactcaagaagtacatgaaaggcgatattgaagataccgagaagtggctgtatggattcaacatccatcagcttccttcgcttctggccagatacctttctcgctccggactcacaaaggaaaagtacagctag

SEQ ID NO: 351479 - DNA, 1335 bp, Pseudomonas aeruginosa
atgaatagtaaggctgaggatgtttcagaggaggcagccaaggattacgagtttaccagcgtttacgacgagctattggagatactgtttttcaagaaaaaacccgggctgaaatcgagcataaaatcaatagagccggggcgaatccaaaaagcaacttggctggcgtctattgtggccctaggtgcttccgagagattaaaaaacctagcaaactcgtttggcgctctattgtatctttacgccccagacaatccggtatatcagaaagcctgttatgttcttcagtcccgatccggaaatctaatctccagccgccacgtgcctaacatctttcatagcggaaaatacaaagatagttttggtaccatgctcgatgtagagctaggggcgcgccgagggcgctttacacataccttccgcgacactgagaactttgtctttactgagtatcaaaatagactgtggcgagagatttcagcgggaaggaatgtggcaatctccgcacctacctctgctggaaagtcgtttattattcgtcggcacatagtcgaatcccttctgaagtcagttggtatagcgctatacatcgttcctaccaaagcgctaattaaccaaataagcactgacttcaagaacgacttgaagaacgaagctcatgtttatacaacttatagacccagcgacgacttctccaagtccaaagtattcgtactcacgcccgagcgatgcatgaagcttatgcaggacaagagctttcctgtaccaaccatcgccttctttgacgagatccataacctcgaagaccagagccgaggcttaatatttgaaaatatacttcaccgcctagtaagacgctgccctagtgcgcaattcatttttgccggcccgtatatcgaggacattgtcacgccaattaaccaggtgtcgggcttggttcttgtcgatgagactaccatcgcttctccagtgttccagattaaagcagcaattacctttaaacctagatccaagatggctggctatcgggtattcagccagaccggaaatattattgaaggtgaaattcctttaaagagagctttgtactcaaaaaccaaaaacaatcaaggcgaagccattgctagctttctcgacaacctaagcaagaaagaaagctgcattatttttgctccgcgaaagtactccgctgaacgatgggcattgaagatcgcaccgataattggtatgtcaaccccggagatcgtggaaggggccgatcaacgcgttattgacctaatcggcttcctagaagatgaaatccaccccgagtattgcctcataaggatggtctga

SEQ ID NO: 351480 - DNA, 1029 bp, Pseudomonas aeruginosa
atgcacgattttgacgatgaagactgggagaagcatctcacagttaacactcaatgggtggataagtttttccatcaagtacctggagtgggagagtttaaagtcaacgctcgcgcgctctcactaaagttttcaggtacaaagcaggattgtttgtcactggctgatcatctatccaattcaattgaaagctatgttttcgatcagcagcaattagccgtatttaaagaagagggtgttcccgcttacaagcgagcctctagtttttttggaaacaccaatccggttgttgatggaaagtacggtgagctcatgttgtacatgcttgtcgaagccatattaaagacacctatggtctcccacaaactccagttgctgacaaacgtcaacgaccaagtaaaaggaggggatgggatcttttttggcaaatatgctaatcatatttccattctaattggcgaatcgaaaatccatcaaaggctgcaaggcgctcttgccgattccatgatgtcagttgacagattcaacaaggactatgcggcaagctcaatagagcatgagttatttatcgcgcgctctaatatctcaaagaacttctctctcgaacaagcgaagaaaatatatgaggcattcaagcccggcactgcggaataccaggcttgcaatagggtgcatccggttcttcttgtctatgactgctcgaaaattgatgaaattgaaattcaggcatccggaaaagctcatgcagaggaactggtgaaagcatggattgcagagcacgcaaaagaggttcttgaaaacatcaagtctggattctccccctatccagacctaagaaaggtttacctagacttcttcttggtgccgatgagtaatgttggcacattcaaaaaaacgctattcaagtctattcacggaatagaatttaaggagtcggtcaaggaaaataaatctaaaacgccatcgaagagcgctgcgactccacgaagaccgagaaagcaaacatccaaggagatagaggatgaatag

SEQ ID NO: 351481 - DNA, 1641 bp, Pseudomonas aeruginosa
atgcccaccgcgcttcctcccgagctctactacctcagcaacttccgcagcgcgctcgcctgggtgggcgagcgttatgccgacttgctgactacggaggagctggccttcattagcgatttcgaggcggcagagtggcgggcacaggcactgttggtgcgcatgatcatgcgccggggctgtcattttcgcctgagcaagctcgactaccccgagattggcgattgccatgctgccgccctccccttgcttgaacacgactgggtcagcgagcaggctcctctcactgcagtggaagttgccgaactgcttcgcaaagatgaattgctggctcatctgccgctgctggaccggcgctcttcgcagacgaaggcggagctactggaccagttgctggctcaggacttaccagcccagcccttcacagcttggtgcccggcgctgagtgatcggctgctgagcctgcaggtcgatgagttgtgcaaccgcctgcgcctgatgttcttcggcaatctggctcaggactggtccgagttcgtgctggcagacctgggcatctatcgctacgagtcggtgggcatcagtccggagtctcgtggttttcgctgtcgacaggatttagaggactacctgcgcctgcgcgaactgcggatacgcttcgaggaaggtgaggcagtggaagccgttctaccgccgctgttgagtttctcgtctgacaacccgtatctgaacagtcgtcaatcaaggcagctgttccacatcgcccagcacctggagaaatgcggcgagctggagcaggcgcttaccgtttatcaacgcagcgaatacacccaggcccgctggcggcagattcgtgtactggaacaactgggccgcgatgccgacgctcatgagcaggcactggtctttagcgccatacccaaaagtgatgaagagcgtcagcgccttgagcgcgccctgacccgtctgcagcgcaagctgggcttgcccatggcgaagcggcctaaggcagttgaagcatctcgtatcgagctgaccttgcccacgcctgggcatggcagcgtagaggtcgccgtgcgcgatcacttcagtaccgaacaagctcccgtgcactacgtggaaaacaccctgctgtgcagtttgttcggcttgctgtgctgggacgccatctttgcgcctctgccgggggcattcttccatccgttccacagtggcccggtggatctttacagtgctgacttttacgcccgccgccaggatatcttcgacgagtgcctggctcgcctgcagcagcccgactacccacaactgatcttggagcgctaccgcgagaaggtcggcatccagtcgccattcgtgttctggacgttgctcgatgagccgctattggagctggccctgcactgcattccggcacagcacctgcaggcctgtttcgcccgcctgctccaggatgtgaaggccaatcgcgccggcatgcctgacctgatccagttcttcccggccgaacagcgttaccggatgatcgaggtgaaaggccctggcgaccgcctgcaggacaaccagaagcgctggctggcgtttgccgctgagcagggtattccggtcgaggtctgttacgtgagctgggacgtggcatga

SEQ ID NO: 351482 - DNA, 3903 bp, Pseudomonas aeruginosa
gtgcaggcactgccttcggccgttagggctcagggcagcctgcctcgcctcgaagagcggagcgccgttcttgccgagcctccggttgggcagccggcgctgcaaaccctgccgtcggttgcgcgcgttgagggcgtgcccagcaatgccacaccgagcaacagccacaagtatctgatcgagaccaacccggcgctcaccgagctgaagcagttcctcaactcggactacctgctcggtggcctgggtatcaatccggatgacagcaagaagcgcctgggcgacggtctatacgagcagcgcctggtacgcgaagcgatcgtccagcgtacggggcagcgcttcatcgccggattgaacagcgacgaagcgatgttccgctatctgatggacaacgccatcgccagcaaggacgtattgggactgacccctggcgtcaccctcagcgccgcccaggtggcggcgctgacccacgacatcgtttggctggaagaagtcgaggtgaatggcgaaaaggtcctcgcccccgtggtctacctggcccaggccgaggggcggttgggcccgaacggcgcgctgatccaggggcgcgacgtgaacctgatcaccggcggggacctgaggaacgccggcaccctgcgcgcgcagaacgacctcagcgcgacagccggcaacatcgacaacagcggcctgatcgaggccggcaaccgcctcgacctgctggccagcggctccatccgcaatgaccagggcggcatcattgccgggcgcgaggtaagcctctccgcccttaccggagacgtcatcaatgaacggacggtgacccagcaccagtcctcctacaggggaaccggtaccactgaggcatttgccgatagcaccgcgcgtatcgaggctgcgcagaaactgaccgtttcggcaggacgcgatgtagccaatattggcggtgtcatcgacagcaagggtgacctcgctttgcaaggcggcagggatgtcctggtttcggctgcggtagcggagcggggctggacggcaggaagccaggcataccagacccagacgacccagatgggcgccgaggtcgtggcggggcgcgatatcagcgtcagtgccggacgcgatatcagcgtcgcgggcagccgcatcgacgctcgtcgcgacgtgacattcgaggcgggtcgcgatgtgggcctggtcgcggctgccaacgaagagcatgcctatggcaagaccaagaaggtcactttacaggacgacaagatcacccagcaggccactcgcgtggacgctggcggcgatctggcgatcaatgccggacaggacctgcggctggtcgcgagccaggccagcgccggcgacgaagcctacctggtggccggcgacaagctggagctgctggccgccaacgacagtagttactacctctacgacaagaagagcaaaggcagcttcggtagcaagaagacccggcgcgacgaaatcaccgatgtgacggcagtgggcagccaaatatccagcggcggcgtcctcaccctgctcagtggcggcgaccagacttaccagggcgcgaagctggaatcgggcaacgacctggccatcgtcagcggcggcgcggtgaccttcgacgcggtgaaggacctgcaccaggaaagccacgagaagagcaagggcgacctggcgtggcagtcgtcgaagggcaagggccagaccgacgaaaccgtacgccagagccagctcgtcgcccagggcaacctggcgatcaaggccgtggaaggcctgaagatcgacctcaagcacatcgaccagaagaccgtgagccagaccatcgacgcgatggtgcaggcggatccgcaactggcctggttgaagcagatggagcagcgcggcgatgtggattggcggcgcgtgcaggaactgcatgacagctggaagtacagcaactccgggctgggcgtcggcgcgcagttggcgatagcgattgtcgtgacttacttcacggcgggtgcggcgagtgcggcattgggatcgatggcgggtgtgggggcgggctcaggaagcatgatggctgctgccggtagcactgcaatggtccaggccggtacagcagtaggaacagctgccgccggctgggcgaatgccgctggaactgccgtggctatgggcatggccagcaatggagcgatcagcaccatcaacaaccggggaaacctgggggatgtcgtcaaggacgtgacctccagcgatgcgctgaggggctatgtagtcgctggcacgactgcggggctgactgccggcgtctacgacaaatggacctcgacccagaccggcacctcgaccgctctaccgaacaccggggccgtggcgcccgccgcagggttgggcacctggcaaggtgtgggccagttcacctcgaaccagttgctgcagaatggcacttcggtgctgttggaccgagcgctgggcggcaagggcagcctgggcgatgcgttgcaaaacagcctggcaaatgccttcgcggcctacggcttcaagctgattggcgacaccacccatggcgtactggacgacggcagcctcggcaagatcggcttgcacgccctgatgggaggtctggccgccgaagcggtcggtggcgatttccgtaccggagccctggctgcgggagtcaacgaggcgctggtggatagcctcgccaagcaatacgccagcctgcccatcgatgacaagaagggcctgctgaccatgagttcgcagttgatcggcgtgctggcggcttcgacgcagggcgatgcggacgccaagagcttgcagacgggagcctgggtggcggggaatgctactcagtacaacttcctcaaccatgcggaaaatgaggagcgttggaagtcccaaaaggcctgccaaggaggagacgaggccgcctgtgggcgtgcggatgcttgggataagttggaccgcgaccgagatctagccttgatgactgcctgctctacgggcggacaggcatcgacttgtagtgcattgcgtcaagaagcctggaaggctgctcaaagcctcaagcaggccagttggagcccggaagcgagggaacaatacgcgcaagccatgcaaaatccggaattgcgtgcttacacgattgagtcagagcttcgaagcatcaatcaggtaaataatcctattaccgctggagattcaaagcgcctcgctaaagctttggccagttttggatccgacttcgtccccgtctacggtgacacaaaagcattttctgaagctcaagacccctttgactatgcaatggcaggggtgggactggttcctggtgctggagatgcggcacagaaagtattgagcaaggcgaaaaagctcttccaagaagggaaggtggcagagtctgctgatttagtagagggattaacaaaagaggtaaaaaacagtaacgctgcaaaaggatttattcctgcagaaaggactgggcttaattttgaagagaaggtaaaaaataaggccggagggtatgttgatgttgagttgtctgctaggcagaagtttgataagtcaggtgttgtagtagatagtaaattcgcccaaagcgatctagttgctcgttactcgcccgatgggaatctgtatatagattggtatggcactactgtgtctgggaagggagttggtagcgagatgatttctagagcaattgaggcagtaggagcaaataaggttaagacggtttcggcgcagttaggaaaagacaatcttgatgcttttaaagctgggtcttcgagagggctttccaaggagcaggcagtatggaatactccactaggtaagacaatgagctctttaggttttacggaagttgaggttcatggggcaagtgttaaatttcttcatttagagtga

SEQ ID NO: 351483 - DNA, 357 bp, Pseudomonas aeruginosa
atgctgaaattcaccatccagaaactgtccgccctctaccggagcctggctgccatcactttggcgctccccggtgtcgctttggctgcactccccaaacccgaggctcctagccgtggggagggatcgggcatcatgcaaaccatccagaacttcggctatgacggagcgatgctcctcgcgctgctcatctgcgcggctgtctttctgggggtcgcttggcatacctacggcacctatcacgccatccatgacgggaagaagaagtggtcggatctcggagcgggcgtggccgtaggtgtcggcctgctgatcttgatcatttatctcgtcaccaaagccaccgccatcatgtaa

SEQ ID NO: 351484 - DNA, 357 bp, Pseudomonas aeruginosa; identical to SEQ ID NO: 324377

SEQ ID NO: 351485 - DNA, 270 bp, Pseudomonas aeruginosa; identical to SEQ ID NO: 348102

SEQ ID NO: 351486 - DNA, 429 bp, Pseudomonas aeruginosa
atggacattcgtaaagtcaagaaactgatcgagctgctggaagagtccggtatcgacgagctggaaatccgcgaaggcgaagagtcggtacgcatcagccgccacagcaagaccgccgcccagccggtgtacgcacaggctccggccttcgccgctccggtcgccgctccggcgccggcagccgccgcgctgaacggcaacgtggttcgctcgccgatggtcggcaccttctaccgcgccgcctcgccgacctcggccaacttcgtcgaagtcggccagagcgtgaagaaaggcgacatcctgtgcatcgtcgaagccatgaagatgatgaaccacatcgaagccgaagttagcggcaccatcgagtcgatcctggtggagaacggccagccggttgagttcgaccagccgctgttcaccatcgtctaa

SEQ ID NO: 351487 - DNA, 903 bp, Pseudomonas aeruginosa
gtggcgggaaagatttgggagttctttggttatcgttccgatgaccactctccggcggcagtggccgccgcgacggataagcagtgcccctatctgtccgaagtgtgtgaaaagcggttgagtgacggagccatcgctggcgtatgcaccattaagccggtaacttccggcccagtaatttgctgccctatccgcttgtacgcggacaagtaccgcgccctgtacgacgtagcaaagatcgcgttcgaggaagacttcgagcttgttgcgggcgggaaggcctcggcacgagcaaaagcgaaacaagcacccgtcgtcgcagtgtttggtaaacgctggggcggggaattgcggctaccacaaaaggacggtgcaggaagctacttcgtggattgggtgctggcgttgctagacgccaacggaaaattgaaggaattcgttgcagtcgaagtccaaaccatcgacacaaccggcaactaccgaaacgggcgggaaagcttgctcacgctggaacgcacaaatccggctaccacggtcggcttgaactgggagaacgtcaacaagcgaatcttgccgcaactgatttacaaggggcaggtgctgcaacgtgaagccttgtgccgaaagggcctgttcttcatctgccctcatcctgtttacacgcgtattatggcacgccttggcggtgtcggtggcttgatccgctatgccttgcaaccagcgtcaatcacgtttcttgcctatgaacacgaggaaacaggcatcatcgacggggccacggttccgttgaaagcgttgccgcctcattcaacaacggtttacaaggttcaagaagcattcaacaacgtcacattgccggatgaaaacgtctataaagccgctattgaagctgcccttggctga

SEQ ID NO: 351488 - DNA, 1248 bp, Pseudomonas aeruginosa
atgagccgacataattctttggaaatgtgcgccgggacaagacgtttaacttcgctcgacttgtttgcaggcgcaggtggactatccgaaggtttgcgcgaggcggggttcacatcactttatgctaatgagatttccccgcgctatgcgcagacctatgccgtcaatcatccgggcacacacgtcgacagtcgtgacatccgagaggtcgatgccaaaaaaatccgcagcctcttgggcttgaagcaaggtgagttggatctgattgccggcggcccgccctgccaaggcttttctatcaacgcgcctaaacgctccaccgaagattcaaggaaccacctgttccgtgagtacctgcggtttgttaccgagtttcagccacgagcggtcatgatcgagaacgtccctggcatggtgtcgtttgaaggcggcgcgacgttggatgcgatcctagaatcattgaagcagctcggctacgacgccgacgtgcggattttgtacgcgccgcattacggcgtgccacaaacccgctggcgcacgatcatccttggcagtcgctgcggtgtcgatccgacggagctattcccggaaccgctgcgccaagctccggtccgggtgaatttcacctcgcaattcgccgggaggaacttggtaaacttgccgcgttccctggagttaccgacacacgtcacggtcagggatgccattagcgatctgcccgtgctgcgcaacggcgaaattggcgagccagttaaagactaccggcacccggctgataatccgtatcagcaactgatgcgggtggattcaacgggagtgacgtgtcacgacgctgcccggttgagcaagatcaaccttgaacgcatgatgcatatccctccaggcgggaactggacggacattccggaggcgctgttgccacgcgggatgcgcatggcgcggcgcagtgaccacacgaaacgttacggtcgagtccatcctgatggactcgcgtccactatcctgaccaaatgcgatccacattggggcgcttacttccactacgagcaggacagagcctttaccgtgcgcgaagcggcacgcatccagtccttccctgacacctacgttttctgcgggtcacgggtagagcaatacgaacaggtgggtaatgccgtgccgccgctgctgggagcagccgtcgggcgagctatcgcccaagtgctggggagtgttcgcaataccgagcgcaaagtaaggggggcgtag

SEQ ID NO: 351489 - DNA, 291 bp, Pseudomonas aeruginosa
atgcgatgcgcttccgtcctgctgaccgtgctgctggctgcctgcggccagcggcccaccgagaacctcgccgacgccttggttgccgattccgtgcggctcaaggcattgcgtgcgcaatgcgcggccgaccggcaggccgtgggcgaggacgcttgccaggccaccgccgaagccttccgccgacgcttcttcgccggccagaccgggccggacgagtaccggacgctggccgagctgccgcccattccgcccaccttcgatgaacccatcggaggggagacgccatga

SEQ ID NO: 351490 - DNA, 216 bp, Pseudomonas aeruginosa
atgacgacgcgcaagctgcggctcggcccgctgcccaagaccgagagtaccaaggtcacattctcatgcccgatcggcttgaaagctgaccttgatcgctacgcggcattgcatgcgcagacctacggcgaggcggtcgatgcgacgacgctgatcccgcacatgctggaggcgttcatggtgcgagatcgcgtgttcaaacgcggaaagccctaa

SEQ ID NO: 351491 - DNA, 1716 bp, Pseudomonas aeruginosa
atgagcaagctaacgattgcaccgttcgatcagagccggtatgtcggcaccgtgtgtcatgtacggccaactagcgcggaagtgaacctacctctagcgtctactcctaccagttcacatttcgctggattcccggtcccaggcggccaagttggtgagttcgtcgtaattgaaggcgaggaacacgccgtgcttgggagagtcattgaggttcggctccctgagcgtgatcgcctcagcgtcgagccaaccgcggaacagaacatctcgccgcacccactcggagtcattcagttgctcacggcgatagatctggaagccggcaagtcattgaagggagtgccgatacatccccgtatcggacaacacgtattctcggcccatccattacttgtgaagcaagcggtggaaggaaccagtctgccagaggcaagcaaggtgcacctcgctgtgttcccgcatgcgcagaacacaagtgtttcgatcccgcctgcacatatcttcgggcgtcattgcgcagttctaggtacgacaggcggcgggaaaagctggactttggcccatcttgtcgaggaaatcgcccggcttggaggaaaggccatactgttcgatgcgacgggtgagtacgaggggcaagcgaatggtatagatcatgtccatcttggcggacttcgggaagatgcgggagacccacgcagattcgttagcttcccatatagccagttctctgaaaccgacttgtttgcgatgtttcgtccgagtgccagtgctcaagtgccaaagctaagggaagcaatgcgtagcctgaaattggcacagcttgcccccggaattgcagttgatggattaatcaggaaagcggatcaatcgaaagttccttttgaaaatgcattacttcaacatggaacggcactgggaagcaccggtgcagacttcaatattcaacttctcgctcgccaaatagaggaagagtgcgtatggccaacgagcaatagagggcaacgcatgtggggtggcgccaatgcaaatgaattgggtttctgcaccaccttgatctcacgcatatcttctgatgttgattcccaacatctcgcgtgcgtttttcagccgaaccgcttagacgaaccactcaccgcttcaattgatagattcctccaagatgcaacgaagcgcgtcctgaggatcagcatggagttcttaccattcgagcacaacacaagggagctggttgccaatgcagtcgggcgctatctccttcgcttggctcgccaaggccgctttagtcgaaatcctcttgttgtgctactcgatgaagctcaccagttcttggataaaaacataggcgacgaattctcaaaaacgccgctcgacgcatttggtctgatcgctaaagaaggccgaaaatatagcctgacctgtgtgctcgcaacgcagcgccctcgtgatattcccgatgacgtgcttagtcagatgggcatgttcatcgtgcatagattgataaatgatcgagacagaaatgttgtcgagaaggcttgcggcaacttggacgcctccgccgccgcttttttgccgacgctggggcaaggtgaagccattgttgtcggggtcgactcgccgatgcccctgccggtgctcattcgacggccggcgatgccacctcagtctaggggggcggattacgagcgactttggggcgcgcagccaagacagccgtga

SEQ ID NO: 351492 - DNA, 1224 bp, Pseudomonas aeruginosa
gtgaaggtgctgagtgcaaacaccgggggcaactggctagagcctcagattcctgctccccccgttgcgggcgaagagcccaaaccggatgccgcaacacaggaggcgcggcgaatcgtctcggacttgttccgatgcaacaacctagttgtgctttcggggctcggcacgtcaatgtgcgttaggccacatccgggcggaggtgcaccgccaacaatgaaggatctctgggatcgagtctccgcacgtataaacggaggtgcgattgctggagtggccaactttgaccaagtcctaacgacggtcgggtacgccggcaggcccaatgacattgagtccctgctgtctcgctgccgcttggctgagagcttcctcttggaccctcaacacacattggtcagttcgtttatcaagctagcagaacaagagatagcgcaagcgacaaacttcgtttggccgaaccatgcacttccggtgcataccgaattccttcgtcgtgccgccaggcgcacgaatcgaaaggcccgcgcgaaagtattcacgacaaactacgaccgatgctttgaagaagcaggcaggcaaggtcgatatgttgtcatagacggcttctcgcacacatctccaccgacattcgatgcggttcacttcacctacgacatcgtacgtcgatcgaaagagagtgacacacaggactttataccaaacgtcttccatctctataagttgcatggatctatagactggacacgcgacgagacgacaggcgaaatctacaaatggccaggcaccgacagggcgctgttgatctacccaagaaattcgaagtacgagcttgcatttgaacagccatacctggaaatgattgcggcatttcaagcggctctgcgtgagccgaatactgggttggtagtgattggctttggatttaatgacaaccacctcgctgagccaatcatgtcggccctccgctcaaacctgagcctaaaggccgtgacggtagggccttggcttgccccgtgggtgcaagccgcacagaacggccccggcgaggcagaaacaaacaggtatctgaagcgaataaaggatctggcaaacgcaggcgatgcccgtcttgcactaataaactgcggttttgaggacttcatctcctacgttccagacttggcggcagagtccgacatggagcagcacatcgaacgtctccgccgtacggaacgtccatga

SEQ ID NO: 351493 - DNA, 1833 bp, Pseudomonas aeruginosa
atggccaactcgtctgccgctgacaagcatccccaggcgcgcctgctgaatccctgggccctgctgccggtcgctctcggggtggcgctggtgctgtggctgaccttcaacagcgaagaggtattcatgcccagcggcgatggcgagcccgacgcggtctcggtgaactacgccgaactgctgttgcaggcgcacccggagaacgacgcgctgcgcctgaccctgatcgacctgctggtcaagctcggcgacttcgagcaggcgcgtcatcacctcgcccgtctgcgcggcaaggaccgcctggcaacgccgttctacgaggtggaactggacatccttggcgccctggccaggcccgagggcatggatgaggagcagacgcgccgattgctggagcgcctgcgcaagatcgagcacgtttcgttgaacgacgccatgctcgaacgacttgcccgtcatgccctggccctggacgcgccggacctggcggcgcggacctttgccgaactggccggccgcgacccgcagggccggcagcgctggctggacgaggcggcgcgctggtacctggcttccggcgagccgctgccggcggcggacatccagcggcaactggccgaagcgcaaaccgagccggcgaagcgcctggcctatctgcgccaggccttcgccagcctgctcgctggcgagcgcggcgaacaggcggcgttgttgctggacgagcggctggacgccttgccggaggatgaatcgaccctggcctggctcgcccagggcgtacgcgccgccgaaggcagccagcgctacgacctggccgaacgcttcatccggcgctggcgcgaattgcgccccgaggaccatgaggcgctggccgccgacctgcgtctgaacatggccgccgggcgggtcgagcgggcctgggaggtcggccaggagctgctggccctgcgcccggaggacaggacgctgctggccgatctcgcgcgccttggcgaatggaccggcaacggcccgcgggcgctgggcctgtggaagcaactgctggccggcgccgatgacccggccctgcgcgggcatgcctggcgcctgtcgctgcagatgttcgatttcgacagcgccatcgagctgctggcgcccatcggtgcgcagcgacagatgaccgacgaggaactcgatgcgctggtctacagccatgaaacccgcggcacgccggaagagggcgaggcatggctgcgcggctacgtgcagcgttatccgaaacagcgcctggcctggcagcgcttgcaacagattctcgaacacacccagcagttgcaggaagagaccggggtctgggcgcggatggcccggcatttcccgctgagtgtcaaggaacgcatgcagtgggcggaaacccactggaacctgttcgatccgcgccaggcctggaaggtcctcgccggcgtggatacccgcgcgatccgcgagccggagttctggcgcctgcgcgcggcgctggcctgggccctggagcaggacgacgatgcccgcgccgcctacgagcgcatgctggccctggacatccgcctgaacagcagcgacgaggaccagttgatcgccctgtaccgggacagcaatccgaagcaggccttgcaggtgcttatcggcagttggcagcgcagccgcgatccgcggcgcctggccagcgccctgcaactggcggagaacctccacgactggccggccctgaagagcctgctggccgaggccgaaggcctgccggaagcgcagggcagcccctattactgggtggctaggtgtgaagcgtcaagaggttatttcttgacgagttga

SEQ ID NO: 351494 - DNA, 630 bp, Pseudomonas aeruginosa
atggaagcccgacaggggcgagactcgcgcagcgaggctcgatgcgctacgcgcacgacagcgcgaccggccattgctcagatggccggggacgcccgaacgcaaaggggcctttacgatgacgccatgcccgagacagaacacgccgattccaacgatcccctggaacacatgctccagcgctcggaggccttgcacgaacggttcaacgaactgctcgacgacgccgagttcgacggctctccacgcggcgcgacagctctgggcatgtgcctagtcgtcaacgaacacgcaacagccttgcatgctattgatggcgctgggcatgccgacatcagccgtcagcctgatgcggctgcagttcaaagcgctgacccgcgcgatgtggctcatctatgcggcccccgagacagcgatcgagaaactgtcggccccgctcacacgggaagccgaacaggccgccaagaatttgcccagcgcaaagggcatgatcgatcagatcggcaagcgcgtcggacaggatgcgccggcagcagcccatcagacgcaggtccacttcaagggcatctcctggaacgccatgaactcgtttatgcacggcggcatccatcccctgcgacgcaatgctga

SEQ ID NO: 351495 - DNA, 552 bp, Pseudomonas aeruginosa
atggccaccgcgtactacttcttggacaccgagtgggccgatgtaacgggcagcgagctggtgagtctggcgctggtgagcgaaggtggagaccgccttttctacgctgagcgagccagcctgcccgaggctcccaccgacttcgttcgtcaaagcgtctacccgctgctagaccgcggcgacgcagccctgcctgatgccgccctgacgaccgagctgcgcgccttcctcagcgaggtcgacgcgccggcagtgatggcggatttccagaacgatctccagctgctgcggtacgccctggatgggtttgagttacccgatgaccaggttgccgcgtgcgggccccggccggccccggtcatgacacgcatgtccaaggaaggccttccgggattgctggtggaagattggttcgcggcccatccggaacatagggccaggcgccaccatgccttggtggatgcgcaggccttgcggatggcttggctggtggcgaccgaccgcattcctgctccggcgtgggcccactcctaccgtcgcgcccggggatag

SEQ ID NO: 351496 - DNA, 627 bp, Pseudomonas aeruginosa
atgagcgtagtcaccaccacacccccggaaatcacccgtgccgtgcggcgcttgaccgaatccgtcgtgcgcggcgcagagccggtctatcttgatgtacagccggaagccgacgcgatcgtgcacgagtgctttcccaacgtgcaggccaaggtcgcgcgcgacggtggtcagatgcggtgcgggtggcagctgtgggaatggccgcacgtgctggttgaggcagaattccatgcggtgtgggtcagtccagccggagaactggtcgacatcacgccaaagcctgaaggtgagacacgcattcttttcgtgccggatccgcgaagacgctacgagggcctggccatcgacaatgtccgcatgccattacgcgatgacctgctgatcaagcacttcatccagatgtccgaagcgattgtccaggtgatgaaccgcggcgagcgatcatcccagtatggcgaggtgagcgttccggccaatgaaatccagcctcttctgcaggccagggactttctgggtcagtcactcggtgcgggactgcgcgaacatacgccgtgcctgtgtggcagcggcagcaagtacaagcgctgccatggcgcgcaagtagaagcattcttccgtcgttga

SEQ ID NO: 351497 - DNA, 1053 bp, Pseudomonas aeruginosa
atggctcgttccggcttgtacaaaagcgatgtgcaacgggcccgagacagtcttcgggccgaaggcaggaacccctcggtggacgcggtacgcgtggcactgggcaataccgggtccaaaaccaccatccaccgctacctgaaggagctggaagaggaggacgggcaaggcgtgggcgccaagattgccgtcagcgacgccctgcaggacttggtcagtcgtctggccgaacggctgcatggcgaggccgaaacgatggtcgcgcaggcacaggaacggttccaggccgagctgcacaagcgcacccaagccttggaacaggcccagcaagaggccgggaacctcagcgcgcagcttcagcgcaccgagacagctctgcagacagaacgcgaggcgagcgaagccgccaggggcgaggtggcgagccgaaccaccgagctggcacaactgcaggaacgcgttgcgggcctcacggcgcggctggcagagcacgaaagccacgcccgttccctggagcagaagcacgagcatgccagggaagcccttgagcactaccgcacatcggtcaaagaccagcgagagcaggagcaacgccggcacgagcaccaggtgcaggaactacaggtcggcttgcgccaggccaacgaggcgttgaccgccaagaaccatgatctggtgcagctcaaccgggaaaacggccagtggctggagcgtcacactcgactggaaaaggaggtggcgcagctgcgccagaccatccagacgcaacagggcgagctcgatacgctgcgcctgacggcggccgaacaccaggcgctgcaggtgcgctggggccaagacgctcagagtttggacaccgctcggcaagacctcgcacaagccagaaccgagctggcccaggagcgcgaacgacgcgagcaggccgaggcggaaacgctgcgcgccaccgtgcgcctgagcaccttggagccgctgttggcccagctacagccggccagtgccggcggcaaaggcgccaagcggatctcatcggaagagacgccggcgccatag

SEQ ID NO: 351498 - DNA, 909 bp, Pseudomonas aeruginosa
atgcaggacttcgtaagcgccttcgatgacgtgcccggccacgtcgcccttgtgcggcacgcgcacgtcggccacggtgtcgccgcagacaaggccattgctgcaaacgaagcggaacatcccggccagcatctgatagctgctggtgccgtcatgggagttcagcaggatgatttcgttggcctcgcggccgttgatctggctggcgtggcgcagccggatcatgtgcttggtgtagtcgcggcggtcgtcgtggcgcacgcgggtctgcgtcaccatgaaaggctcgaagccttccccgcgcagttcttgcagcacggttgcggtggggatgtagctgtaccgctcggagcggctttcgtgcggggcttccgcgaagatggaaggcgctacggcgcgaatctggtcatccgacaagggacgttccgaacgcagcaccggcgaacgggaagcgaaacgggatgcgagttgcatggtctttctcctgacaaagaagggtttgctgttcacaccgcacaccggattcctagattcggaagcccagcctttcggctgttcggtgcggtcggcacgaggaacccggttggccctgttgccaccgtctttcctgagttcatcgcccgcgacggtcaggagcgcgcgaacgggtgccgtcaaggaggcaagcgcagggttggtgcggcccgcaggcgcagccgaggacacggccctgcgcgccttgacggcacacgggcgcgggctacagtcgcggacaaggtgatgaagtcaggggagacggctggacacggcaacggccttccccttgcgctgactgcatggcaagcgaagcgcgcaggcccggatctggaagccgggccggaggcgtcagggatacgcaaggctggcgaatgccagtcccgtcagggatga

SEQ ID NO: 351499 - DNA, 1101 bp, Pseudomonas aeruginosa
atgtcgtcatccctcgattcggccatcaggacatcggccacccgtatcagccactacatcgaggtgcaccgcggccatcccgaggtcagctttcaggagcatgtccggcggcggtgcaaagaaagggctgcccgtgtcagctcccgcaaacttgtctacctggacacgcttgcctggaagtgcttggcggactaccggcagggcaagaccaacctgacgccagcaatgaaggagttcggagcggccatggagcgcaccgcacaaacgggacgtttcgcatttccgatcagtgttcccacgtacttcgaactggattcgatggtccacccggcgacgcgggagtcactggaaagcctggtcgacgagttctcccaagggctttgcatcacctcattccatgaccgcctcggctcggaactgcagcagttgcggatgaaccggctggatcaggccgaaggcctggagggcttcgtgtgcagccccatcgaaatgatggggataccgacgatttcactgcctgatttcgtcaagtcgcatgtggaccagtccacgttcaacaaggcgttcttcgacgccttgtccgaactcccgttctcggtccagatgcaagtggccgccaacgcgccgggcaagaagtgggacaactcacgaggcattgccgacctcaacgacggcaaggcccagcaccagtccgagatcgtcaatctcaataccggcatcttcgtcgagttgaagggcggcattgaggcgtggttcgtcaatgaaggcgtggcacccgacttccagcagatcactttgtatgcggcaagcgcgatgtaccactggcagcaagaaccgtcatcgcgcgccttgccgaccatgcgtatcctcagtgcgctgtatggccttatgcgattcgacccgaaccgcaagtacaaggatggcgaccccaacgacttccttgtcgccgcgtcctctctccctgttgcccatgcgctgttcacggacaggaagttcgcaaacctgctggccgacaagcggatcggactggacacgttcctggactgcacggtgatcgccggcttcgatgacatggcgcggtatctcgaagcgcaaacataa

SEQ ID NO: 351500 - DNA, 510 bp, Pseudomonas aeruginosa
atgttgcaactatctttttcctcgatcgataccgctgtgctggtgcgtgacacccacggacactatgcgccggcgacggccgatcagattctggaggccgcgcgccaggtcatcgaccagaagatgcagcggggcgcttccttctcctcgcctgctgcggtcaaggcgtacctgcagcccaagctggcggggctggagtgcgaggtgttcgcggtgctgttcctggacacccggcatcggctggtcgagtacacggagatgtttcgcggcaccatcgacagcgcatcggtctatccgcgcgaggtggtcaaggaagcgctccggttcaatgcggcggcggtcatcctgtcgcacaaccatcccagcggagatccagagcccagtgcggccgatcgggcgctgacccagcggctcaaggatgcgctggcgctggtggacgtgcgcaccctggatcacgtcatcgttgcgggagcgagtacggcatcctttgccgagcgcgggctgatctga

SEQ ID NO: 351501 - DNA, 192 bp, Pseudomonas aeruginosa
atggcaagcagtgatgtcgttcgcgcccggattgataaagaaatcaaggaggaagccagccatgtcttatccggaatggggctgtcgatttcggatgcgattcgcatgctgctaacacgcatcgcgaccgataaggccttgcctttcgatctgaatcgtgtcgcttctccgctgaagcgcaagactccatga

SEQ ID NO: 351502 - DNA, 1293 bp, Pseudomonas aeruginosa
atgacagagccaacgatcatttgcccaaactgcaagaccgagattcggttaacagagtctcttgcagctccgcttatcgctgcgacgcgtcagcagtacgaacagaaaatcgcacaaaaagacttggatttcgccaagcgcgaacaaagcctgcgggaaaaggaaaaacaggtcgccgaagaaaaacgcgctctcgatgaccaagttgcagatcaggttgcagcacaactaaagaccgagcgcgcacgagtcatagccgatgaagccaagaaagccaagctcgcgagtgcggcagagttcgacgcgaaagcacgtgagctagttgagcttcaggaagtattgaagtcacgtgatgagaagttggccgaagcccagaaggcgcaggctgacctgatcaagaagcagcgtgaactcgacgatgctaagcgcgaactggaattgactgttgagaaacgtgttcaagagggtttaacagaagtgcgggccatggcacggcgagaggctgaagatggtttgaagctcaaggtgatggagaaagatcaaaccatcgcgtcgatgcagcagaagatcgaggaattgaagcaaaaggcagaacaaggctctcagcaacttcagggcgaagtccaggaaatggatcttgaaaacctgctgcgcgcaaaatttccatttgactctatcgagcctgttgcaaagggagagttcggtggtgacgtgctgcaacgtgtgatcagccaagctggacaaccaagcggcgaaatactctgggagtcaaagcgaaccaagaattggagcgacggctggctctccaagttgcgcgatgatcagcgaactgccaaagcggaggtgtcggttctcgttagtcaggtattgccaaaaggcattgaaacttttgatgttattgatggtgtttgggtaaccagcccgcgggcggttctgccagtagcaacgatactccgccacactctgcttcaggtgagcatggctaggcaggtcagcgaggggcagcaaaccaagaccgaaatggtttatcagtacctgaccggaccgcgattccgtcatcgcgtggaagcgatcgttgaagcattctcctcgatgcagcaagacttggataaagaacgaaaagccatcatgaagcaatgggcgaagcgtgaagagcagatcgagcgtgtgatgggcgccactgttggcatgtatggggatctgcaaggcatagcaggtaagtcactgcaggaaatcgaaggcctgagcctggtggctctgcccggcccaaatgatgaagaacagggaagctga

SEQ ID NO: 351503 - DNA, 1995 bp, Pseudomonas aeruginosa
atggttccaaagagcaacaaccgcgcagccgtttgggcgatttccactactttggcctttttcttgaacagctttgtggcgggggcactcacgatgcacaaccagccgggtaacccagacccatcacggctcggaaccgttgaagatgtcaacggttcgagtgtgagcgtaaagctctcagagagcacgcctggcggccttctttttgttaacggggaggcataccgtgtcggacaagttggaggattcgttcgtattccatcaggatatgtcgatctgtatggagtgatatctcaggtcggagccggagctgcacccgggccgcccgagcttgcacctcagctcggcaatcggtggctcagagttgaactcgttggtcagggacgacggggaacaaagttcgagcggggcatagcgcagtacccctctatcggcgactcggttcacgtagtcactgagtcagatttgaagacggtgtacgcaccgggggacgatgatggatacgtcgccgtaggacgcgtagccagcgccgaatcgatccgagcatacttggatgtgaatcgacttgttactcgtcactcggctgtcgttgggagcactggatccggaaagtccaatgccgttgcaaacctattgggagcagtttctgaccaagcacgattcaagtctgcgcgcgtcgtactgtttgaccttcacggagagtacgcaaaggcctttggcgatcaagctagggtatttagagttggagccgatgcgaccgcaggtgagcatgagctgcatgttccattttgggcactgacggccgaagaattcatttcaataacgatgggatcggtctcagggacgcctcttaccttgttgcaagagagactcctatcaagcaaacgcgcgtcaaaggcggcgggcgttgcacatggcctgccagacaccacggtcacgatcgacaccccgctgccgttttccgtttaccaactctggcacgacttgtattcgctgcattgcgcaactcatagtgtaagcaaaaaccagaatcagaccgaggccacgcgatcatatatggaagatggcgcaccgcccgccaaagctcttggcgacggagatcaacttattcgcccgcgattccgccccattactaccgaagcaggcgcggaaaaggtatacggaggtttgtatggcgacatgcctcgcgcgcacctggatggattggagagcaagcttcgtgatcctcgcatgcaatttcttttccgccccggccagtgggcgcctgacaaggacggaacaacggccgctgatcttgacgctttgcttgaggcatggataggcgcagataagcctatctctgttttcgatttatcaggtattcctaccgctgttgtggatgatttggtaggggccgtgttgcgtattctgtatgacgcaatcttttggggtagaaataagcaagaaggcggtagagagcggcctcttctcgtcgtccttgaagaggcacatgtataccttggccctcagtcaaagaatagagctgcgattgcagcacggcgcatagccaaagagggccggaaatacggcgttggcttgatgctagtcagtcaacgaccatccgaagtggacaccacaattctttcccaatgcggtacggttgtcgccttacgtttaaccaacgattctgatcgatcccaggtaacttcctgcgcatcggacaatctcaaagggctcttttcaatgcttccagttctccgaactggtgaagcattgatcgtgggcgaagccgtcaatatgccaatacgggcaatcattgaccgtccacctgagggccgacgcccggaaagtgacgatcctatggtcgttgtgcccaagggggaaggcggcaagcgtataaggtctggcggatggacagaacctgtcaaagatgaaaattacaagcctctagtcgaggcgtggcgcaagcaagatcctaatgctggcaaaacacaggcagcggattcagaaacctga

SEQ ID NO: 351504 - DNA, 210 bp, Pseudomonas aeruginosa
atggaacgcacctcagtcacttcaagcaacatcaactccattggctatgatgccgacagccagatactggagatagagttcaataatggagctgtttacgaatactcaggggttcctgagggcgagcatactgggcttatgaacgcggactccaaagggacgtacttcaatgccaacattaagaatcggtatcccttttcgaaacactga

SEQ ID NO: 351505 - DNA, 252 bp, Pseudomonas aeruginosa
atgagcaacatccgccaagtccagtggaacgcaggggcgccggagtcattgcaggctggcatggtcattgagtttctcgggaaggtaaggctggtcgggaacgtatcacctgaggactacatgaacccttccgaatgctgcaagtgggatgacctgagcgatatcacccgctgggcgtggctcatccagccccacgaactcaactggctcgaagacatggcaaacaagcacaaagcgagggcgcggggatga

SEQ ID NO: 351506 - DNA, 207 bp, Pseudomonas aeruginosa
atgaagacggttatcgcctttacctgctacctactgattggcgggctgcttatgggcggcccagctggcgagatgatcagggagtgtccaaacaagaagctcgatgtggaagttctggcagtggctgccttgtggccagtttttttcggaatggtaatgacagttggagagctgccttcgcgtgattgccaggggaatctcaaatga

SEQ ID NO: 351507 - DNA, 1113 bp, Pseudomonas aeruginosa
atgagccggatccatacactgaccatgcccaagtggggcctgtcgatgaccgagggtcgggtggacgcctggctcaaggaagagggcgcgcatatcgagaaaggcgacgaggtgctcgacgtggagaccgacaagatctccagcagcgtcgaggcgcccttctcgggcgtgctgcggcgcaaggtggcgcgcgaggacgagaccctggcggtcggcgcgctgctcggcgtggtggtcgagggcgaggcgagcgacgaggagatcgacgcactggtgcaacgcttccaggccgaattcgtacccgccgacgaggacgctggggatagcggaccggcaccgcggaaagtcgagctggacgggcgcctcctgcgctatttcgaccgcggcgagggcgatccggcgctactgctgatccacggtttcggtggcgacctgaacaactggttgttcaaccacgaggcgctggccgccgagcggcgggtgatcgctctagacctgccgggccacggcgagtccggcaaggccctggtgcgcggcgacctcgatgaactcagcggcagcgtgctggccctgctcgaccacctcgacctggaacaggtacacctggccggtcactccatggggggagcggtggcgctgaactgcgcgcgcctggcgccgcagcgggtgctgtcgctgagcctgatcggcagcgccggcctcggcgaggagatcaacggcgactacctgcgcggcttcgtcgaggcggccaaccgcaacgcgttgaagccgcaactggtgcagttgttctccgaccccgcgctggtcacccggcagatgctcgaggacatgctccgctacaagcgcctggaaggcgtcgatgcggccctgcgccagttgctggacaacctgttcgccgacggtcgccagcgcaacgacctgcgtgccgtggcgagcgagggccgccagccggtcctggcgatctggggcagcgatgacgcgatcatcccggcgcggcatgccgagggcctgccagcccaggtggagatcattcccggacaggcgcacatggtgcagatggaagccgccgagcaggtcaaccgcctgctgctcgacttcctccgccagcattga

SEQ ID NO: 351508 - DNA, 1584 bp, Pseudomonas aeruginosa
atgatatttcttccacaaacaataattcttgaaaatcttacacctgaattcttctttgcagaatgcgaaagacagtatatttttgagcgagctatcgaaaagaaactgacctcgaaagaatattatgaaaacaagttaaataattcatcagaaagaaagcatgaagccttagtcaaagaaatacgaaaccttaaacaaaaaatcacttgggttgcatcgtgcgacgaatataaatgctggaagatacaaaacaagtatgcacttactggcgacttggacgaaatcgtcaagaatatcacgttcgttttcaagaaaattcaagaaaacctaattataaagaaaagaaatctcaaaaatgacgattgcggcgaaaacgtgctctcacatataaatcataattggaatatcggctacggcatcaaaataaaagatatcaaagggtcaactataaaagacaagctcatcaacattgctgatgagaaaaagctcaaattacaaataaaaagaatacaaaaacagcgaagcgaactttcaaagctgaactcaggcttgattggttcgggtcaagcatatgagatttgtagtgatgaagttgttcgcaatagagaagctgacgaagccagccagcttgattacatcatgaagaaaactcttgttaatgaaaacaataagaaaatcccactatggaaagtagcaagcactgaaaagcaaagatttgccgagctatatattcaagtatcatcattagatgcttacgctaaaaatcttgactataagcctctatttatcacgttcactgctccggcaagatttcaccccaaaccatcgaagggggttagttcatgggatggctcaacaccaaaagaaagcaatgattacttgaaaggcttatggaatgcttttagaaaggacattcatagacataagattgagatgaatggtttctgggctgttgaacctcacaaagaccagtgctttcataagcacgctttaatgtatgtcaacaagaaacattatgacgaattagtaatcttgattaacaaacattttagacactcggaaaacgccgtaaaaattgaagaaatcgacacaaaaaaaagcaaggcaacatcatatgtgatgaagtatctaactaagtcattcaacatggatttcgagctgaaaggcggcgtcctaaatgtagataagttggaaatcaataatcacaaaaaagtgagagccgttcaagcattgtggggtgtgcgtagatatgcaatgtttggcgttaaaaacacgctttctttatggcgggaattgaaaagaaagccttttttaaagggcaagaacgaagttattgatagagcgttcgcatttgtagaaaaaaacgacttcgttgggttctctatccttgcgaatggaatgctaaaaataatgagactatacagcaaaatacaggtctttaagaatgacctgctcggtgatgtgttcggaaaaagattaataggcaaatacataattgatttaagcacaaacgagatgattgacataaagtcggatttcaaaattgttgataccgcattgattgacgccaccggagttcaataa

SEQ ID NO: 351509 - DNA, 225 bp, Pseudomonas aeruginosa
atgagaaaaccaaaagcaaaagccaatttaaaatcctgcactattatattggacgccgaaacactcaatcaattcaaggctgtcgcaaaagagcacaagttccctctgtctcgttttttgaatgattgcatgaaagaatacttgaacgtgcgtggtggtcgtgactttcaaaagaaagtaacactgagcgttgagataaggaactttaatgtagcaaacaaataa

SEQ ID NO: 351510 - DNA, 1944 bp, Pseudomonas aeruginosa
  misc_feature (1140)..(1149): n is a, c, g, or t
atgataaggaaaagattgagcacccagaaaagcaggtcaggagtatataaagcttctaaatacttccacaaagatgatggatgtgtattgttcgaaagcaacatttacacacctatgaactcatctaaaagacaaattgcgaatgccattgcaacatcaatcgaaaatgatgttgctgttagaacaaagggcagaaagcaatcagttagaagtcagcacgacatggtcagctttcacaccaatgataacgttactactgaacaagcgaagcagattgtaaaagaactatatgaaaagacgcacaatctatcaaacagaaagtatgcgttaggcgttcatgttgatacagatgaggttcatgttcatattgtgtggtctttaaaagacttcaatggcaagtgttataacgtcagcaatgactaccgagttattgaaagagaatgcgaaaagctcgaacaaaaatataatttgatagttccagaaaatcgaatttcaagagatatggacgaactcgacaagataaaagacttaacactagaagaaaagaaaaacatcatcagtaaaaaatataaagacaaacatccgccatccaatgaaagaatgcttgaagtccgaggcataatttcgaacaagcaacagatgaaagacgccttaaacgtttacattaatagctcttcaagcccttccgattttatcagcaggataaccgagaatgggtttaatatcattcacaatggtaaatcatctttctccattcaatatgaagaccagatattcaaagcttccgagcttagcttgtcttacaaaacacttaaagtcaaattaggtgatgatactggctttgagcagactttgaaaaataagcacaacattaagaaatacgaagattgttctattgcttcaaatgaagcaacccccgactacatgaaaaagattaacccgaaatcagtgcttgccacgaagttcaagtttattcagcatagtgacaaggttgaatatttctataattcagccagtagcaaaaaatcattcgagtattacaaagacccgtcaaaggtttcattccatgatttatcaagacagtcagcaaaggctggcattcaaaggcttgttgctgacgctaaaccaccacaatcattnnnnnnnnnngatttctttaagaaaaacatatggcttgaatttcaattgatgggattggaagccaaagggttcaagctcgaaggttacaaacctaccccagcagatttagaagagttgaagaaaattcaagagcaatatgcttcgatgaataagaagccagatcctaaaccaaaagctcctacggtggccgtagagccacctaaaccagttgagcctgtcgtgcctacacccgttgagaacgcaccagagaaggccacagaaccaacaagtcaggtggatcagcacaaggtggcagccagcaatgatgatttgattgatgacttgatgaaagagtttgagccagccacccctacaccagtcgcacaagctcataaggaagccatagaaccgtcaaaatcaaccgagcctgtcgtagatgacctttacacaccgatggcaccagagccgcttgcagagcctgaaaaccataaggtcgatggcgactattcaacatattcgaatgatgaaattgttgaagaatttgaatggttgcaatcgagactaacgaaaagcttatttccgggcagcagcacgcgagacattgcggggcatagagaaatggacaacattccagacaatcgtaatggcataaaaactggcgaggttaagcgacaatatgaatttaggcagaagctttataatctatttgatgaaattaaagaaagagacccgtcagccgcaaaacagcttgaacaagcttttaaagcacagatggcaaacaaaagagtggttacgtttgacttaaagccgcagttaaacaaatag

SEQ ID NO: 351511 - DNA, 375 bp, Pseudomonas aeruginosa
atgaataacaaagttagaaaaagtaatcagttgaattttagacttccacaggaagatattttactgctcgaaaagcagagagctacattgaaaatgactcaggtaaaattcatttctcacattataaataatggagtaaatgaaatcatagaagtaagcagcccaaagttaagagaggatatagtcaccattgaaaaaatattcagccagattggcaacaatcttaatcaaatagcagcagcgttgaattcagggaagcaaccaagccaagacgttttagatgttctgactaaattagataagaacatgggcttattgacgcaaagacttaacagtttgaaaaaggagaaaataacaatcaaaggcgatatatga

SEQ ID NO: 351512 - DNA, 1617 bp, Pseudomonas aeruginosa
atgtccacaagcgagcagttaaaggggttttcgctggaacgtcagcgaaacctgattgcagattttgcccgaaaaaatgggctgtcgcttgaagatagtcatattcttgaagacattggacgttcatcgttttcagatgatacagagcaaaaagaacttacaaaattctttgaagaccttggaaatgataaatttcaaaaaggtgatgtttttgcattagaaaatattgatcgtcttacacgtcgtggtccaattgacgctttaatgaaggttaatcaaataatttcaaagggtttgaaattagcgattatcagtgataaagaacaacgtatccttgaagaaattgacgttttttcaattatcacattgtctattgacgcatcccgtgcaaataaagaaagtcaagttaagtcagataagggattacagaattgggcttttaagcgtgagcttgctgctactcataaaattgctatgacagcccaagcaccagcttggattgatacagaaacctattacataatggacgaaacaaagaacaagcaagtaaagcgtcgtcgttatgttttgaatgaagatcgagccaaaacggtaaaactgatttttgaactattccaaaatggtaatggttcattgaagatcaagaatattctcaatgaacaaaatatcccaacatttaaaggcattgaatattgggaaccttctaccatctcaaagataattcgaaatccagcaacatatggaatgtatcaaccaaagaaacaaaacaccggaaaacgtgacttggtggccattggtgaaccaattgaaaactatttcccagcagtgataggcaaagaagtttttgaccagtgccaacagattacagccaccaacaccaccagaaaaggacgtagaggtaaactattcacaaaccttttcacaggtttattgaagtgtgccgattgtgatggtcctattcatttgcttaaccccggcattgataaacgtgcaaaaaacccaaaacccgtaaactacttgatttgtaaaaaaggtaagtttaccaaagagtgtattaccaaaagacttcgctatgaagattttgagaatgcaatgctcaaagctattcaagaaatcaatcttgcagatgttttgcatgaaaataatcctcttgaaaatctaatcaaaaaacaaagaaatctacaagcggatattgataaaaagaaaaaactacttgaaaactttgaaaggaattttgtggaaaacgatggtgacttaccatcgtttatgattgcacaagctaaacaagcagaaattgacattaaagctcttgatattgaaatcaagtcaactcagtttgaaatatcgcaattgaatgtctacaactcaaacatagacaatgctattgatgaattaaaaaccaatggcacctatgaggcacgttcaaaaatcaatctcatactgcatgaaataattaaatatattgtcattgattttgaacttgatgattatggtgtgatgtttaaaaatggtgccaaaagatttatcaataatggcattgttcaaaatgtgttcaggacagaaagtaataaacaacgtgatgatgaaatcaacgagattttgaaccataagatttga

SEQ ID NO: 351513 - DNA, 180 bp, Pseudomonas aeruginosa
atgaagctgcctgctacctatcaaaccgaagtgtatccgaccgagggcggctacctggcgatcaagcaacacgatgctgtgcaggatgaagatgaaatagttctcctgtcgcttgatcaagcagaacttgttgctcgtgaactgctgcgcttggcgggtgaggcggagggcgattcctga

SEQ ID NO: 351514 - DNA, 264 bp, Pseudomonas aeruginosa; identical to SEQ ID NO: 341449

SEQ ID NO: 351515 - DNA, 264 bp, Pseudomonas aeruginosa
atgaagaaggcaatgccgctcttgctggccgtggtgctgactgcctgcggcccatccgaaacgcccaagcagacgaacgtgccgaccgttgaagaactggcgtccgatcctgtgcgcctgaaagagctgcgccaacagtgcaagaccgatcgtgccacgctgggcgacgcgctgtgcaaccgggtggccgaagccacgcgcaagcggttctatggtgatggcgatacgccctacacaccgccgaaggagccgcccaatttctga

SEQ ID NO: 351516 - DNA, 1488 bp, Pseudomonas aeruginosa
atgatcttcctttcccttcgcccattggttcctagcctgctggccctggcgctgaccgggtgcgcagtcggccccgacttcagacccgcgcccgtcccagcgccggatgattggtcttcctggcgcagcggcggggccgaggtcgttgggccggccggctcgccagggtcgccttcggcacaatggtggcgcgtcttcgacgacgccacgctagaccacttgcagcagcgtgccctggaagccagtcccgacttgcagactgccgcgctgcgctatgcccaggctcgcgtgcaacgccagacggtggcagcacagcgcgggccggctgtcgggatcgaggccggcgcatcccgccagcgcaccagcgagtacgccgccaactaccgcgtcctggatcaattggctggcggcaaccgcgacgccctggccgaagtactgggcgaaccctacaccttctatcaggctggcttcgacgcgagctgggaactagacctgtggggccgcgtgcggcgctcggtagaagcggccgatgccgacatcgacgcctcggccgccttgctcgacgccgcgcgcctgagcatcgccagtgagctggcacgcagctacttcgagttgcgcaccacacagcggctgatcgggttggctcgcgacgatatcgaagcattgcagacccggctcgaactgatccaggcgcaggtgcgccacggcctgggcagcgacctggacacagaaggccagcgcacgcaactggcagggctgcgtgcgcagcttcctggcctgttggaacaggaagttcagggcgtcaaccgtatcggcctgctgttgggcacccggcctggagaactgcggcagatgctggccgcatccaaagcgcctgacgagacgcagcccatgccggactacgccctgggcctgccatccgaacttgtacgccgccgaccggatatccgcgccgccgaggcccggctgcatcgggcgaccgccgagatcggtattgcccaagccagcctgtaccccggcatccgcctgggcgcgcactttggctccgaatcctatgaaagcggacgcttcggtgaatggggcacgcgcgcatggtcgatcggccccagcctggatctgcccatcttcgacagcgggcgacggcgctccaccgtcagactgcgcgagttgcagcagcaggaagccgccatcacctggcagcagaccgtgttgaaggcatggcatgaagtggatgacgctttgagcggttacgccaccgaacagcaggcgcagcgccagtggcagcaaaagacggacagcagtgcccaagcctacgcctgggcgcaggcccgctatcgcggtggcctggaggattttgcaaccgtactcgatgcccagcgcacttggttgcaggcccgccgcgaacaggttgccagcgacggccgcttgcgggagcggtttgtcgccatccacaaggccatcggcggcggcgatgttgcagggcagtag

SEQ ID NO: 351517 - DNA, 1119 bp, Pseudomonas aeruginosa
atggagactttcatcgccttcatccgccgcatcggctttctctgccgcaaggaactgctggccattcttaaagatccggccaaccgggtgatcctgatcgcgccggtcctggtgcagaccatgatgttcggctacggcgccacctacgacctcaaccacgtcccctatgcggtgctcgaccagagccgcagcgcggcgtccaccgagctgatcgcccgcttcgacgccgccggcgtgttccggcatgtcgccacgctgcgcacgcccgccgagatcgcgaaggtcatcgacggcagccaggccctgatggtgctgcacatcgcacccgacttcgccgagcgtatcgccgcaggccaggacgcgccggtgcaactggtgctcgacggccgcaactcgaccacggcgggcatggcggccgggcacgtcgccgcgctggtggctgactacaacgcccgcctgccgggcgccatgctgtccccggtacggatcgagacgcgggcctggttcaacccgaacctggagacgcgctggaataccgtgccgggcctgatcgcggcgctgagcatgatccagacactgattctggcggcgctgtcggtggcgcgcgagcgcgaacagggcaccttcgaccagttactggtcacgccgctgacgcccaccgacatcctgatcggcaaggcgctgccggcggtgctggtcggcgtgatccaggccagcctgatccttgccatcgcgctgttctggttccgcatcccgatggcgggcgcagtgtccacgctttacctcgggctgctggtgttcaccacggcctgcgtgggcatcggcctgtcggtctccgcgctgtcggccaacatgcagcaggcgatggtctacgccttcgtgctgatgatgccgctgatcctgctctcgggcctgattacgccggtgcgcaacatgcccgatggcttgcaggtcgccacctacgccaatccgctgcgcttcgccatcgatctggtgcgccgcgtgtacctggaaggcgcgggtctggccgacgtggccgccgacttcattcccatgctggccgtagccgccgtcaccttgccgctggccgcgtggctgttccgcaaccgctttgcctga

SEQ ID NO: 351518 - DNA, 1146 bp, Pseudomonas aeruginosa
atgagcggacaggcgcatgcatcgcacggcagcttccgccgacggcttgcggcgctgacccgcaaggagtttcgccagttgctgcgcgatccgagcaacctggccatcggcatcgtgctgcccatcgtgctgatcctgatcttcggctacgggctgtcgctggacacgcgcgacgcccccttggccgtggtgctggaagatgcctcgcccacggcgcgcgacgtggtggcgggcctggccggttcgccctatctgtcgccgacctgggtcaacacctttcccgaggccgagcaacttctgcgcgaacgccgggtcgatggcatcgtgcgcgtgccggccgacttctcccgccggctcgcagcgggtgatggccggattcaactgctgctgcacggcaccgacgccaacagtgcggccacgctggggcgctacgtcaacggcgccatcgcccactggcaacagcagcaggccgaccgcctgggttgggccggtgcgccgccgggcgttcgggtggtcgagcgcatgtggttcaacgccgccaacaccagcacctggtatctggtgccggggttgatcgcactgatcatgaccctggtgggcgccttcctgacggcgctggtggtggcgcgggaatgggagcgcggcacgctcgaagcgctgttcgtcacgccggtgcggtcgatggaaatcctgctggccaagctcatcccgtatttcgcggtcggcatgctcgggctggcgctctgcgtgctggcggcgcggctgctgttccaggtgccgctgcacggttcgctgaccgtgctgctggtcagttcgacgctctacctgttcgtggcgctgggcatgggcctgctgatctccgccgccacgcgcaaccagttcctggccagccagatcgtggtgctggccagcttcctgccggcgctgatgctctcgggcttcctgttcgacctgcgcaacgtgcccgcgccggtgcgggtggtgggctccatcctgccggcgacctggttcatggaactgatcaagacctcgttcctggccggcgaccactggccgatgatcgcgcggaactgggcggtgctggccggctatgccgtgctcctcttcaacgcggcacgactgcgcacgcgcaagcgcctggactga

SEQ ID NO: 351519 - DNA, 1755 bp, Pseudomonas aeruginosa
atgacggcggcgccggtggtacaggcgcgtggcctggtcaaatcgttcagcggtgtcccggcgctcgatggcgttgcgctggacatcccggccggccgcctgacggcgctggtcggccccgatggcgcgggcaagaccacgctgctgcggctggttgccgggctgatgcgcccgactgcgggtgcgctgcatgtgctgggtctggacgtggccgtgcagccgcaggtagtgcaggatcgcatcggctacatgccgcagcgcttcggcctctatgaggacttgagcgtgcaggaaaacctcgacctgtacgctgatttgcacggcgtggcccttgcgcagcggcgcgagcgtttctcgcgcctgctggcgatgactgacctggcccgcttcaccggacggcttgccggccagctctccggcggcatgaaacagaagctggggctggcctgcaccctggtgcgatcgcccgatctgttgctgctggacgagcccaccgttggcgtcgatccgctgtcgcgccgcgaactgtggcagatcgtgcagcaactggtggaggaagaccggctcagcgtcgttgtcagcaccgcctatctggacgaggccgagcgctgcgcccaggtgttcgtgctgcaccacggcaaggtgctggccgaaggccgcccgcaatcgctgtgcgaaccggcggaggggctgtgccgcatcgccacgccgcccgccggcatgccggcccgcacgttgcaggcccgcttgctggatgcggccgccagcatcatcgacgcggtgccagagggtggcgaggttcgcttcatccagcgaccggatgccgacccggcacgcatccatgcgctgctgggggacgccgcatgcaagaccgtcccggcgcggctggaggatggtgtgctcaccctgttgagggcgcagcagccagccgaggtgccacacctgccggacgagcgcggcagcggccatccgccagagcctgacgaccagacgcccgccatcgaagtccgcgacctggtgcgccgtttcggggacttcacggccgtcgccagcaccaccttcagcgtgcggcgcggggaaatcttcggtctgctcggccccaatggcgcgggcaagaccacgaccttccgcatgctctgcggcctgctgccggccagcagcggccatctgcgcgtggcgggcgtggacctgcgcaccgcgcgggcggcagcgcggcggcgcatcggctacgtgtcgcagaagttcgcgctctacggcaatctttccgtcgccgagaatctggcgttcttcggcggcgcctatggcctgtcgggcgcggccttgcgcgagcgcatcgccacgctgctgcagcagtacgacctggcgcaacaggcccatgcgcgcagcggcgacctgccgggcggttacaagcagcgactggcgatggccgctgcgctgctgcatgtgccggacatcctgttcctggacgaacccaccagcggcatcgacccgctggcccggcgtgcgttctggcgccgcatcaccgcattggcggcggcgggcaccaccatcgtcgtcaccacccatttcatggaggaagccgaatactgcgaccgcatcgtgatccaggacgcgggcacgctgctcgccatcggcacgccgcacgacgtgcgccgacgcgcgggcgacggcggcgcggccgacatgaacgcggccttcatcgccgtcgtcgagcaggcgcgcgcacagcttcggcatgtggaagctgtgtcatga

SEQ ID NO: 351520 - DNA, 1011 bp, Pseudomonas aeruginosa
atgaaaaagcgggtcatcgcaggagtcgtcgcattggccctcgtgggggctggagtctggtggatgacccgttccacagtacccgacgacgcgctggtgctatatggcaatgtcgatgtccgccaggtctcgctcgccttcggcggcagcgagcgcatccacgaattgcgcgccgaggaaggcgaccgggtgcagcccggacaggtgttggccgtgctcgacacccgcacgctcgccttgcaggtagagcaagcccgcgctgcggtcgaagcccaggagcaagcgctgctgcgcctgcgcaacggctctcggccggaggaagtcggccaggcgcaggcccgtgcagaggcggcggcagccgatacggttctcgcccaacaagaattgaaccgtttgcgcaacatcgctcaagacaccgatggccgcgcagtcagccgacaggaactcgaacaggccgccgcccggctacgggtggcgcttgctcaaaagcaggatgccagcaaggcgctggaactgacacgattggggccacgggacgaagacatcgcggaggccgaggcgctactgcgcgcgacacgtgtggaactggcgttgctggagcatcgtctggcgcaagccgaattgaaggcgcctgccgccgcagtgatccgctcgcgcttgctggaggtcggcgacatggcctcgccgcagaagccggtcttcgcgttggcgctggccgatccgaagtggatacgtgcctatatcaccgaaccgcagttgggccatgtgcgtgccggcatgccggcgcgggtcagcaccgacagccatcccgatcaagccatcgacgggacggtgggatatatctcgtcggtggccgagttcaccccgaaatcggtgcagaccgaggagttgcgcaccagcctggtctacgagattcgcgtgcgtgttcgggataccgacgaccgcctgcgcctgggtatgccggccaccgtgacgctggcgctcgacgcgccgcgaggcaggcacccatga

SEQ ID NO: 351521 - DNA, 648 bp, Pseudomonas aeruginosa
atgagcaaaccccgccgcgccccacgcacagacggcgatagcacccgcgccaagctgctggatgccgccggccgcctgttcgccgaatgcggctatgccggagcggccagcaaggccatctgcgaagcggcaggcaccgacctggccgcgatcaactatcacttcggcaaccgcgatggcctctatcgcgccgtcctgcatgaaggtcacaagcatttcgtcagcctagaggacttaaccgcgctggcgcagtctgtcctctcaccgcagcagaagctggaagccttcatcgacggcatggtggccagcctgttcgatgacaagggttggcacaaccgtgtctgcgcacgggaaatcctggcaccctcgccgcatttcgccagcctcatcggcgaaggcgtgatgcccaaattccggctggttgcggacatactcggcgacatcaccggcatccccccaggcgacccggcgctggcgcgctgcgtggtcagcatcatggcaccctgcctgatgctgctagtgatcgaccgcgatacgcccaacccattccaggcgctgctctcgcagccggtggaagaactggccgcgcatttgaaacggtttgcggtggcgggattgctggctgagcgtagcgctcggcaacgctga

SEQ ID NO: 351522 - DNA, 1482 bp, Pseudomonas aeruginosa
ttggcccaggaactggaagcctatggccaggtgtcaggcttgcccaccgacgctgcgactttcgtggccgggttgcgcgcacaactgaccgacttggccgacgaagttgacgagcgtttccccgagaatgttcatgcggacattctggaaggacgcctggtactgcggaaggggcaacgcgccgaggtctcaagcgccattgccaccgtggaccgcctcatcgccgaacggctcccggagtccagcatcgtcgatgtcctgatcgacgccagccaatggctggatctgcaccgattcttccgtccgatcgccggcaccgagagccaggttgaagatctccctcgacgggtgatcaccacgctgttttgctatggctgcaacttgggtccgacgcagacggcgcggtcgatcaagggcttcagccgtcgccaggtcgcttggctcaacctcaaatacgtgaccgaagatgtccttgagaaggccatcgtggaggtcatcaatacctacaacaaatttgacctgccgggctattggggcagcggcaagagcgcgtcagcagatggcaccaagtggagcgtgtacgaggacaacctgctgtcggagtaccacatccgctacggcggctacggcggcatcggctactaccatgtgtccgacaaatacgtggcgctgttcagccacttcattccctgtggcgtgcacgagggcatctacatcctcgatggcctgctggccaacacgtccgacatccagcccgagatcgtccatggcgacacgcaggcccaaagctatccggtcttcggtttggcccacatgctgggcatccagctgatgcccaggatacgaaacatcaaggatctcacattcttccggcctgaacctggcaggacctataagaacatccaggcactgttcggagacagcatcgactggcaactgatcgccacccatctccacgacatgctgcgggtagtgatctcgatccgattggggaagatcaccgcgtcctcgatcctgcgccggctgggcacctacagccggaagaacaagctgtacttcgccttccgggaacttggcaaggccgtccgaccgctgttcttgctgcgctacatcgatgacaacgagattcggaaaacgatccatgctgcgaccaacaagagcgaggagtacaacggcttcgtaaaatgggtgttctttggcagccaggggatcattgctgagaacgtccaacacgagcagcgcaagatcatcaagtacagccagctggtcgctaacatgatcatcctccacaacgtagaaggcatgagccggaccttggctgagatgcggaaggagggagttgaactgacgcccgagatcctggccggactgtcgccgtttcggaccagccacatcaaccgcttcggcgactaccatctcgaccttgatagggaagtggcgccgctgagctatacagcgaaagtccttgaacaggccccatag

SEQ ID NO: 351523 - DNA, 1116 bp, Pseudomonas aeruginosa
gtgcacatcgccgatatgaccatgttctacgcgcctgccagcgggggggtacgcacctatctcgaagccaagcatcgccatctctggcactatcccggcattcgccacagcgtgctggttcccggcgccagctaccgccaggcgaacggcatccacgaggtgccggcgccgccgctgccattcggcaatggctaccgcttccctctccgtcgcggcccctggcgcaaggtgctgcgcaatctgcaaccggacctgatcgaggtcggcgacccctacctcaccgcctgggcggcgctcgacgcgcgacgtcggctggacgtgccggtgatcggcttctaccactccgacctgccgctgctggtgagcaatcgcatgggcgcctggctcgacaccaacgcggacaactacgtcagcaagctgtacggccacttcgaccgggtcctggcccccagtcgggtaatggcggaaaagctgatgcgcctgggcgtcgccgacgtgcatgtacaaccgctgggcgtcgacctcgtcaccttccatccgagcaaccgcgatccggggctgcgccaggaactcggcctggacgaggaaacccgcctgctggtgttcgccgggcgcggttcgcgggaaaagaacctgccggtactgctcgacgccatccagcgcctcggcgacggctatcacctgttgctggtgggttccaacatgccgacccgggttccgcgcaacaccagcgtggtcgaccatttctgcgacagccgcgaagtcgcccgcctgctggcgagcagcgacgcgctgctgcacgccggtgaccaggagaccttcggcctggtcgcactcgaagcgatggccagcggcattccggtggtggcggtgcgcgccggggcactggcggaaatagtcccggagcgttgcggcgtgctctgcgcaccgaacaacggcgacgccatggcctgcgcggtgcgcgaactgttcagccacgacgtcgagctgcgcggccagcgcgcccgccgtcacgtcgagcgccagcatgcctgggacgcggtggtcgccggtctgctcctgcactaccacgcggtactcggcgacagcgaggcgaggttcccgcgctatggctga

SEQ ID NO: 351524 - DNA, 762 bp, Pseudomonas aeruginosa
atggctgaacgcagcctgctgctggtgttgcacgacgtggccccggaaacctggccggactaccggcccttcgtcgaggccgtggacgcgctcggtgaggtccccatgacctggctggtagtgcccgacttccaccatcgcaacccgctggaagccgacgaaaagttctgcaaactgctctcgcggcgggtaacccggggtgacgaactggctctccacggcttctatcactacgatgacgccccaccaccgcgtactccagggcaatacttcatgcgtcgcatctacacctgggagggagagttctatgccctcgaccacgccgaggccaaggcccgcctggccgccggcatcgagctgttccgccgccgcggatggccgctgcacggtttcgtcgcgccggcctggctgatgagcgccggcacccgccaggcgctcggcgagagcgggctgcgctacaccagcgacccgtccaacctgtatctgcttccccacctgcaaccgatcgaggcccccggcctggtctggagcgcgcgcagtgcctggcgtcgcggcctctcctgggcgctcagcgagcagcgccgccgggcctggcgctcagcgccggtgatccgtctcggactccatccggtcgacatgcgccatcgcttttcccgcgaatactggctgcgtaccctgcgcaccctgctgtccgaggggcgccagccgttgaccaagatcgactggctggagcgccacctcgccttggaccacgcggcatga

SEQ ID NO: 351525 - DNA, 1890 bp, Pseudomonas aeruginosa
atgtcatctagtagctctaaattgctgaacggtatggtcgcggtaagttcaggcagaaacattcggctggatgtccaggggctgcgggctgttgcagttctggctgtgctagcttaccacgccaacagtgcctggctcagggctgggtttgtcggcgttgacgtgttcttcgtcatttccgggtttatcattaccgccttactggtcgagcgcggtgtaaaagttgatctggtagagttttacgcgggccgtatcaaacgtatttttccagcctatttcgtcatgttggcgattgtctgcattgtctcgacaattctgtttctgcctgatgactatgttttttttgaaaaaagtctacagtcatctgtatttttttccagtaatcactatttcgctaattttggtagttactttgctccgagagctgaagagctgccgctgctgcatacttggtcgttggccatcgagatgcagttttatctgttctaccctgtactgttcatgtgcctgccatgtcgatggcgcttgccggtgttcatcctattagctattttgctgttcatttggagtggctattgcgtattcagcggcagccaagatgctcagtacttcgccttgctagctcgtgtacctgagttcatgtcgggagctgttgtcgcattatcattacgtgatcgtgagctacccgccaggcttgcgatacttgcggggttattgggggcggcgttgctggtctgctccttcattatcatcgacaagcagcactttcccggattctggtcgctcctgccatgcctgggagccgctctgctcattgctgcccgacgtggccctgccagcctgctgctggccagcaggcccatggtctggataggtggtatctcctattcgttgtatctgtggcactggccaattctggcattcatccgttactacaccggccaatacgaattgagcttcgtggcgctgttggcatttctcacaggttcgttcctgctggcctggttctcataccgctacatcgagacacctgccagaaaggctgtgggtctgcgccagcaggcgctgaagtggatgttggccgccagtgtggtagctatagtggttacggggggggcgcagttcaatgtgttggttgtggcgccggcgccaattcagttgacgcgctacgctgcaccagagtcgatctgccatggtgttcaggtaggggagtgcaagcgaggcagcgtcaatgccgtaccccgtgtgctggtgatcggtgatagccatgctgcgcagcttaactacttcttcgacgtggttggcaacgagtcaggtgtggcttaccgagtactcaccggaagcagttgtgtgcctatacctgctttcgatcttgaacgtttgccccgttgggcgcggaaaccctgccaagcgcagattgatgcagttgcccaatcaatgttgaactttgacaagatcattgtggcgggcatgtggcagtatcagatgcagagtccggcatttgcccaggctatgcgtgccttccttgtcgataccagctatgccggcaagcaggtcgttctactcgggcagataccgatgttcgaatcaaacgtgcagcgtgtgcgtcgtttcagggagctgggtttgtcagctccgcttgttagctccagctggcaaggtgcgaaccagcagttgcgtgctctagccgagggtattccaaacgtacggttcatggatttttctaccagcgccttcttcgccgatgctccttatcaggacggagagcttatttaccaggatagccatcaccttaacgaggtgggggctcgccgctatggatatttcgcgagccgtcaattgcagcggctgtttgaacaaccacaatcgagtgtgagtctcaagccatga

SEQ ID NO: 351526 - DNA, 1200 bp, Pseudomonas aeruginosa
atggcaaagatcaagctcaccaagaccgccgtagaggcggcgcaaccccaggccaaggacgtcgaactgcgggataccgtagtgcccggcttcctgtgcaagattaccccagcgggccgcaaggtgttcatgctccagtaccgcacgaacgccggtcagccccgcaagccctcgctggggctgtacggggaactgaccgtggagcaggcgcgcgtcatggcgcaggactggctggccgaggttcgccggggtggcgaccccggcggcgccaaggccgaggcgcgcaaggcgcccacgatggaggcgctgtgcaaaaagttcatggaggactactccaagaagcgcaacaagcccaccacgcagcgcggctaccaggccgtcattgaccgctgcatcgttccggtgctggggcgcaagaaagtgcaggacgtgaagcggcccgacattgccgcgttgatggaaaagttcgcctacaagccggccgaggcgaacaacgcctttggcgtgctgcgcaagatgttcaacctggccgaagtgtggggctaccgcccggacggcacgaacccgtgccgccacgttccgatgttcccgcccggcgaggaaacccggctcatcgttgacgacgagctggcgctgatctttcgccaactggagaagctggaggccgaagggctggagaactacgtcatcccgctggcgatccgcctgcaattcgagttcgctggccgccgttctgaaatctgcacgctcgaatggagctggatcgacctggaaaatcgccgcgtcgtgtggcccgacagcaagaccggcggcctttccaagcccatgagcgcggaagcccatcggctgctttcgacggccccgcgccgggagggttgcccgtatgtcctgccgtctcccaacgacccggcccggcacctgaccttcggcgagcactatggcggctggtgccgggtactcaaggccgctggcgtcccgcatgtcggcacgcacggcatccgccaccgctccacgaccgacattgccaattcgggcgtgccgaccaaagtgggcatgaagctgacgggccacaagaccgtggcgatgttcatgcactacgtccacaccgaggacaagccggtgcgcgatgcggccgagctggtggccagccgacgccaggccatcactggcgcacggcaggccgaaggagtggcggcatga

SEQ ID NO: 351527 - DNA, 765 bp, Pseudomonas aeruginosa
ttgtttggcgatggcatcaaaggcacgctgaaaaaactgctgctgcgtgactgcaagctgcacaccatcatccgtcttcccaagggggtgttcgctccgtacaccaccatcaagaccaacctgctgttcttcaccaagggcagcgccgtggatgatggtaccgagcactttcacaccgacaccatctggttctacgagcacccctatccgccgggctacaagagctattccaaaaccaaacccatccggctggaagaattcaaacccgagcgggactggtggggcagtgaggccaacgactttgccgaccgcgtggaaaacgaattcgcctggaaggtggatttcaaaaccaaacgcgaacaagccgaagccgccgcgcagccacactggctgcgtgccgaaatgctgaatacccaagccgccgtgttggaaggtgaggcccgtgatctacgcaacagcctggttggcagcaccgacgccgcctatcgcgaaaagatcgaggcgcagattgccgaactgcgcagtcaggccgagccgttgcgcctgcaagcacgtgatgcgcaagcagcgggagaccgcctgtactggccgatcttcaatctcgacctgaaaaatcccaacgcgccggaagaagaaactcacgacccggacttgttgctggagaagtacaaaaaactgttgggcgaaattgaagaaaccgaaaaccagctcaagagcgaactggccgccgcgctagcacatcacttcgtcggcgaggacgcctga

SEQ ID NO: 351528 - DNA, 243 bp, Pseudomonas aeruginosa
atgacgacgcgcaagctgcggctcgggccgctgccgaaaacggaatccacgaagctgacctttgcctgcccggccggactgaaaaccgatctcgaccgctacgccgcgctgcacgcgcagacctacggcgaagcggtcgatgccacagtgctgattccgcacatgctggaagccttcatggcgggtgatcggggattcaggaagggggatgcgaacaaggccacaccgcagaagccaagctga

SEQ ID NO: 351529 - DNA, 1278 bp, Pseudomonas aeruginosa
atgagccaggacgacacccccgacctcgccacgccacaggcgggcaaggtagccccggaagcggtggcgctgcgcgcccagccgcgcccggtcacgcgtctgaaccggcgcacgctggccatcctcgccggtggcctgtcggtcgccgtgctcggcgcgctgatgtggtcgctgcaaccgcagcggcgcggggcgggcgagcagaccgagctttacaacgtcgatcgtgtgtcgaagtccgaagggctggatgcgctgccggccgactactcgaagctgccgccgccattgccagcatcggtgccagagctggggccgccgctgccgggcgatcttggcccggccatcgtgaagtcgcagcagccggtgacggccgcctacgcggccccaggccacgaccccaacgatgcgctgcgcaaggaagccgaagcggcggcggcatcgtcggtgttcttccgctcagggtcgcaggccgcgccggtggcgcagacgcaggtggccgccgcgccgggattcgccgccaatgcggccttcgacccgctggcggccgggcctgcctcgacggcggcccagcctgccgacccgaccgccgtgcagaaccggcaagaccagaaagaggcgttccagaaagccggaaccacggaaacccgtaattccggcaatctgcaacttcctgcgtcgccgtatcaggtcatggccggaacggtggtcgcaggcgctttggtgacgggcatcaaatcggacttgccgggcgacgtgatcgccacggtgacggagccggtctatgacacggccaccggcaagtttctgctgatcccgcagggttcgcgcatcctgggaaaatacaacagtcaggtcagctacgggcagagccgcgtgcaggtggtgtggaaccggatcattctgcctgacacgtcttcgctcacgctcgacaacctggtcggcaccgacccggccggctatgccggtctggaagatgatgtggattggcattgggatcgcatctttgccggcgcggcgctgaccacgctgctgggcatcggtgccgagctggccgcaccggagaaccggcaggacggaaaccgcgtcgtcatcgccgggcgcgacagcgcccaagacagcatcaatcaggtcggccaggagatgacccggcgcaacatgaacatccagccgacgctgaccgagcggcctggcctgccggttcgcatcatcgtcaaccgcgatctggtgctgcggccgtaccagccgcttttcttcaacagggggacttcacgatga

SEQ ID NO: 351530 - DNA, 261 bp, Pseudomonas aeruginosa
atgaggccgatcaaaatcatcatttcgtcgtcattgatgctgctgctgaccgcttgcggtcagtcttcctctcctactgaaacagtggaatcattggctgccaatcccgaacggctgaaggcactccgccaacagtgcaagctggagcgcgaaaagctgggcgatgaactgtgcaaccgagtcgcagaagccacgcgaaagcggttctatggcgacggcaaggtgccatacacaccgccggagaacccacccaagttctga

SEQ ID NO: 351531 - DNA, 864 bp, Pseudomonas aeruginosa
atgaagaacgaaaacaaagtcttggcctgcgtggatcaatctcgttttgccgactacgtggccgactacgctgcatgggcggcacggcgcatggacgcgccgctggaattcctgcatgtcatcgaccgccatcccgaacagggttcaggcgaagatcgcagtggagccatcggcatcgacgctcaagaaaacctgctgaccaagctatcggaagaagacgaggctcggtcgaggaatgcccgcgagcacggccgcatctttttgaaccggctgcgcgagcgtgctgtcgctgccggtgccgcattggtcgatgttcgccagcgtcacggcgaattggaagaaaccttggtcgagcaggccgaaggcgtgcgtctgttggtgttgggtcgccgtggagagtccgcagacacaacccaacgggatctagggcgcaaggtggaacgtgtcgtgcgtgccttgaacagaccgattctgaccgtcaccgaagactttcacgaaccgcagcgcgtgatgatcgccttcgatggtggaaccgtcacccggcgcggagtggagatggtcgccggcagtccgttgtttcgtggcctgccaatcaccctcctgatggcaggcaaggaaagccaggatgcaccaaagcagcttgattgggcaaagaccaccttggaggccgccggctttgaagtcacgtcattactggcacctggtgacgcggaaacagtgattgccacggaagtaaaggaacaggccatcgacatgctcatcatgggcgcgttcggccactctccgctgcgcagcctgttgtttggaagtaagacgaccgatttgctgcgatcgtcgagtattccaacgctcttattgcggtag

SEQ ID NO: 351532 - DNA, 1722 bp, Pseudomonas aeruginosa
gtgcgtttccccggcgagaacctggtgcgcgaacgcctgctctggttctacatcgaccgtggccgtcgcgacagcctggcgcccctgttggcgcagtggcatggcctggcgctgcgggacagcacgctgtggctgccgttcgccagcgccagcctgctgctcgagcgtaacgaccaggcgctggcctggttccgcctgtacctcaagtccaatcccaacgactggctggtgcaggccgcctacgccgacgcactggatgccagcggctaccaggacaaggccctgcgcctgcgccgactactgctccggcggctcgaccgcgaggcggtcagggccaccccggacagcttcgccgcctacctgcgcctgctcgccgtggcccaggggccgctgctcgcccagggcgaggcgcggcgggcctggaatggcgagccggcgatgctgcagctgtggttcgagcagttcctcgaccagctcgccgccaccaaccaggagccgctgaaggatgactggctggcctgggcgcgcggccggggcctgaagatcgggcgcaacgaagagatccaggccgccctgcgcagccagaatcgcgccgccctgcaacgcctgctggagcgcggcgagctggatccggcgcagcgggtcgaggcgctggtgcgtctcggccatggcggcgaagcgctgggcgaggccctgggcgcactgggcgacggccactcgcgcgacaaccgcgagcagctgcggcggcaggcggcggaaatcctcgaacgcactccccagggcctgcaactgggttggaacaagcgcgacttcggcggtctcgacttcaaggggccgacgctgcgcgcggcgcgccacctcggcgacgactggtacgccgatctcgaactgggcagtggccgctatcacggcgatgcgctggatagctcgctcctcggtagcgaacgcaacgccaggctgacgttgcggcgcgaactggccgatggcttcgccgcggcgacgctcgatggcagctggcgcgacgacgaggaccgccacggtctgggggtgctgcgcaattggcggctgagctcgcgcgacgaactggaagcgggcctcgactggcaccgcgagaccgacgagaccggcctgatgcgagccctcggcatgcgcgacagcctacggctcggcggccgccacaccctcagcgggcgcgaccagttgagctggtcgctggcgcacaaccgcttctccacccgccagggcgacgacctcggcaacggcgaggcgctgtccctggaatgggcccacacactgttcttcgacggcccggcctggcaactgcgcggcggcatcgactaccagcgcaatcgcctggagaaccgcgtgccggacgacctgctggcggcccatggcggtgcgctggcgctcgatggcgcgcgcagccaggacctgctgcaggaccgctatggccaggtctacctcggcagcacctggcgccgtggcttccctggcgcgctgaaccgcagccgtccgcaatacacctggatcgtcgacaccctggccggctggcagtggacagagaaggagttcaactacggcatcgatctcggcatcggcatggagctgctgggcgacgacgaactggcgttcaccttcggctaccagtcggctccccagggcggcggcggcgatgccggcggcacgctcggggtgacctacagcacgcgcttcggccgctga

SEQ ID NO: 351533 - DNA, 1170 bp, Pseudomonas aeruginosa; identical to SEQ ID NO: 349244

SEQ ID NO: 351534 - DNA, 1680 bp, Pseudomonas aeruginosa
atgaacctgccccgcctaaacgatcagcagagcagtgtcatatggtcggctctgcttcatgagccggaatggatgcctgagatgcgggcacttctgaaatcgaaggctgcggagtcaggcacagcgttcggaagatggctactgagtgaaagtggcatatccgggatttcgaaggcgcacgtacgtgaatttgaggcgtggctcggcacgaatcacacgctgcgtaacgtattgcgtagcatcacccaacgaatcagagatcagattccagggttcccgttagcgcgaattgctattgccatcaagcgggcagcgaacccgatcaatccggacgtctacacagccgagagaattcaacgcagcggccaactggttcaagctctgcaacagggcctgaaaatggatctcgacgcgctgagtagagaagagcgtatcggtctactgctgctgagcgcagcctacagcggcggattgctcgatgtggctcagctgaatgcgatgctcggctcatcgttggaaagcattgagtgggtggcgggaattcccgagatacgtctgcctttatcaatccgtggcaagaccggcgcggaatttcggcagtggttccctgaccccgccacgctggccctgttagttcgctgcgcggatgatgttcaaaaaagcagttacaagatgcatcgtaggaattggcacatgcgctgtgtggatgcatttctgaggaaggtcgatatacctgaacaggatcagccacaaaatcttagtgagctgtttgatctgtttaggatgcaaatgcaactgcggcttccgcaggtgctggtgaattttgcttgccgacaagagtttgtctctcaatccctgcgcccctcatcgtggggcaatatctgcggccaagaggatctcgaggatccggcggggacttatgacgatgaatctgtttcggatggacctgaggatagccctgacccacccgcatggttgctggagctgcgcgatcgggtccgggataacctgcccatcgagatgccgttgcaggcagagggttccggagagcttcccggcctaatccagagttggattgcctacatgctgggcggcgcctctgcatacggccacagtgccgggcgcagcaccatagatcgatatatccgggtactaggcgcagcacttacctctcagctggatggcataagcattttcgagctcgaaattgacgcgctggaaattgtctatgaatccacattggatgcgcaggccacagatagcaaaaggcgtactctggccaaggcaatccacgagtttcatacgtttctgcagcgtcggttcaactatccgccagtcagcccctactccatcctaggcatcggcaaaggcgtgccccgggtggatgctcgcattatcagcgaggatcagtaccagtctgttctgcagacgcttggcacctgcggtctggagttgcgtacaccgcgcttggtcacagcagcgagactgttgttgatactggggtttcggttgggtttgcggcgcaacgaggctctaaagctgcgcctatgcgatttgcatttgcccgagtattcgacagaggacgcagcacgtattcaggcgcgccacccgaacatgcgcagactatccagcgatgaactggccggactagatgtgaagcgtcaagaggttatttcttga

SEQ ID NO: 351535 - DNA, 393 bp, Pseudomonas aeruginosa
atgaccatcagcatcaccttgaagacctgggccaagcgtatcaagcgcgatggcgtgacgctgtggtttgcgggcaagcatcctctgacaccgtggtatgccaaggccctggggctgttcgtggtggcctatgctttgagtcccatcgacctgattcccgatttcatccccgtgctgggttatctggatgacatgatcctgctgcctgtcctgatctggctgaccgtgaagctgctgccggccgaggtgctggcggaatgccgtatccaagccgatgaatggatgcgggtggaaggggccaagccccgaagccgattcggtgcagtgctgattgtggctgtgtggctggtggtgggtgcggggctgtggttctggctccagtcgcatctgtag

SEQ ID NO: 351536 - DNA, 1380 bp, Pseudomonas aeruginosa
atgaatgacgtgaccatcatcgaccagttcctcaacacctttgccgcgtatatcgactcgggtttcgggctgctgcggggcgaagtggcgttcctcactgccacgctgatcgtcatcgacatgacgatcgccggcctgtattgggccatgagccatgccaccggtcagggcgaggacgtgatcgccaagcttctgcgcaaggtgctgtacgtcggcgccttcgcctacatcatcaataacttcaactggctggccagcatcgtattccgctcgtttgcgggattaggcataaccgccaccggctcggccatcacgatggaaaacttcttgcagccgggccggctggcgaaaaccggcatcgacgccggggcgccgattctggagcagatcggtgagatggcgggctttcccgaagtattcgtaaacctcgaccccatcgtggtgatgttcctcgcgtggctggtcgtggtcttgtgctttttcgtgctggcgatccaactgttcatcacgctgatcgagttcaagctgaccacgctcgccggattcgtgctggtgccattcgcgctctggaacaagaccgcgttcctcgcggaaaaggtcttgggcaacgtggtggcctccggcgtcaaggttctggtgctggccgtgatcgtcggtatcggctcgggcttgttcgctcagttccaagtccatcccgccgagccgtctatcgaccacgcgctggtcatcatgctggcctcgctcaccttgctggcgctcgggatcttcggccccggcatcgccacgggcctcgtgtccggtgcgccgcagctcggcgctggcgcaatggccggtgctgctgtcggcgctgccggcacggccgtcgccatcggcgccgccgcgacgggcgtgggtggcgccgtggctgctggcgcgcgcatggccccggctgccgccaagctggccggtagcggtgcgcgcgccgccacgtcggcggccagcagtgcgaagtcggcgttccaggccggttccgccgccgctggcggcggcgcaaagggcgcgatggcgggcctaggcaacgtcgccaagaccggcgcgcagtccgccggacgcgccgcagcatcccgtgcttccgctgccgggcagcggatggccgctccgttccgtgctggctggaatggctcgacggccgacgctggcgcgtcaaccggtcaagcctccgcaggagaagcccccgcaggcggcgccgctgcacagaagccggaacaacccgcctgggccaagcggctgcatcgccgccagcaactcacccacgccgcgaccaccgccgcgcacacgctgcgcggcggcgacggtggcggctcggggcaaggcccgagcctgcgcggctccgacgactaa

SEQ ID NO: 351537 - DNA, 549 bp, Pseudomonas aeruginosa
atgaaccaggcgcgcaacctggccaacctgccgtccagtgtggtgaaccagttgcgcgccaacctggcgacgaccgagcggctgatcgcccaggcccgaggcttggcctacgacgtgacgaatctggatcgggagttcgcgcgcctgtatcccgagcaatacgccgccaccgtgagcggcgaccagatgtaccgcgacgcgcaggagcgttggcgaaacacgctcaacggcttgcagaccacgatgcagatgcaagctcaggtgtcgcagaacctgggcgaagacgaaagcgtgctggccgacctcgtgggcaagagccagtcggccgaaggtgcgttgcaggcaatgcaggccatgaaccagttgctggccttgcaggccaagcagtcgatccagtctcaacggctccaggtcacgcaggatcgtgcggcctcgctggaactggcgcggcaggcggcggccgccgagcgcgcccgcgaggtgcggcgacgtttcatgggcgatggcacgccgtacacgccgcagtccgtcaatttctaccgcgactga

SEQ ID NO: 351538 - DNA, 471 bp, Pseudomonas aeruginosa
atgccgtccaagacgccagacgaactctcacggtatcagaaactctacccgcactgcgatttcaagcaggtttccgcagagatagaagcggtcggcggcgtgctcagtgaaggtcaatgccttttccacgcaggactatggcccggcggcaatggctttgttgcagatcgtccactgtccacttcattctgcccccaggtcgccttgcgcaacgcagaccataagggtaaaggctatgacgcaaataggattgacctgtttgttttaagagcgatcagcccgaagaccaaggtctttgcttacaggcggaaagggaccaatcttggccacgaaagcgaagtcctgttcgccgcaggtgcggaactgtcgttgagatcggaacttcaggtgaatacaaactatccggctgggaagtggggattccccgacaagcgaatatcggtttacgttctgaccgtcgatatttcgtag

SEQ ID NO: 351539 - DNA, 315 bp, Pseudomonas aeruginosa
atggccaacatcggcaccttcaccgcagacaaagacggcttcaccggcacacttcgcaccctgacgctcaacgtcaaggtcaagctggttcccaacgacaagggcgacaccgagaacgcccccgacttccgcctgcaggcggccggccacgacatcggcgcggcgtggaagaagaccagcgaggccgggcggtcctacgtgtccgtatccctcgatgatccttcgttcccggcgacgatctatgcccgcctgatcgagaacgaggacggcacgcacgacctgatctggtcgcgcagcaagcccaaggcggcgtga

SEQ ID NO: 351540 - DNA, 420 bp, Pseudomonas aeruginosa
atgcagcacggccatgacggcggccttgctgtgcatcagctcctccatctcgaagcactgcacgtcggccatgcccagtcggtcatggtcggcgtccagcagcttgccgtgcgcgccgcccagcacataaggcgcgagcgcttggcgcagcgcattcgattgcagcagcacggacaggccggtcatcgtgcgctgttctacgggcgcaccggccagacttcccagcgccgaccaaatagcggccttttcgtcggggccgactgcgacgccttcgtgcagcaagcggccctcgatccattcggccgcccaggtgcggtagctctcgcggtcgatgcgggcgagtggctggaaggcgatttcgccatccgtgcccaggtcgtagtgttcgccgcccagcccgaggatcgtggcgcgcattga

SEQ ID NO: 351541 - DNA, 861 bp, Pseudomonas aeruginosa
gtgatcgaacgttgccgcgatgagtttccagtgcgactgatgtgtcgttgcctgcgggtctcggccagcggttactacgactggagtaagcgcttgcccagtgcccgggagcgcgacaaccagcgcttgctcggccggatccgtgagttgcatgaggacagccggggcacattgggcgccggccggatgcatgaagaccttgccgaggaaggcgagacggcgagcctgaaccgggtggcgcgtctgatggcgaccgatggcctgcagggttggccgcgaccgaagcggcgaggccagcgcggcaagccggcgctgacgccgccgggtgtgcgcaacctgctggagcgggacttcaccgcgttggagccggagaccaggtgggtcaccgacatcaccgagctcaagacccggcaaggcaagctgtatctgtgcatcgtgctggacctgtttgaccagcgggtggtggggtggtcaatgcatcatcgtcaggatcgtcagatggtgatcagggccgtgcagatggcggtctggcagcgccaaggcagccatccactgatcctgcactccgaccgtggcagccagttccgaagcggcgactaccagcgttacctggcggccaacggcttggtgtgctcgatgagcgcggtgggccactgcggtgacaacgccgcgtgcgaaggcttcttcggcctgctcaagcgcgagcgggtctaccgcatgacctacccaacgctcgatgccgcgagggcggatgtgttcgaatacatcgagcggttccacaacccgaggatgcgacgaagggtcgccaggcaagaccagaagttctcagcccttttacaaccgtccgtgatttcggggtag

SEQ ID NO: 351542 - DNA, 288 bp, Pseudomonas aeruginosa
atgtcgaagcgaaggaagttcagcaccgagttcaagcgcggtgcggttgagcaggccagccagccgggcgtcagctgtgcccaggtggcccgggagctggggatccgggatgcattgctgacccgctggaagcgggaggcccagagccggggccaggtggccttcggtggcaccgggacgccccgggacgaggaactggcgcggctcaagcgcgagctggcccgggtgaagaaggagcgggattttttgcgagaagcggcgacgttctttgccaagggatcatcctga

SEQ ID NO: 351543 - DNA, 306 bp, Pseudomonas aeruginosa; identical to SEQ ID NO: 323951

SEQ ID NO: 351544 - DNA, 315 bp, Pseudomonas aeruginosa; identical to SEQ ID NO: 323950

SEQ ID NO: 351545 - DNA, 219 bp, Pseudomonas aeruginosa
atgactgagtccgaggaagaggttcgactcctcctgcgcgatctcctcgatgagcagcgcaagaccaatcagctattgcaccttctgatccaggctctggccgaagatggcgaggatcctgacgccatgccgaccagctatctggatggaacaccgatccaagggcatcagccggtacgcagtaatagccttttggcaacaccgccaggggagcgatga

SEQ ID NO: 351546 - DNA, 3537 bp, Pseudomonas aeruginosa
atgaaaggcttcctcaacttcttcgcgcgctgggtggtgccggtgctcggcctgctcgccctgagcctgatcatctggttcctcggcccgctgctgcgcctgggcaactacgaaccgttggcctcggcgaccagccgctgggtgctgatcgttctgctgttcctggtctggatcggcttccgcgtgctgcgcatcgtgcaggcccggcgcaacgcggcgaaggtcatgcagagtctcgccgaggtcagcgcgccggacgccgccagcgtcgccaccgccgaagagctggcgaccctcaagcaacgcatggacgaggccctggccctgctcaagcgggccaagctgggcggcagcgagcggcgcaacctgtacgagctgccctggtacgtgatcatcggcccgcccggttcgggcaagaccaccgcgctgatgaattccggcctggacttcccgctcgccgcacagatgggcgccggggcgatccgcggggtcggcggcacgcgcaactgcgactggtggttcaccgacgaagcggtgctgctggacaccgccggccgctataccacccaggacagccacgcccaggtggacaaggccgcctggctgggcttcctcgacctgctcaagacccagcgcaagcgccgccccatcgatggcgcgttcatcgccatcagcctttccgacctgctgctgggcagcgacgccgagcgcgccgcccatgcccaggcgatccgcgcgcgcatccaagagctgtaccagcagctcggggtgcgcttcccgatctacgtgatgctgaccaagttcgacctggtgccgggcttcatggagttcttcgacagcctgaaccgcgaggaacgcgcgcaggtctgggggatgaccttcgccctcgacgacggcaagagcgcggaaggcccgctggcggtgttcgacagcgaattcgccctgctcgaacagcgtctcaccgcgcgcctggtggaacgcctgcagcaggagcgcgacccggcgcggcgcgacctggtctacggcttcccgcagcaattcgccgccctgcgcgaatgcctcggcgagttcctcaacggcgtgttcaagcccaacccctacgaggaacgcccgctgttgcgcggcctgtacttcaccagcggaacccaggaaggcagtccgatcgaccgcctgatcggcagcatggcgcagtcgatgaacctcgaccgccagcacctggcgcggcagaccggaaccgggcgcagctacttcatcgagcggctgttccgcgaagtggcgttcggcgaacgcggcctggtcggcaccaacccgaaggtcgagcgccgccgcaaatggctgaccatcggcgcgctgagcgccaccgcgctggtggtgctggcggtgacggcggtatggatcgccagctaccgcgccaaccagagctacatcgccgcggtcgaccagcgcgtcgacccgctggcgcgcggcatcgagtcgctgagcccggcccagcgcgacgtcctggccgtactgccacagctcaacgcggtgcagaatctcgccggcgacgcgccaagctgggccgaaggctacgggctgtaccagggcgacatgctcggcgaggagtccgccagcgtctaccgcaagctgctgatcgcggtgttcgccccgcgcctggtgacccgcatcgaggaacagttgcgctccggcggcagcagcgatttcctctacgagggcctgaaggcctacctgatgctcggcagcccggaccattacgacgccgacttcatcaaggcctggatcagcctcgactgggaacgcaatctgccgcgcgacctctcgccggaacagcgccaggcgctgcacgcgcacctcgacgcgttgctcgaacgacggccgccgtcggcgcgcctggaccaggacctggtcgaggacctgcgccgccagttgcagcaactgccggtggcgcagcgggtctacgaccgggtcaagcggcagaggctgcccaaggacgtgcccgacttccgcatcagcgacgccgccggccgcgacgcaccgctggtgttcgcgcgcaagagcggcaagccgctcaccgacccgctcagcggcttcttcacctaccgcggctatcgcgaggtgttcctcaccgccagcctcagccaggccggcaccatcgccgaggaacagtgggtgctcgggcgcgacctgaacgatgccggcgatgccgccaacctggccctcgacgtgcgtcgcctgtacttccaggactacctgcggcaatgggacgacctgctcgccgacctcaccgtggtgccgatcaccaacgtcacccaggccgccgacgtgctgcgcattctctccgggccgacctcgccgttccgcaagctgctcgaggcggtggcccgcgagaccgacctgcagaagggcgaccggctggtcgccgcgcaagtgaagaaggccgccgacggcaccgtggacaagctcaagcagcgcctcggctcgctggtcggccaggaggaggaggaggaaggcgcccgcgaacagccgcagcaggccgacagcgacccgatcagcgcccacttcgccgaactcaacagcctggtcagcaagggcgagggcggcaacgagccggcgccgatcgacagcctgctggaggacatgaacgcgctctacgtacaggtcagcgccatggccggagccagcggcgactcgctgctcggcgacgccaagaaccaggtggccgccgccgcctcgcgcgtggccctcagcgccgagcgccagccgccggtggtccagggcctggtgaagaacgtggtcaactccaccaccagcagcatgatgggcagcgtgcgcaaccagctcaacgcggcctggatcagcgacgtggtcagcgtctaccggcagtccctggccgggcgctacccgatcgccgccggcagctcgcgcgacgccaccctggaagacttcggccacttcttcggtgccggtggggtgatggacagctacttccgccagtacctgcaaccctacgtcgacacctccgccagcacctggcgctggcagcccggcgcggcgcagaagctcggcatcaaccccggcgtgctgcacaccttccagcgcgcggcggcgatccgcgacgccttcttccgctccggcggcatgcagccggcggtgcgcttcgaactcaagccggtgaccatggacgcggcgatcagccagttcatcctcgacctcgacggccagcagctgacctacgaccacggccccgcccgcccggtggcgatgcagtggccgagcgccaacggcctcggcgtggtccgcctgacggtgacgccgccgcccagcagcggccgttccggcctgaccctggagggcccctgggcctggttccgcctgctcgaccagtcggacctggaacgcggcaactcgccggaccgcttcaccctgcggctgcgcatcgacggctccagcatcgcctgcgagctgcgcgccagcagcgccttcaaccccttcaagagccgggtcgtgtccggcttcagcctcccggagcgcctttga

SEQ ID NO: 351547 - DNA, 861 bp, Pseudomonas aeruginosa
atgaatcgcctcggtattttcgtcgacgctggctatcttttcgcgcaaggttccaccgcaatagctggaaatcctgagcgacgcaccaacctttccctgaacgaagaagcagttgtcacccaacttctcgagactgccgcggatctctccggtggaacccccctgctgaggatctattggtacgatgccatcggtgatagggggccaacgcttgaacagaagaggctggccagtagcaacaatgtaaaagtccgtatggggacgctgaatggcagcggtcagcagaaaggcgtcgattctatgatcgtcatcgatatgattgagcttgcccgcaaccatgctatagcggatgcagtcctcttatctggtgatgaagatgttcgtgtaggcgttcagtttgctcagagctacggagtcagagtacaccttattggtatcgccaacgagcatgacaacagtcatcaatccctgagcctcatccaagaagcggatactcataccgagtggacagctaaaatcgtgaactctttcttgagtattcggcatgctgcacctcggccgaatcgagctctcccgccagcggtcgtagaggacccgcaagcgcctgcagtaaatgaaggcggaatgacagatgacgaagtaatccaacttatcgaaccggtcattagcggattagttgacgcattggttcccaacgatctccagggcctcaaggaattgcttcacacaagcaactcacttcctcgagagttcgacggaaagctgctgggtacgtgtagggatcagatcggaatggatcttcctcctgtagccaagcggcatgcgcgaaaacgatatatcgagttagtcaaagccaagtaa

SEQ ID NO: 351548 - DNA, 1770 bp, Pseudomonas aeruginosa
atgatcaagcgtaccctctaccacttccatttctgctgcggcctgggcggcggtgccgccggtttcaaccgggcgcgtccgcgggtcggcagcgttgaggccgaatgggtctgcctcggcgggatcgacgtggacccagccggcctgcgcgacttcgagcgactggctggtgtcccgggcaccctgctggacctcttcacccgcgaccagtacgtgcggttccacggcaaggagccgccggcaggctggcgggaggcgaccccggaagatattcggcgcgccgccggcgggcgccgaccggatgccgtgttcattagctcgccctgcaagggtgccagcggcctgctgtcggagaagatgagcctgaccccgaagtaccaggcgctgaacgagttgacgctgcgctgcatctggctgatgggcgaggcatgggctgatgacccagtgccgctgatcgttttcgagaatgtcccacgcctcgccagccgcggccggcacctgctggaccagatcaacagcctgctcggcggcttcggctacgccgtggcggaaactactcacgactgcggcgagctgggcggcctggctcagtcccggaaaaggttcctgctggtcgcgcggcacgtcgagaaagtgccgcccttcctgtacgaaccggagaagaagagcctgcgcgccgtcggcgacatcctcggccgcatgccgttgccaggcgacatcgatgccgcgggcccgatgcaccgcgtgccgtccctgcagtggaagacctgggtgcgcctcgccctggtgcgagccggcagcgactggcgcagcctgaacgacctggccgtcgaggacggctacttgcgcgatctgatcatcgtgccggagtaccaggccggctacatgggcgtccacggctggaacgacagcatgggcaccatcgccggtcgtagcgggcccacgaacggggcgttctcggtagcggacccgcgcgcgccggcaaacgctctgcaataccagcagtacggtgtccgccgctggaccgacacctcgggcgccatcatcggcgtcaagtcgcccggccagggcacgtactccgtcgccgatccccgcggccagagtttcggcaagtacccggtcaccgactgggacggcccggccggcaccgtgatcgccgccagcaccaccggtcagggcgcattcgccgtggcagacccgcgccacagcggccctgccaaacactcgaatgagttccgcatcgtgccttggagccgccatgcacaagcggttaccagtgcccacggcacagggcaatgcgtcgaagacccgcgggtgctcaaccggacgaagggagactcctacctcaccggcggccactacggcgtggtgggcttcgaccagtccgccggcgcagtgtcggccagcgccaggcacgacaatggccggtggagcgttgccgatccgcgcatgccggccgcgaatgaccgtctgacctgcatcatccgcagcctggacggcacctggcacaggcccttcaccaccctggagttggccgcgctgcagagcctggtggacccggaggaacagttgatcctcgacggcctgagcgacagcgactggcgcgagcgcatcggcaacgccgtaccaccggccgcggccgaggccatcgccggcgtgatgggcacgaccctgctgctggccgaagccggcgaaaccttcatgctcagtagcacgccgatctgggtgcgcccggttgcggtggcgctgagcgtcgcgcaacagcaatag

SEQ ID NO: 351549 - DNA, 693 bp, Pseudomonas aeruginosa
atgcgaattgctgcgctcacaaggaacgccccatcttgttcagcgggccgatggttcgagccatcctggaaggccggaagacggtcacgcgccgagtcgtgccgcaaacccatgggtctgggtcgtcgagttcaagcgggtgacgccatgagcgccatcatcagcgaatgcggccagtaccgttaccttctgactcggcctggcgactgcctggccgacaagggcacagcggtcttcctaatgctcaatccgagcaccgccgatgccgcgctcgacgatccaacgatccggcgctgccgcaacttcgcctcggcctggggctgcaacgggatcgccgtcgtcaatctgtacgccttacgcgcgacgaaccctgccgacctctggaagcacgacgacccagtaggcccagacaacgactggcgcctgcgcgcgatcgcccgagagtacaccgacatcgtgtgcgcccgcgtcgccgcctgctacgccctggccggctccagcgctccgaatgatggaaccgcagccctgttggtgtcgcttgcctggccgtggggccaacagtggtggaacccaaccaccacgcgacgcgacctggtaaaggcctgcgccctggcgctggccgagatcgagcgcctggaccgggcaagcatatcgcaaagtccccagccgggagccaccacggcctcttcctga

SEQ ID NO: 351550 - DNA, 1260 bp, Pseudomonas aeruginosa
ttgaacgtttctagtttttttgattcaaaacaagaggtcataaccggcttcgtaaaaaagcttatagaaaagaatagacgtacatttttcatcgcaattattgcctccgtagaaattgatcacttggacttattcctccgaaaaaataaagtccttaatgaaacttttagatttgtgcagcggagactaataatagaatttggaagaaataacatccttagaatagccgatggatacttccttgttggagtagagcctgacacagagagttttgatgtttctattttagaccatctattttccaagatagattggactcagcattatgggggcacccaaatcaccccaaccataacaactcaatccatatcaaaaatcataaaccttaacattaacaatgaaaacaggcactccaaccactatcacaagtgggaaaaaagctggaggggaagaattgctttcgatttttccgagttagtgcgtgaaaaaaatatttccttagtctatcagcctcaatttgatttagagaaaggtaaaatagttggagctgaggcactactaagaataaaatttaaccgactcggagaagtaaatacgcaaaaatttatagcatttgcagagaaaggagatttgcttgacctaattttttattggtctatagaaacctcatgcaaggatctttcggagattagaaaaagaggtatacctttacctagggtctcgcttaactcaactcctttacaactgaccaacaacttattggctatttttataaaatcatcaatcgagagatacaaattaaaaggacaggatattattgtagagatacttgaagggcgtgactcttcccctataatttcttgtattgaaaacctgaataggatcagaaagctaggagttactttttctctagatgacttctctataagctcaccgcattcattgcaactatttagcctacctatttctcaaataaaaattgacaaatctgtggttgattttttgaagggttttgatgatatagagtttgatttttctgatttttttgaaagccttcagacttctcgtggtatgaccttcattgctgaaggtgtggagacaaaaaaacaagctgagcttctactgaagctaggagttagattcgctcagggcttttacttttctgcacctttgactgttgatgggttcgtttctttctatgagaaatctttagttcgaaagtttaaaaaaacaatactaactcaacaaccatttgtataa

SEQ ID NO: 351551 - DNA, 3057 bp, Pseudomonas aeruginosa
atgaacaaatgctatgcactggtctggaacgtatcccagggctgctggaacgtcgtcagcgaaggcagtcgcaggcgcggcaagcccgccggcgccaaggcggcgatcgcctccgccctggccctgctgggcgccacggccctggctccggcctatgcgctgccaagcgggggaacggtggtcggcgggagcgcgaacggggagatacacctgtcgggcggcaacagcctgtcggtcaaccagaaggtcgacaagctgatcgccaactgggactccttcagcgttgccgccggcgagcgggtgatcttcaaccagccgagcagtagctcgatcgccctgaatcgggtgatcggcaccaaggccagcgatatccagggccggatcgatgccaacggtcaggtcttcctggtcaaccccaacggcgtgctcttcggtcgcggcgcccaggtcaacgtcggcggcctggtggcttccacgctggacatcacggatgccgagttcaacggcaactcctccagataccgtttcacgggtccctctaccaacggtgtcctcaaccagggaggcgccatcaccgcggcggaaggcggcagcatcgccctgctcggcgcgcaggtcgacaaccgcgggacggtcctggcgcagatgggcggtgtcgggctcggcgcgggcagcgacctgacgctgaatttcgacggcaacaagctgctcgacatccgcgtcgacgccggggtcgccaatgcgctggcaagcaacggcggtctgctcaaggccgacggggggcgagtcctgatggcggccaggaccgccaatgcgctgctcaacacggtggtgaactcccagggtgccatcgaggcccgttcgctgcgcggcaggaacgggcggatcgtgctcgatggcggcccggacggcaaggtcatggtgggaggcgccttgtccgccaatgcgctgaacggaccagggcacggcggcacggtcgaggtccgggggcaggcggtggaggtggccctgggcacccaggtgaacacgctcgccagcaatggcctcaacggcacctggaagattgccgccgacaagatcgacgtgcgcccgtcggcggtgtcggatggcgtcaccgttcatgccgacaccctgtcgcggaacctggcgagcaccaatatcgaactggtttcgaccaagggcgacctggacctcgacggctcggtgagctgggcatcgggcaaccggctggggctgggctccgcggccgacctgacgctgaatggcaggctgaattccagcggcgccaaggctgggctggagctgaaggccgaaggcgctatcgatatcaatgacaagatcgttctcggcggggctggcagcgcgctggccatggatgccggcgaaggccaccgggtgaacggcacggcgtcggtctccctggccggggccaacgcgacctacgtctccggcggctattactacacggtggtgcagaacctggcgcagttgcaggcgatcaacaagaacctggacggcctgtacgtgctcggcggcaatatcctgggcggcagctattactgcacggcactgcagtccatcggcgggcccgccggcgtcttcagcggcaccctggacggtctcggcaacagcatcggcaatctctcgatcagcaacaccgggccgaatgtcgggctgttcgcccgctcctcgggcaccctgagcaacctgaaactgaacaacctgcgggtatccgataacacctacggctccggtccgtcttcgctcggcgccctggtcgggatcaacagcgggcgtatcgccaacgtcagcgccagcggggtctcggtcgtcggcacccgactgcgctccaacgcactgggcggcctggtcgggcgcaatatcaacgggcagatcacgaacgcatccgtcagcggcggcgtcaccgcttatgcggcgagcacggcggtcggcggtctggtgggggagaacttcaccaccgcctgggggccggaggcggtcatcgagaacgcccacagcaacgtccatgtggctgcacagtccaccgagcgcaacagcctgggcggcgtcggcggcctggtcggactgaatgcgaaggccacgatcagggcgtccggcagccaggggaaggtcgagacctaccggcccggcctgaacgtcggcggcctggtcggctacaacatgttcggccacgtctccgatagtagcgccagcggccaggtggaggccggcggcgcggggaataccggcgggctggtcggcctgagttccggcggcgagatattccgctcgcaggcgagcgggtcggtgtacagcaagggcggcctggcgaccggcgggctgatcggcaaggcagaaggcaacggcatgctcggaaacctgaaagccagcggcagcgtcacggaccagggcggcgcggatctgggcgggctggtcggcaacaatagccagagcgccatcgagaccgccgaggcgacgggcaaggtcagcggcggcagcaacagtcgcgtcggcgggctgattggacacaacctcggcggttccgtcgcccatgcgatctcgcgcggcgacgtgagcggcggcttcaacagcctggtgggcgggctcgtcggccacaacggcggcgaactgttcaacgtggatgccagcggcagagttagcgccgctgcgagtgcgtcggttggcggcctggtcggcagcaacgccggttcgatcctgtcggcccgcagcagcagtaccgtcagcggcggcgggcgcagccgcatcggcggcctggtcggcgagaaccagatccagggacgcatcgtttcgtccatgtcggaaggcaccgtcagtggcgactactacgtctccatgggcgggctggccggcgtcaacctgggatcgatcgagtactccggcgtcagcggcaagatcgacttcaagcctcagtcccattacggccagatctacggtgcgcaggtcggcgagaaccatggggtcctgggcggcaactacgtgatcggcgaggcggcgctcctgccgcctgccggtatcgactacggcaacatctggtaa

SEQ ID NO: 351552 - DNA, 1047 bp, Pseudomonas aeruginosa
atgggcagccattaccagcgtagcgcaacctatgtgcagaccgacctgccggcctggcgtgcgcagttattgctgggagaaaactccaccagcagcgagttcttcgatgcggtgtccttccgtggagtgcagctatccagcgatgaccggatgctgccggattcgctgcgctactacgctccggtggtccgtgggaccgccagtaccaatgcgcgggtatcggtctaccagcgcggctacctcatctacgaaaccacggtggcacccggggcgttcgctctcgacgaactgcagaccgccagctatggcggggacctggaagtgcgggtgaccgaagccagcggggaagtccgcagtttcatcgtgccgttcgccaccaccgtacaactgctgcgccccgggaccacgcgctacagcctgacggccgggcggctcaacgatcccagcctggagcgtcggccgaacatgctgcagggcgtctaccagcgcggcctgggcaacgacgtcaccgcatacgcgggcggggccttcaccggcagctacatgtccgggttgatgggcgcggcgctgaacacgccggtgggcggattctccggtgacgtgacgctggcgcgtaccgaggttcccggcgacgatcgccttagcggctccagctaccgtctcgcctacagcaagaacctgccgaacaccggcaccaacttttcgctgctcgcctatcgttactccaccggtggctatctcggcctgcgcgacgcggccttcatgcaggaccgggtagagcgaggcgagccgctggagtcgttctcgcgcttgcgcaaccgtctcgacgccaacatcagccagcaactgggcaacggcggcaacctgtacctgaacggctcctcgcagcgctactggagcggcggcgggcggtcaacttctccgtcggctacagcaaccagtggcgcgacgtcagttactccatttccgcgcaacgcctgcgcagccactacgaaggcttttccagcggtgacaagcgcggcgagaccagcacgctgttcagcctga

SEQ ID NO: 351553 - DNA, 1389 bp, Pseudomonas aeruginosa
atgagcaagaagcagattctcctaaacgccttcagcatgaattgcgtcggccatatcaaccacggcctctggacccacccgcgcgaccgctccagcgactaccgcaaactgcgccactggaccgagctggcccggctgctggagcgcggcctgttcgacggcctgttcatcgccgatatcctcggcgtctacgacgtctaccagggcggcatcgaggtgaccgcccgcgaagccgtccagttgccggtgaacgacccgctgatgctggtctcggccatggccggggtcaccgagcacctgggtttcggcgtcaccgccaacctcacctacgaggcgccctacccgttcgcccggcggctctcgaccctcgaccacctgagcgacgggcggatcggctggaacatcgtcaccggctacctggaaagcgcggccaaggccatgggccagtccgcgcagatcgagcacgaccgccgctacgaccgcgccgacgagtacctggaggtcctctacaagctctgggagggcagctgggaagacgacgcggtgctcgccgaccgccagcgacgggtctacgcgcggccggagaagatccacaaggtccgtcaccatggcgagttctaccaggtcgagggctaccacctcgccgagccctctccacagcgcaccccggtgctgttccaggccggctcctcggagcgtggcctggccttcgccgcgcgccacgccgaatgcgtgttcgtctccggacaaacccgcgaggccacccgccaactggtgcagcgcatccgcgcggcggtggtcggcgccggccgtcgcgccgaggacatcaggatcttcatgggcatcaacgtgatcgtcgccgccaccgcggccgaggcccgcgacaagcatgccgagtaccgccgctacgccagccccgaggccggcctggcgcacttcgccagctccagcggcatcgacctgtcgcgctacggactcgacgagccgatccgctacgagaagaacaacgccatcgagtcggtggtgaagaacctcaccgtggcgcgcaccgactccaccgtgcgcaagctcctcgaccagttggccctgggcggccgctacgtgaccctggtaggcgacccgcgccaggtcgccgacgacctcgaaggctggatcgccgataccggcctggacggcttcaacctgacccgcaccgtggagccggagagctacgccgacttcatcgacctggtggtgcccgagttgcaggcacgcggcagctacaagaccgcctacgctcccggcaccctgcgggagaagctcttcggcggcggccgcgcgcgcctgcaggcggaacacgccggcgccgccttccgccagcccccggccgcgcgccagcgccaggcctga

SEQ ID NO: 351554 - DNA, 435 bp, Pseudomonas aeruginosa
atgctagtagaacacgaggcgatatcgcggctattcgagttggggaccctcgacatgatggaagtggcggccattagcgggcacaagtctctctcgatgttgaagaggtatacgcatctcaaggcgcaaaggctggtcaagaaattggagggaggccgcaaccgcggacgccaggtcgtgatcaatcatctaatcccctacccggccacggtcgtccactcttcaaacgtggtgactattcgcttattggattttgatgggctctcggcatcagcgccgacgcgtgaatcggccctggtgcttgcccaggaccagttgctgaggcgcctcatgacatcgctcagggacgcagaaaccattccgcaaccggaccagtacctggagatggtcagcgaaaaggacttggtgatgattgatccgcttgcagcagcctaa

SEQ ID NO: 351555 - DNA, 489 bp, Pseudomonas aeruginosa
atgcagacagcaacagcaggtgagctgattagagtcctcacgaagaaacgtaatgaacgcaatgagttggctgagaaagcgaaggctaaggaggctgactaccttcgtaaggcaaacggtctggtcaaccgtgccgccgaaatgcttaaacctctcgaacccttcgatatcagcgcgaaagttgaggaattttcaacgcaaactgatttcgggaatggcctagttagtgtgagcctgatcatgctaagggtacttgatggtgacaatgagctgctcacaatcgagccacatatccctcagacccacccttccaagccattctttttcgcaaagtatggggctaagaggctccccttagtttttcagcctgcaggtcaggagcctggctggtacttttggacgaacgaggatgataaatcgttagaaccgagctatctcaggctcgatgaggacagcctcatgggactcatcaaatccattgttgaatga

SEQ ID NO: 351556 - DNA, 342 bp, Pseudomonas aeruginosa
gtgaaagcaacagtctccaaggggatcgatcctactgccgcccgcaaggctgccaagatcgaagcccaagccgccgtcgccgccaccattgccgaagccgagcgccaggctgcggaaaacaagacggtcgccgacctcttcgaagagtggatgcacgacggcgtatcccgccaggacggcaacgccgaactgcgccgcagcttcaccaaggacgtgctcccattcatcggcaagaagcctctgcgcaccctgaccgagaaagacctgctcaacgtccttcgccaaatcaaagcccgcggtctgaaccgcactgtggtgatccgcagcaaggacatcggctag

SEQ ID NO: 351557 - DNA, 1479 bp, Pseudomonas aeruginosa
atgagtaggaataataagattctaattctttctttgattttcttgatgccactgactagtcaggctgatgaaaatggctattatagccggggtgcgactcttaaacacctaatttggccggtgaaacctgacagtaaagcaacaactgaacagcttgcctcagatatgtatcctcttacggaagttaataataataatagtaggttgaaatttaagccaaaacgctataaaacttggcaaactatcgagatgccccctagcacaggtgctatgtgcatggatggtagtccgtataaaatttttgttaaccgagttcctagttctagcaatttcttgatttattttgagccgggggggatgtgcacggattatgagtcatgtacagggcaaaaaaagggtcttagtgctattaattatgatggaatttctgatgattatttaacaaaattagcgccgtcaacccttgcgagacgttatattactccgttggtcgtgcgtacgcaccctcgtagaattgaagctacaaagaaatggaatataatttatgcgccttattgcagtggagatatgcatgctggtgatgctgtaaaactattcgagtctgaagcgggagaaaaaaaggtcatccaatttagagggttgaaaaatgcacgaagtgttgtctcttggttaaaagagaatttggagaggccgactcagctgcttgtgactggtgctagtgctggtggctacggggcacaattaaattatgctcatttgcgtcatgatttggcgccagagcgtagctatctgctaaacgattctgggcctttttttcagatagctgattcaagcacaccaggttataaagcttaccgtcaactgatagagtatacggggattgataatggctactcaaaatttatttcgactttggtgccagatgtcgatgtgaataatcctatcagtatatatgctgcgtactctgtagctttcccagaggaccgtatgggtatggcttacttttggcacgacaaaacaataccaagatatttttatcaactcgagcctgatatagttaatgcagtttctgatgctgatcgagaaaggattagggagggctggagtaagcaggctacccagaaaatctgggaaaatctaaacagtttacctaacgttggagcctactttccacagtaccgaggtatactagatagtcacactctaacctcactagattttcgacattcggatattcaagaggaaaatttagagttagaggactttatagaaaatttgatgaaacgaaagactgttccagtaatggatgtttctgaagccagcgacgcggaagatttagagcggaaatttttaagttgggatctaagttctgccttattcctcgcgagacttgtgatgatggttggtatcgatatggttagaaaattgatatctgatccgctgggtgcaatgaaggatttggtggatatagtattctag

SEQ ID NO: 351558 - DNA, 672 bp, Pseudomonas aeruginosa
atgggtattggcctctcaactatgaggtcctctgtaatgaatatgcgatatacgatttccatcgcgttgtgctgcgtctctgtatccctaacgctggtctatttgcttttccctacttcagaggtatcaagctctatgccacctcaggcatcaatgtctatgacgaaagagcctgagtctacaatgcaatcaatgaagaatggaacatcctctgaaatatcgccgaagcaaatgcaatatatccttgcatctcctgagtatgtatcttatcaaaatttccagaatttcgaagataacatattcaaagttctttccagcgaccagaaaattccccaggccctagcgcaggagtatgcagatcaagttatgcgttattcgatggagcaacgtcttaccggcgacgaagctctgatgatacaagcagagttaatcagtaaaagtgatatgccggaggataaaaaggtgtcggcattggatcggctgctcaatacactccaagattcagcaaagaaggcaaagccattctccgatgagaggattgtacgttataagcaggcggagcacgatatagtagaacgtatcactaatgatagtcagttgtctccgaagcagcaagaagaaaaaattggtagggagctagagatcgtacgcaagcagatatatgcacagtag

SEQ ID NO: 351559 - DNA, 138 bp, Pseudomonas aeruginosa
atggacatgaacaccgcctttgacctggaagtgcagcggcactgcctgcgggccgaagtggtgtacgacctgttccatgtggtgaacattcaaaggtgtttgaggctcttcgcatttaagggtgtagaaaaaatctga

SEQ ID NO: 351560 - DNA, 513 bp, Pseudomonas aeruginosa
atgcaaatcatcgttcggggcaatgggctgcacaaaagcgagacaaatgctctggatcagatgcagaagcatctgcgggacagttggtatggctacgcttcagtgctagtggccgacaagcaaggctcgatggaatttgaccttattatcgtcacccatgaccggctgctggttgtcgagctcaaggaatggcatggcaagctgactagctacgatggcaactggatcataacgaccaagcgtggcgagcagaaccgaggcaaaagcgcatatcaccgtaagcgcgaccagggctaccgcctggcagccatcctaaagactgaacttgaacacaagctggggtattgcccctatgtcgaggcgcatgtcgtactctgcggcagcgctaccccggagtacctaccggaaaacgaacgtcagttcgtccacaccctggaagactttctgaagatcggcggtaaacactacgaagattacgggctcttcgcatttaagggtgtagctgatttctaa

SEQ ID NO: 351561 - DNA, 447 bp, Pseudomonas aeruginosa
atgcaactcgaccttttctcccacgtcgtcgcggcctatcagaagaatcctgatgtcgagctgacgaaccagcagctctatcgcgcggtatgcgctacagccggcatcgctccagccgagctggaggtcaaggttccgattggggcttccgggcagctgcacaatctcaagcgccgccagatccgctgggcgcagcagacgctcaagcggctccgggtagtcgagcgagtgaagggggagcgaggtgtttggcggctcaccgagacggcgaagcaggacctgcaccgggcgaagtccggggtaaagctgctggcgttctcgacggatctggggctggccatctgggggccctgccaggacgtgttcaagcgtctggagattcccatcaccctgtcgtattgttttgtaagcgaaactgctgatcagggatttagaagccaatgctag

SEQ ID NO: 351562 - DNA, 753 bp, Pseudomonas aeruginosa
atgtcaatggctaaaactgttctcattactggggccagctcaggcatcggttatcatttggctctagaatttgcagctcggggctacaatcttgctctgattgcacgtagagagtttgcactgcaggaactaaaaaaaaatatatcggaaagattcactaaatgccaagtcattacatatacctttgatattacgtgctacaatgagattgctccagtactgaatgatatggaaaaaacattagggaggatcgatatagttattgctggcgctggtataggaggtaatatcggccatgtaggtagtggacatttccaaaccgatatatctgttatcgagaccaatctgatcggagcaatggccacaatagatgccgccgtctctatattccgtcgcaacgaaagagggcagatagttacagtttcatcaattgctgcctatcgtggactgcccggggcggcggcgtacagtgcgtctaaggcagcaatttctgtatatacagacagcgtgcgttccgaactatatggaagccctataaaagtcactactcttttcccaggctatatagatacccctattaatcaagaaattacaagacgtccctttttaatctctgcgcccaaaggggcgagaattatggctgacttaatcgaaaaaggtgtcgaaagcgctactatccccttatatccatggactgttgtgaaatatctccttagagttcttcccaattatcttttaaataagatcatatga

SEQ ID NO: 351563 - DNA, 1410 bp, Pseudomonas aeruginosa
atgaataatttaaaaaaatctctcctttggcctagtgctggggcggttttgaaagctcttcgtaatggtgatatttctgttgaaaccattgtttctaagcatttagatgtgctggttagtacgcagtcctctttgaatgctgctacaaagatttatattcagcgtgccttgcaagaggcaaaagaaatggatgaaaggggggacaggtctcttcctctttttggaatgccgtgtagtgtgaaagaaacatttgggctagcgaacgagcaaattacagctggatcgaatcgcatgagtccgatacagagtgataaggactccgggattgtaaaaagattgcgtgctgccggtgcaattatagttgcgcgaagtaatattcccgaatttgcgatgtcagctgaaacaacaaatctgcgctacggacgtacaaataacccgcttgatacttcacgtacggcaggtggctcgtctggaggtgaaggtgctttagttgccgctggagctacattgtttggggttggatccgatattcttggatcaattcgtattcctgcggctttttgtggaattgtggggtttaagccgcattctggcgctatagataagactgggacttggccagttgttaccggtcatagcaagaattggttggctcttggaccattgacacgaaccgtatctgatgctcgcttggtatataatgttatagctaataatgccgttctctctgatagcccgttacctaaacgcattatcaccccagtaggttttccaatagattatcagcagccttgtataaaggcggcggttgactatgcgcgcaactccttgattcatcttggattagactcagaagaaacagactttggtgatgtttctaaattctttaagaatatccccaaggttatttttcatgacttctacaaacaatggatggagcttctatcttcttcggattttggtaggttctctattttcaaagaaatcattgcaaagttaaatcgtaagccaactattgattctgggttgttttcattgatattgttgggttcagttctaacgcctagatccaatcggaaaattgaaaatataatcttcgatcttgagaaagcgtcttctcgttattgtcagttgctaggtggggatagtatcttggtactcccaaccataggcttggttgcgccaaaacatggtggaatgaataaggtatctattgcccctggagtcaatggtctttttactgctcatactttagcaaactattttgacctttcggccattgctattcctgcgtggaagttttgtgatcctaccactggcatgccgccgagtgtttcactgctatgtgctcctggggccgaagcctcactatttgcagcggcagagattgtagagaaagcgcttaattaa

SEQ ID NO: 351564 - DNA, 1116 bp, Pseudomonas aeruginosa
atgggtttattcataaattttaaagtggaatatatgtgtattggtgcggcaagaagtctctctgtattaatcttttctctatttattagtgcttgctctgaagaggagaaaagcagtttatcatcgactttaagtggacaggccgtcactattgttgcgcatcggggggcttcaggtgagaggccagagcatacgctgggaagttatgagttagctattgagttgggcgctgactttatagagccggatttagtgctaacaaaagatggtgtgcttgtggtgagacatgagaacgaaatatcacaaacgactaatgtcgaagaccatccggagttttttgatcgaaaaacgactaaattaattgatggaaaaaaggttacaggatggtttactgaagactttaccttggctgaattgaagacgttgcgagcgagggaaagaataccgcagttgcgtagtacagactacgatgatagatatcaaatacttacatttgaagaggtccttgaactattaactaaggtcaatgcagggcgtaaacacccaataggggtttatccggaaacgaaacatcccacctatttttctagtatcggtttgtctcatgaggcaccattgttggatctattaagtaaattcggttaccaaggtaaagatgcaccaattttcattcaaagcttcgaagtcgaaaatctcaaagcattacatgcgaaaactgatgttccattaattcagctaatggatgaaagcggtggtccgtttgatgatcctaataccacttatgctgaaatggcaacgctttcaggtttaaagttaatcagaagttacgctgatgggattgctcctaataaatatatggttatacctcgtgatatattttcaaatttaaaagattcgaatggtcttgtagaggatgctcatcgtctaggattaaaggttcatgtctggacttttcgtcgtgagaattacttcttgccattaagagataagagcggatttaattttgctgggcatggcgatatttctagcgaggttaagtcgtatctagatgcagggatcgatggtctttttactgacaatccacgagaggttgtaatgtttatgaggggaaagtga

SEQ ID NO: 351565 - DNA, 1038 bp, Pseudomonas aeruginosa
atgagcagcccagaatcaaagcttgagtatctggttgccagaaatcaaacagatatggcttatcaaataatgcgatacgcgcagcgacatggcatagatgtcgatagaatagtacagggacttggattgtcagcggactatttggttagcgcggaagcaaggatatcttcgaggcaactaaatgcatttatatctagagcaattaaggtttttgaagaacctggcttaggactaatattaggaggagagcaatctctcacctcgatggggttggtaggatttggaatgatgtgttgccgtgatattcaagaggcaatagagttctactctgagtttcaaacgaggtctggggggtatttggatttctacattgattttaatccggaagaaatagttctacgcactgagatgccatattacgatagagagttagttagtttctatgtagagggagcattctcaacaatgcttcgtatcggtcatctattgacttacaaggcactggtgccaaagttgataaccttcgaatatgaacggcctgcgcattggcaaatgtatgaggagctttttcgttgtccgcttttgtttggtgcgcctaatagttccgtcgtatatgatataaaaatagcagagataaaaattccatctgaaaatcggttaacaaaaaatttagtgagagaggcccttaaaaaaatatcggaaaacaagagtgactttctagatattgttaatttcataaggtataggataaacgaatcagtagagtctccgcccaatattgaaagcttggcattggcgctaaatatgagttctagaactttgaggaggcggcttgacgatagtggaataaaatatgctgatttgctaaatgagattaggttaaatagagcattaaagctatttgctaacggtagtgctcgtatggaagaggtttcgacaaagcttggttttagcgattgcaggagttttaggcgtgctttctctcgatggacagggcagtcacctagcgctatgaaaagaaaggttaatgcgagttag

SEQ ID NO: 351566 - DNA, 1230 bp, Pseudomonas aeruginosa
atgattgaaaaaatagtttttccttggggggcggggcgctcttggcttaaaggagtctcccatgacctagatataatggatctgtacgatgacctatctctttcattcaatttgaagttggttagaaatttatttgtaggtctattggctctgggcttgtgggcatatcttggtaagattgatgaagtgaccaaaggtgaaggtaaggtagttcctagttcgcgcgaacaggttattcaatctttggaaggtgggatattagtagacttaaatgtttctgaaggcgatacgataaagcaaggtgagatacttgcccagctagatcctaaaaagaatgaatttaatgtggaggagagtgcttcaaaatataggtcggtattagctagtagtattcgactggcagccgaggttgacggtgctgatttaaattttccagagtcacttagaagttatccggaaattataaccagtgaaacacgactataccgtgagcgtaagaaacagttggaagactctcttgctggaattgaagaaacattggggatagtggggcgcgaacttcaaatcactgaagccctaatgaagacaggcgctgcgagtagggttgaagtcttaagattacagcgacagcgctctgagcttctattaaaaaaaacagatatttattcagcgtatatggttagagcaagagaagagctttccaaagcgttatcagagataaaaactctttcgtcagtaattgaagggagaaaagatagcttgaagcgtctgactatccgctctccagtaaacgggatagtaaaagacattgaggttactactattggtggggtaattccacccaacggaaaattgatgagaatagtgccgctagacaagagtttaattatcgaggctagaatttccccaagagacattgcatttattcatccggggcaaccggcacaagttaaaataacagcttacgattattctatttatggagggcttcacggtacggtctccacaatttctcctgatacaattcaagataaggttaagccagaactgtattactatagggtgttcattcggacagacactcactttctaaaaaataaagcaggaaagagatttcctatctatcctggaatgatatcgactgttgatattaaaactggagaaaagacagtctttgaatacatggtaaaaccgtttaatagactcaatgaagctttgcgtgagcgctaa

SEQ ID NO: 351567 - DNA, 2169 bp, Pseudomonas aeruginosa
atgattaatagtactacagaaaagagtgaagcaagttcttcggcatggttagaaatgctcttatttatcgctcggcattatggtttaagtttttccccagaggatgctcgactaacaagggtatggagtgagaaagaaagcttggctcttgttcgagatatggctcagcagcttggattgaacgtgaaaagttttaaaaatctatcaatcaaagagcttaataattggcggctaccaattttagtcaaattgctggatggcaatttgattatagttgagtcaacaaatcatgagggcgagctcttagtacgttacagcggtgagttggattttctaactagtatgtcaaaagaagagcttattctacagtttcattatggttttatactaaggcccgatactaggaataccgatagtcgagtggatgagtacattaagccgtatcaggagaaatggtttaatcggattatactaaaagatttaaaatcttatcggtacatagtttatgcttcatttgttgcaaacatgatgggacttgccggggttttattctcgatgcaagtttatgatcgtgtgattccggcacaatcaactccaacactatacgttcttttcttcggtgtgcttatagctggttgtattgactttattgtacgaacctctcgttctcatttaatagatgtgctaggaaagcgagcggatatgcggctttccgatatggtgtttgggcattcaattcgtttgcgcagctcatctcggccacgatctaccggaacttttatctcgcagctaagagatattgatcaaatcagagagttaattacatctagcacgattagtgtgctggccgatcttcccttctttcttctatttctattgtttttttggaatttagttggctatatcgtatttgttccattgcttgccgtagcttttatgattggtcccggccttctttgtcagggaaaacttcaacgtttaggaaatgaatccatgcgtgaagccagcctaagaaactctctattggtagagaccatacagagtttagatgatgtaaaagggctgcaagccgagcaatactttcaaaggaagtggaatcactataataatgcgactgctacagccaatcttcagcttaaagaactgacccatcgtttgcaaacctggtcgcaatgcgtacagaccttggtgttcgcgctggttatcttttttggagcgccgatggtgatggatggagatttaaccacgggtgcgctaattgctgcttcaattttggggtcccgaatgatggcgccgatgtcatatttgacccagataataacaaaatggcaacaggcaaaaaccgctctaattgctctcgatcagttaatgcaaaaacctacggattatcctaaaggtacgaacaagatacacaggcctaggattaatggtgatttaaagattgaaaattcaaatttcgggtatgaaagaaatagtgtattaagagtagatagggtagacgttcgagcaggtgagcgtatagctatattaggacgaaatggggcaggtaagtcgacattgctgaaatctcttgtcggcgaagtggagctttttagcggtaggattagttgggatgatgtcccgcttcaacaattagatccacatgatttaagaagggatgtagctttgctaacgcaagatgcacgattatttcacggttcattgcgagagaatctgctgctcggttcgccgctggcgaacgatgatgaaatactctttgcactagcgctgactggtgcagatagatttattgaaaaattaccaacagggctcgactacattatacatgagggcggaatgggattgtctggggggcaaaaacagacgatattactctctcgtacattactgcgaaatccacgtgtgcttctgttagatgaacctaccgcggcccttgacgaagcaagtgagcgccactttctagagaggttggagcagtacatagaaggtagaacgttaattgtttccacccatcgccctgcgtttcttgagttggttgaacgaatcatagttattgataatggacaagtattgatagataaaccgagagaggaagcgcttagaatgttaagttcctccacacggaataagtccgcgggcagagagcagagagaacatcataatgattga

SEQ ID NO: 351568 - DNA, 1449 bp, Pseudomonas aeruginosa
atgaaaaaattacatatagagaaaggtgtaaggtcgatattttttatggcatgttctgttttggtgctaatatcgagaaatgcgttaggggagacggaatatatagtaaaaaattcggattacaatgagagtaccaatagcggtctagcttcggagtacaagaaggctaaaaaaaccgctgttcatctcggtttgagtgaaagaaaatatttaggggaggttgccgatttaactaaaagcggttctgagataataaggattgtacagaaagcaacttcttggaatcccagtataaaaagtgccagtgaaagtattcaagagcaattgcaatttgtagaagtcgctcgctcagggtactatccgaaaattcaaggaggattaaaaacgggttacgacagcagctttcctaagggaggaaactctcaacagttcgaacttactgcatcacaagttctatatgacttcggaaaggtttccggatcggtcgagacctctttagccggagtggatcagcgagaggccgaagctcggctgagtattgataaagttatcctagacactgcaagtgcttatctcgaggttcagcgctatcaacaactagtagatatcgctaagaagcaaattatcaatctaaaaagtgtgtcggaattagcgcgtcgccgtaccgatctaggggctagtaatcattcggactatgtgcaaacagcttctcgaatcgaaggagctaaagttgtagaacttcagtattccgctaatctggagcgttggcgaagtactcttcttaattttctaggagaggcacgattaaagcctgtgacgaatgattttccacaggttttagaaatgtcctgccagactccctctgctgatatccaggaaaaccctgaagttcaagctgcccaggctagagcaaaggccgttcggtctcaagcggccgaagctagagccgctggtttgcctactgtgtccttggatccaatcctgtcgcatcgcctaagcggtgatcctggctttgatcaggatcgaacacgctacggtgttttcatcaatgtaaccatgcccatatatcaaggaggctccattgttgcgggccaggctgccagcgaacgagctgcagcagcggctcaggctaatctagataacactcgattgaacgctatgcagggattacaacagaatattagtcagcagaaagacctgcaactcagtctgctcgctttaagttctcgcgagaagacaatagtcgagactcgagaaatttatcggcaacaatatcaggagcttggaagtcggcctcttctcgatttacttaatgcggagcaagaagtatttcaatcgcatgctgatcatcaaaatactttgtccaatttacgcctattaaagataaattgcttgttccaacagggacttctgcgtagtgccttcgatatagagcgcgattctaattaa

SEQ ID NO: 351569 - DNA, 2721 bp, Pseudomonas aeruginosa
gtggaagggacctttgacgccaatggcaaaggttccgtacagctcccgccctcgttgggtagcggaaaggtgaatgtcagcaccgtcggcggtagtggaatagaatcctcagccgtagatgtagtaactcctgtattcgcaccacaaaaagtagagtttgacgcaaacggtactcatgttagtgctactggtaaaccaggtgatgtcattagagtcagtgactttagcgggaagattcttggtagtgctgtagtcaggcctgacggtactgcaaacattgagatccctcaacagtcatctggaacacagctgaaggtgacggctcaccacgggaatgaaacatctccttctactctagtaacctctccaattattgatcctgagcgtccagatgttcctagtgacttgtctatcagctctgatgcttcaactatcagtgggaaaggacgaccaggagaaacgatcattgtcactagcaaggatggccaaaaaatagctagtgaaaccctaaagacagatggtgatggctcattcgcaattaaaattcctccagtatcagcccaacaggtaaaagttaccgctagcaagaacgggaaagagtctgaccccatctatctggttactcccgtattagatgggaaggcgcctccgcctcctagtgacgtagagattgatcccacaggtcagataatcagcggaaaaggaactcccggcgatatcgcgctgatacagctagcgacgggtaataaaatactaggtcagggcgtagttggagtggatggccacttcaaaataaagatcccagcgcagccaagcggggaggtattgaatgtatcggtccgccatggtgaacaggtttctactccgaccaagcttatttcgccatacgcttccggtactccgaatagccttcattttgatgaaagtggaacgcaactcagtggcgaggctaaggctggagaccttattcgtgttaaaaacagtgaaggtaaaattataggcgccggagtaacaaagtcggacggaacctttcagatatccattcctgctcaattagctggacagaagttactggttacggcacaaggtaatggcccggaatctagcccggaagtagtgttgacaccagttattgatatcgaacgaccatcctcccccgaggctatcctagattcaacagggacaatattgtcggggaaagccaagtctggttcggctattaaaataaaagatacggcaggaaataatgtaggaacacctattcaggtaaaggctgacggtacgtttgaaggcgtaattccacagcaacctgctggtacgaagcttttggttatttctgagctaaatggtaaacagtcactcccaacggagttaataactcctgttattgacgatgagaatccaccgcctcctagcacagttcagattgatgcgacagggtcggttatttcgggaaaagcgactcctaatgataagattattgtaaatgataaaaatggaaagaaagtcgctgagggtaaaactaatgcgcaaggagagtttgatataaaagtgcctgtgcaacatggaggggatgagctaaatgtttatgtttcgcatggaaataagctctctagtcccaaaaatgtgattgctccatatcaacttccctcagaaacaaccaatattgtggaggccggactagtagttgataagggttccttggaaaaagtagagcaaaagaaattaacctttgttactgtcggaagtagcatcttaaactatgttgttgaaggtggagttacaaagagctacgagtttcgtgttgaaaaaggagaggtggcgaatataagcgtggcactcgaaggtgcatggaatctcggagtgcttaatgtgcaaagcattgtcctttataaggatataaatggggagtggattgaaacactacggacaaatgagtggacggcagcaaatatctctgaggttgcgattggaactagtgctcagctttcaaaagaaattgttgatcctggtgagtacaaattatcagtaagttcttttgatacagtaggtgttggcgttaaaacggccaccgtaaacgtaattaaaaagacacctgatggttttgttactgaagctaagaccgctacgggtgatctaaccaccaatgaaaatgtaaagatcactgaggtaaatgggaaaaaaatagccaaaaatggctctgaaatagaaggtaagtacggcgtactgaaaattagtcaaaccggtgagtatacctatacaccaacaaagattaaggatgggataggggcggctgacgtatttacctataaggtcgagcacaaaaatggtgaaatggtagtcaacactcttgaggtgaggattgttgatgcagaaaaactagttctactagagaatccggccgaaacttcgtcctctattgagattgctggtagtgaggaattctcaaagagtaccacgtcggataaactattgattaataataaatctgcaaatcagggggagagcaaacccgccgccgtcactctggatgagctaacaaaggctcatgaaaaaactggagagatatctatcgaccccaatacgaaattagaccttcctgatagttggaaagttgatggaaatcatacgagctataataatgatgagtacctgcattatataaacaccgcaaatttaaccgagaacgtttgggttcagagtggtgttaccgtaatctaa

SEQ ID NO: 351570 - DNA, 336 bp, Pseudomonas aeruginosa
gtgatccgcatcgataccatctggctcgccaccgaacccatggacatgcgcgcgggtactgaaaccgcgttggcccgcgtggtggcggtgttcggtgccgcgaagccccactgcgcctatctcttcgccaatcgtcgcgccaaccgcatgaaagtcctggtgcatgacggcgtgggtatctggctggccgcacgacgattgaaccagggcaagtttcactggccaggcatccgccacggttcggaagtcgaactcgacggcgagcaacttcaggcgttggttctgggtttgccctggcagcgcgttggtgcagccggcgcaatcacagtgctgtag

SEQ ID NO: 351571 - DNA, 891 bp, Pseudomonas aeruginosa
gtggtagcgacgcgcctgcaggtcgtggaacacgtccagcgcgctccaggtgtacggcaggtcgtagaagttcttcaggtaggccatggacacccgccacagttcgccgcgaccgtcgtactggtcgaccaccgccgcgctccagctgtcctcgtcgaggtacagggtgcgcttggagtagatatgccgcgcgcccggcttcagggtgccttccaccacccacacgcggtgcagttcgtagcgggtgtattgcggatcgagatggcccggcttgagcagttcctcgtacttcacctcggggctgctgaccttgtagttgttgtagggaatgtagatttccttcttgcccagcagcttccagtcatagcggtccggcgcgccgttgaacatgtcggtgtcgtcggcggtgcgcaggccgtcggcggcggcgatcggcgtgtcgtaggcaaggttcggcgcacgccgcacacggcgctggccggcgttgtagccccaggcctggcgcggctccttgacctggtcgagggtctcgtgcaccagcaccgcgccgccggccaggcgcgccgggctcttggtgaacgacaggtagtagaacatcaggttgttcaggtcggcgaagctgccgcccttgaggtagtacttgaacagcgcttcctgctgcgaggtcaccagcgagtagctaccgttgcgctgtaccgcgacttccgaggcgcggcgcacgacataggtaccgcggtagcgggcgacgtggttccacagcgcctccacgccgctcttcggaatcgggaacggcaccccgccataggcgtcggcgaacccgttgccgccgtccagcagcctggcgctggtggcattggcgaaggtgttgtcatacagccactgcggcgctga

SEQ ID NO: 351572 - DNA, 954 bp, Pseudomonas aeruginosa
gtggccttccgctacatcgccgaggaactgaacagcaccgagttcggcttctacttcgtcaactaccactccaaggagccgaccctgtacgccgacatcggcgactatgccggggccgacctggcggcgctggccaacaccctgcggccgatcgccggcaacctcgccgaagccctggccaacggcctggtgaccgccgacgtgatgggcaacatcaatgcccgccgcgagttcgccgaagacatccgcatgtacggcttcagcttcaacaccacggtgggcgacgcctcggtgttcggcgagctggcctaccggccgaacctgccgatcggcatcgccgccaccaacgacctgatcggcgacctcgcccacggtgcggcggaagccgccaacggcgggcagatcaacgtcggcgggcagatggtcggcctcggcgggcagatccacaactacgagcgggtcgaggcgttcaacacctcccttgggaccatctacaacttcggcccgtcactgagcttcgactcgttgaccggcgtcgccgagttggcctcggaacacctgcgcggcagcagcctgaagtacaccgcctatgacggcagcacccgctactacgccgggcgcggcaacagctcgtacgtttccggcggcgaccgtggcgaccaggtgaaccgcaacgcctacggctacaccctgctgctcagcggcacctggaacgacgtgttcgccggggtcaacgtgtcgccctacgtggtctacaaggacgacttcgaaggcaactcctaccagaccggcaatttcatcgaaggtcgcaaggcctacaccctggggatcaaggccacctacctgaacagcctggaaggcgaactgcagtacaccgagttctacggcggcggacagaacaacaacatccgcgaccgcgacaacatcggcctgaccgtcaagtactccttctga

SEQ ID NO: 351573 - DNA, 1182 bp, Pseudomonas aeruginosa
ttgagctatttcaattcaaagggggttgagggcgtacgcatcgccagggtctctactgtgactttttttgttgagacccaattgagagctcaaatttccgcacttgcccatgcgggggccgagatcacgattgttgctagtgaaaaagagctttctaaaaatattgataattgccgttatgcttctattgtaattccaagaaaaatttctccgcttagcgatctcctggctttgtataaactctggcgattttttcgaaaagagcggtttgacatcgttcactctaccactccaaaggcaggtttgttatgtgcgctagcaggaaagcttgccttcgtgcccatccgtttgcatacttttacggggcagccttgggtgggtttaaaaggtttgaaatatcttctttccaagggcagtgacaagcttatagcgcttctcaatactcattgctatgcggatagtatttcgcagcgcaaattcatcatcgatagcggtgttgcagatgatgacgatatctcggttattggtgaaggctcgcttgccggaattgatctgaaacgtttcgcggcttcgcgttatagcttgaatgaaagagtttctctgaaagcttccctgggtatcggaagagcctcgaagactctgctttttgttgggcgtcttactcaagacaagggtgttttggagttattggcggcttttgagagcttagtcggaaatcatgatgtttttcttatgctccttgggccgcatgagatgagcgaagaagagcttttggccggtttttctagtgatctcaaggagcgacttattcttttggggttttctgatgagccggaaaagttcatggctatagcggatatgctgctcctgcctagctacagggagggtttcggtactgtggtgatcgaggccgcggccatgggggtgccgactatcggttcggatatctatggtctgagcgatgccattgtcaatggtgagacaggcctgcttgtgccagtgaaaaactctcaagcgttggctgcggcaatcgatcagctattaggtgatgagcgactctgcaaggaactgggggaaaaggctcggattcgagtggagaaagaattttccagtcaacgtattagcaatcttttgattggagaatatacacggttgctggagaaagacaggggagactcatga

SEQ ID NO: 351574 - DNA, 954 bp, Pseudomonas aeruginosa
gtgaagaagacagtcaaaccagaagcaacccctacaacctgggattcggaagcactttatctcaaggcccaacgttacgtgcagcatatgagtgatcttgaaagtgataattgggagtatgctctttggtctgggttttccctcgaattcttagcgcgagcagcactagccaatgtcagtccggcacttttggcagagaccgacaaggggtggggcagcctctaccacgctctcggtttcaagccaatagaggaaagattcacgccgaaatccatcgcagtcagtgaggtgttcaaacgccttgcggcaattctaccggactttacgaaagaacatgagagcttcggaatcttacacacaggtagacgcaataccgaactacattcaggcgaattaggcttcgatgggatcaaaagttccgtttggctaccacgcttctatcagacaagtgaagttcttctcctctccatcggaatgactctcgaagatttttttggtgaggatgaggcaaaggttgcaaagcaggttattgttgccgcagtcgatgacagcgctaaagccgtaaaaggggatgttgaagcccataaaaaagtctggcttgccaaaaatgacaaggagcgtgccatgttggtcgcgcaagctgaggtcagagcaactcggcaagctggtcaccgtgttgagtgtccagcatgtgcttcacctgcacttgttgtgggcgagcctgtttcggcaccagttcaaattctgcgtgatggagaaataactgagaggcaagaacacctaccaaaccactttgaatgcgtcgcgtgcggtttgaagataacgggcctctcccgcctgacagcggttggtctcggtgaccgctacaagaagacacaagtctacgatgcagcagaatattacgcgccacaagatgacttcatggattacgaagaagacaacaacgagccttaa

SEQ ID NO: 351575 - DNA, 681 bp, Pseudomonas aeruginosa
atgccaataactgaaaaggaacccgatttgtcttcccttaaggaagatatcgcgcgggatgggtatgccttcgtccgtggctattgctctagcgcagacgcactcacggtcgcaaatacgcttggtcaaccgctggagccatggaagggcggaactgtccaagacttggttcctcggtgtacctcgacaccgaacacatacagcggtaactacggactcggttgtttcccatttcatactgatcttgcgcactggcgcacaccaccgagatatctacttctaagatgcgtgaccggccaccctgatgttccaactcttttgctcgacgggcaatacatcttcgatgcggtaactttgaacattcttacacgtgctatttttttgccgcgccgaccgaggagcgggacgctagaattgctgcgcctgtacgagtccaccagcgatggttattgcttcagatgggatgagttgtttctcaaacctgcaagcaaaattggtgatttcgccagtctacgcgtaaaggagcaactcgataagtgtgaccctttgaggatcgcccttacgctagttggtgacactttattaatcgacaactggcgcatgctgcatgcacgcccgctgatcccccctgagtatggtaatcgaaaaattcagagaatctatctggagagccttgagtga

SEQ ID NO: 351576 - DNA, 168 bp, Pseudomonas aeruginosa
atgaagcccaagcagctccatatggccgagatgttttcggtaatgagttggattggatggggcgacgagatgatggagttctttctcgtgaagactagtaaaaaaggggcctttagccccttctctgtcaatcccctttgggggagaacgacgatattgcctgcttag

SEQ ID NO: 351577 - DNA, 732 bp, Pseudomonas aeruginosa
ttgccgctgccgtcggcggtgacctcggcgatcggattgccgttgccgtcggtgagaatcaccgtgctgcccggttccgcagtgccgctgaggctgctgccattgctcaggttgacggtcggcgtggccggcgcgatggcgtccacggtagtgctgccctggccgccggtattgccggccgggtcggtagcggtggcgttgaccacggttccatccgccagcggcgtggacggcgtgaagctccagttgccgctgccgtcggcggtgacctgcccgatcggattgccgctgccatcggtcagggtcacggtggcgcccggttcggcggtgccgctgatctccgcgccgttgctcggattgaccaccggcgcggccggcgccaccgagtccacggtggtgctggccggagcgctggtattgccggtcgggtcgctggccgtggcgttgaccacggtgccgttggccagcggcgtgcccggtgtgaagctccagttgccgctgccgtcggcggtgacctggccaatcgggttgccgttgccgtcggtcagggtcacggtagcgcccggctcggcggtgccgctgagcgtagtgccgttgctcgggttgagcaccggagccgccggggcctgcgagtccacggtgacgctggcgcccgggctgctgttaccggcggcgtcctgggccaccacgttgaccacggtgccgttggcgatcggcgtggacggggtgtag

SEQ ID NO: 351578 - DNA, 240 bp, Pseudomonas aeruginosa
atgatcgattggagcaaggtaaagaccgccgaacagcaggcgcaagaacgctggcaggctgaatacgatgctgcagccatggctcgggcaaatgcctaccggctggagagtgacccgctcaagaccgaggccgatttcgacgcgatcaaggccggcgtggaaccggactacagtgcttgggtagccaaggtcgaggagatcaaggccaggtatccgctgccggaggcgggcggcgtgtag

SEQ ID NO: 351579 - DNA, 1506 bp, Pseudomonas aeruginosa
gtggccaagcacggcttggaagtggatcgacaccttgaagacgctggaacgtctgcttttcacggtaaacacgctggttccgatggtgtgcttggtcagtttctcaaagaggtaaggaaaggagaaattgaaaaaggttcttatctacttatagagaactttgaccgattatcacgggataaaatcgttcgtagtaataagatttttactgaccttttattttcaggcatcaagattgtcattcttgataagaataaaatttatgatgccgataatcttgattttggtgattggattactgctcttgttgaatttgaaagggctaacgcagaaagtcagcgtaaaagcgatttttcaagcaaggcttggaaactcaatagagataagatgcacaatggtgaaatcgtcactaaaaaagttcctacttggctaaaagtagaaaacaacacattcatcattgatgaagtgaaaattgacagaataagaacacttttcaggctttcactttccaaaggcttacaggaagcaactaaagaatataattcactttatggtgaaaaacttgctattcatcaggctcaatatctattgagcaatagaaaattgattggtgagcatcagccccaaaaaattcattacaacaaaaatggtcggctcattagaaaagatgaaggaaatccgattccaaattattacccacaggtaatagatgaagatttgtttttaaaggttcagtcagtcatcacatcaagaaaaccattttcaggtagatattcagcccaaagatataatgttttccgtgatttaattttttgccgtttttgtggcggaactattcgctatatgaacaaaggcgaaagagattattttatttgtacaaactcgatgacaggcaaatgcgggttaaaaggacagcaatcaattcgcggtaaaaaagtatttggccgtttctttaaattcactaacggcatcaatattggaactctattagaagaaaataccaatgccgatgaaatcaaaaatgaattgatgaaattggagaaccaaaaaaacaaaatttctaatcgtcttgatgattttaaatctcaaatcaaaaagatggttatggaaggtgaaaccattccagaaacatacaatgagattattgttgatttagaaaatagcatcataaaatatgatgctgaaattgaaatcaaaaacaaagaactcgacaagattatttcttcatttaggtcattctatgatttacaaggaattgatattgaaaaaatcatctatgacaaatcacaagaagcaattgaaaaacgagttcaatataacaatgaactaaaaaacatcatcaagaaaatccagattgattacttgaatgatattttacatgtagagttttccaatggtgttaatcgccacattctcaatgatgaattggcaaatgaatacaataaagatgaaattgaaaattcttgggctagcgtagttaaatctattgctcaaaaaactaattaa

SEQ ID NO: 351580 - DNA, 1878 bp, Pseudomonas aeruginosa
atgataagaaaaaaagccagcagccaaaaaacaaaaagaggaattaagagaacagccaattacattcttaaagataaaggctgctgcctttatgaagccagttttattcatagaccaaacatcatcaaagacgatttagtaaatagattatcaagtgaaattgatgatgatgttaatttttacaacaacaatagaaaacaaggttctacccagcaagtaagaacatatcacgatatagtaagttttcacactaatgatgatatgaacccacaaaaggcattacagattgcaaaagaactttatgaaaaaactcataatctcagcaatcgcaaatacttgatggctgttcataatgacacagatgaaatgcacgtccatatcatttggtcagttagagataacaacggaaagacttacaagcaaaaagatgattatcgcatcattgaaattgaatgcgataagttagaagataaacacaaattgattaagccaaaaaatagaaaagcaacatctaaaaataaaaatgacattgaaaaacttccatctactaatgaaagaatgcttaatgttagaggtatagtttctaataagcagaaaatgaaagacgctttaaagccttatcttgataatgcttccagtccttccgactttatcaaccaaataaccgaaaatggctttaatgtcattcataatgggaaatcatctttctccattcaactcgatgaccaaatattcaaagcatcagaactaaacctttcttacaagaccttaaaagcaaaacttggagaagatgaagagtttgaaaatactctatccaaaaaacatcaggtaaaaaaacaagccgaagattgctttttattatccagtgatacaaagcctgattttatgaatagggtaaaccctaaatcagtgttaagcacgaaattcaaatatgaacaacacaatgacaaggttgagtatttctataatacatacaacagcaaaaaatcttttgaatactataaagacccttcaaaagtcttatttaatgacacatcaagacaatcagcaaaagcaggtttgcaaagattgcttgctgattcaaacccaccaagcacctttacagtgagtggcgggaaccattttaagaaaaatatatggcttgaatttcagttaatgggattggaagccaaaggctttaccttggaagtttatcaacctaaaccagccgatttagaagaattgaagaaaatccaagagcaatacgcttcaatgaataaaaaggttgagcctaaacaaccagaaatggccatagaagcccctaaaccagttttccctatacctacccaggaaaaacctaaaccacttcaaaaagcaccagagaagccaccagttgaagaggttgaccccgttcgcaagcaatttaatgacttgttgagcagtataacccctgcaatgctttgcgttgctcataaagcccttacatgtaaatcttgttttggttctaattttgagaatgcaccagagcaaaagattgaagatttccgccgtgttaatcgtgaattaccacaatttaaagaagaattttcgaaagaaattgaagagagaaaagcctttcttgaaaatcaattcagttttcagcgtagatataacaactaccaacaagaaaagagaattgaagaagaaagaaataaaccagttcaaccagttgaaaaacctattcaacctgaaccagttaaaaaacaaatttcaacagaatttggaaattccaattcttatgaagaaatgattagaagaatggaagaacaagagaaattgaagagagaagcacaagcaagaaatgaacaagagaaagaaaaaaagcagaaatcaaggaaaacaaacagatatacaccttaa

SEQ ID NO: 351581 - DNA, 876 bp, Pseudomonas aeruginosa
atggatttaatatttaatcaatttcaaacttcaaaaagtatttatgcacaagacaagtatatgacttttgcaaaatcaatccttcatcttccaatttttcaatctgtaaagaattcaaagaaagaaagggtaactataaaaatagacaaattctattcttatgaagatgttgaaatggactttatacctttgtctgtgaatttcgattttgatgttttctattacattcttcaaaagaaattgaagtcagacaaactcacattcacaataaatatgaagcactttatgaaatttcataaagtccacccaagcaataaaaaggtgtatatagagaagttaagaaagtcattaaagaatatgatgaaattttatcttgaatttagatatgactctattacttacaagtgtcatttgctgaataatatcgttgaagatgctaacgataaagaaaatacagtcattacattcaataaagaatttgagaatttttacaaacacgacactgacctaatctttaattttaagttcgataagttcaaagaaattgaaggggattatgcaagggttctatatatgttctatctaactaatcactacgctgatagcgttagatttaagatttccgacatattagatagattgcaaagcaatttttcaacaaagacaaaaacatatgagtatataaagaaagctcacgaagaactaattaaaatagagttcttgaaatctgttgagcctatcaaggaaggtagagaattaactggttatttggttgagtttgaaaaagtaagaaaagggtttttgccagcagtagcagaaaaacctaaaagcaatactgatgaattatctatctgtgatgaagaattaccattttaa

SEQ ID NO: 351582 - DNA, 624 bp, Pseudomonas aeruginosa
atgagtgaagataataaaaagtttgataagtatgttggtgaaatcaacgaccttttagtttcttatatcaataaagaaactgcttatgatgtttgtagtgtgtatttgattgatgattatgacacttatttgtcaatcatcgagaaagtaaaagagattgaaagcaaatattcatttgctaggaaagtatcttttattgaagtgcctagtaaaaccttcgcaaagataaacgcaacgaatttcccatcatttaaacttattaagtcaaagaagtgctctgctcttcttcttaataggtatgtgagtgaaaaccctaatcttgcagaaattttcacaatggaaaatgtgagtggagggaaaatcaaattatatgagaaagttttccaagattgtctttatctctcatataaagattatgcaactaaagaaacagtaataatcaaaagaaatattggaattggaactgtaattttctccaataatcattttgctactgaaagaaaagcaacaatgatgagaattgatagaaaagaaaatcagccaaatgtcatcaaatacagggattggtatttgttagaaatggacgatgacattcaacaattggtcaatatggttgattgctga

SEQ ID NO: 351583 - DNA, 147 bp, Pseudomonas aeruginosa; identical to SEQ ID NO: 337198

SEQ ID NO: 351584 - DNA, 1287 bp, Pseudomonas aeruginosa
atgctcgacaagttgcacctcttcgttcctttccgtctcgagcacatcgaactgctcggggtggaagggcgtgcggacccggtgcatgtcgttgatctggagagcctgggcgtgccgctccaggggcagatcagccgaggggagggcggagagctacaggccgactatctgcggcatgtttgggagtcgctgagcacgggcttcacgccgcttgcgttcaaggtttttcaccagtcgctgggcaagcgtctgatgcccggcgtagagctgaaagccagcccggcgaagttgctccaggggcacaacgtgttcggtccaacctgcatccagaagggggccgaggtgatgttcaagtggctacacgccacgtatcccgacctgttcgccaagctcgatgttccggcgactcaggtctacgccctggactgcacgtattccagccggttgccggatgagcgcaccgcgctccaggtcatccaggcgctgaccaacgtcagcaacggccacaccaagagtcgcggcgacaactaccagacgtccgcctactggggagcgaaagagtcccgtctgaagcgcctgaaggcgtatctcaaacacaccgagtttcaggctcagttggacgaattgaagcgggcagggcgggccgatctgtcggctgctcggtctgctcgggtcatgtctgacccacggttgcaggagtgggtgcgctacctgctccgcatggaagccacggtgatgcaccgctggcttgagcgtcggggcattccgtcccggctgaatgacttgatcgcgtaccagcagcagctttcgggggagggtcgctgtttgatccaagagtgctggcaggcggttacaggcgatttgttcgcggcctttgagggtatccagatgagcgtaattgatgatgaaaaagtgctggccgcactgctagagaagttcaccaaagaaggcaagggccggtataccaaacaacgcgaagaggcgggagttgtcgttccctcggtcttcgtccctggtaagccagatgatagctatgcccggaacctgttccggacgtatcgcagcctcaaggactacggctggcaggagaccatggattcgatggctcgccggactttctaccgccatgtctctgacttgtgtgaggcgggtctttccaaggcggccttgcagaaactgcatggggagcgagcgaacaacgttgtgccgctcctgaggttcgtccaagtcgatttcagcgcccagcgccccgactggtacgtcgagccgaccgtggaggctgcgtga

SEQ ID NO: 351585 - DNA, 360 bp, Pseudomonas aeruginosa
atggaaggcattcttagtgcgattaaacagcttattcagacggcgaccgatttctttcagcgtgcgcttaaggcaatcgaggacttctttaagtgggcgcaagatgcgtttgattatttctggaatctcctgacggttttcccgcagtggatttttcaacagattgtttccggcgtcgtgaagttcttcgaatggttgccggtgcctgacttcttcgttacagccggtaatgcgttccagggaattccgccatcggtcgtttatttcgccaatgcattccagattggtccaggcgtgaccatggtcctgggcgcgtatctgctgcgcttcattctccggcgtatcccgattatcggttga

SEQ ID NO: 351586 - DNA, 147 bp, Pseudomonas aeruginosa; identical to SEQ ID NO: 337198

SEQ ID NO: 351587 - DNA, 1287 bp, Pseudomonas aeruginosa; identical to SEQ ID NO: 351584

SEQ ID NO: 351588 - DNA, 228 bp, Pseudomonas aeruginosa; identical to SEQ ID NO: 348575

SEQ ID NO: 351589 - DNA, 351 bp, Pseudomonas aeruginosa
atgctcgctctcatcggcctgtgccagggctattactccgaaacccgcaccatcaacggccagaacggccagcagcaaatcaccgagcactcagtgcttgtccaggtcgagcagccgaacaagttcgggttgatcgagcagaagatcattgctgttcgcctctcgaagaagcacatggaaggcggtttgaacaacgcctggaaccagcagaagggcaaggtggtgtccatgccggtgttcgtccaggcctgggcgagcagggcggggaatgctggctacgactactggctgtcgggcgatggccttccgctcaacctccaggctgtccagccggtcaaagcggcctcctga

SEQ ID NO: 351590 - DNA, 360 bp, Pseudomonas aeruginosa; identical to SEQ ID NO: 351585

SEQ ID NO: 351591 - DNA, 243 bp, Pseudomonas aeruginosa
atgagcattcaaaccaaagcggcgacgatctatttcgcccctactgctcggaaaagtttcatcacgaaacgcgcggctatcaacgccgaggccagggcgatcatcaataagcacttccctattgagcgcggctgctcctgcggctgcggcgatcctggctggcggcttgaagaggccaaccccgagcgcttcgcgcgctactaccggctgcttaccgtagcgctcaagaggaccattccatga

SEQ ID NO: 351592 - DNA, 276 bp, Pseudomonas aeruginosa
atgatcagccaatacgaaaacatcatcggcatgcgcaagaagatagacgcccaggctgatcacatacgccgccttgaaatccgaattcatgagttgcgtacagcccaggctcagcacagcgtgccggaggtgtcagggatcggacgagacttcgcctatccgcgctccgtagttctgtacctgcgcacagagccgaccgacgacgacctgcgagccatccatgatggtctgcgatctctcgccgccgcgcccggcaaggaggtaggtcatgagtga

SEQ ID NO: 351593 - DNA, 348 bp, Pseudomonas aeruginosa
atgaacgaccgcgaactactcgaactggcggcgcgggcggcgggctatcagttctcatacccgtaccactccatctccatcccgttaatcctggcagagactgggcggtggcgacaatgggacccacgacacgacgacggcgacgcgctgaggctggcagttcggctgaatctggacattcggtacgaatgctacgacgcaggcgtggccgtcatcgtgggcggcgcctgggacaacgcgcccgaagcattgcacgagatattcgaacgcgacggcccgagcgccactcgccgcgccatcgtccgcgccgcagccgagatcggcaagtctatgggaggttgggagtga

SEQ ID NO: 351594 - DNA, 672 bp, Pseudomonas aeruginosa
atggtaggatttggagcccagccgggcgggcctcaggacgaggccctagtgggctcggctgggctacttcggttgtttctgcttgttgcggcgagcgatgatcagttgcttggacgccgtggcaactccctttacaacgtcttccgggagaagcgcctcattgcagtgcgggcaaagcggagccatcttcgtactgcgccacgcttcgtcgatcaccttggctgcccggctgcggattgcaaactgctctgcctcatgaagttctcggcggcgcctgttcaagtccttcaagccgccgtcgaatacctgcaccaggtgcatgaaggcatcaaacggctcgacctccgtttcacaatcgctgcaccagatgcggcgctccttgtcgtcgtagaccatcttccggtgacggcaggacgaaacggggcggcgggtaagtccacgcgccaccctcaagtcctcgatctggacgacctttacgccgtagaggtattcatggggttcaatgggtgcatcgctcactcccaacctcccatagacttgccgatctcggctgcggcgcggacgatggcgcggcgagtggcgctcgggccgtcgcgttcgaatatctcgtgcaatgcttcgggcgcgttgtcccaggcgccgcccacgatgacggccacgcctgcgtcgtag

SEQ ID NO: 351595 - DNA, 240 bp, Pseudomonas aeruginosa
atgagcgggacagcacagtgtaaacgctcgctctacgagcagggctggcttgacggtcgcaccggaagattcttccgctggaagcgtcatccccagattgagcaataccgcgaagggtatgagaaggggcgacttgaaagacaggtagctcgtactgagcagaagaggaaagacaggaaagagaactcgtcagggttccttgcatcgctcgccttcgtctgcgcggagatgttccgatga

SEQ ID NO: 351596 - DNA, 225 bp, Pseudomonas aeruginosa
atgatcgactggagcaagttaaagaccgctgaacagcaggcgcaagaacgctggcaggctgagtacgatgccgcaaccgcggcgcgggcgaatgcctaccgcttggaaagtgacccgctcaagaccgaggccgagttcgatgcgatcaaggccggcgtggaaccggactacagcgcctgggtggccaaggtcgaggagatcaaggcgcgcttcccgctgccgtag

SEQ ID NO: 351597 - DNA, 777 bp, Pseudomonas aeruginosa
  misc_feature (719)..(728): n is a, c, g, or t
atggcacttcaaaaactcgtccgtctctatcatacgcttcggtacctgaggctcaagcagataatatttcgagtgtattatcgctttgcccaggtccgagttcatatttatcgaaatgttgctgtgcgtcgttggcgtagggactggtctgcgccctcttggaggaatttgtcaacgaatgatgctgtggagttcacctttctcgggataacagggaaagtgcagtgccccgaggactggcaagctgataggagcagtaaattatggctctataatctgcactatttggatgatctgaacgctagggacattggcagtcagcctgggctagccgataaactaattcaaagttggatccaggctaatccaccggtatccggtgaaggttgggagccttatcctctttccttgcgtatcgttaatcttgtgaaatggcttgctcgccatgatgagcgttcgacctttctggcggacagtctagctgtacaagcggacgcgctggtgcaacaagtagaatatcatatcttgggaaatcatctattcgctaatgggaaggcgttggtgtttgccggcgcttatctgtcaggcgcgatggctgatcgttggcttgccaaggggttacggatacttgacgaagagcttcctgagcaatttctgaatgatggtgggcatttcgaattgtctccgatgtatcacgccactttactctgggatatgtnnnnnnnnnngggatatgtgcgacctggtgaatctctccacgcggtcgggcctacctga

SEQ ID NO: 351598 - DNA, 213 bp, Pseudomonas aeruginosa; identical to SEQ ID NO: 349256

SEQ ID NO: 351599 - DNA, 660 bp, Pseudomonas aeruginosa
atgcccggaggaaagaatgggcgcagatcaccagcagctggccggccgcaagggcggcagcagcaagcccaagcaaccgtcgatcgcgcgcgacagcctgcagtcggtggccaccgccaagcttctgctggcggtgggcgagggcgagttcgccgaggggccgagcgaccaggacatctacctggacaataccccgctgatggacgccagcggcaacgtcaacttccccaacgtgaagtgggaatggcgcagcggcagtgtcgatcaggactacatccccggaatcccctcggtggagaacgagaccacggtgaacgtggagctgcgcagcgacaccccgtgggtgcgttcggtgaccaacacccagttgtccgccgtgcgcctgcgcttcgcctggccggccctgcagaagcaggagagcagtggggacgtgaacggctaccggatcgagtatgccgtagacgtcagcaccgacggcggcgcctaccagcaggtgttgctggatgctgtcgacggcaagaccaccagccgctacgagcggagccagcgcatcgacctgccggcggcgaccactggctggcaggtacgcgtgcgccggatcacgtcgaaccagaacagcagcttgatcgccgacaccatgctgatcgccggtctgactga

SEQ ID NO: 351600 - DNA, 624 bp, Pseudomonas aeruginosa
atgccgctggcgccactgccttgcccacagatccagcacgtagtgaagatagatattcgccagcaatggcgatatcactgcgccttgaggcgtccccttggttgcagcaaccctacggccatcttccataacacccgcctgaagccatttgcagataagcccgagcaggcgccggtctgcaatccggtgtcccagaaacatcagcatccattcatggtcgatctcatcgaagaacgacgtgatatccgcatccaatatccagttcaccttctgacccttgagcgcgaccgtcagcgcatccagcgcatcgtgctggctacgtcccggccgaaacccatacgagaaacccagaaagtcctcttcataaatcgcattcagaacggtaacgactgcctgctgtacgatcttgtcctccagagaggcaatgcccagcggacgctgcctgccgtcggctttgggaatgtagacccgccgcgatggcgttgcccgataggctccaccgtggagccttgcgtgcagatcagttacccgctggagaagaccttcctcgtattcccgccacgacatgccgtccacgcctactgctgcatcccggcgcagagcatagaaactctgcgccaataa

SEQ ID NO: 351601 - DNA, 543 bp, Pseudomonas aeruginosa
atggcccacgcccgacgcaagtttttcgatctgcacgtggcgaacaaaagtcagttggctgaacaagcgctgcactcaatcagcggcttgtacgaggtcgagcgccaagcgcgggacatgagtgatgaagatcgttggcgaatacgtcaggaaatggcggtgccgatcatcaaaacattgcatgactggatgctggcccagcgcgattcggtgcccaacggatcagccacggccaaagccctcgattacagcctgaaacgctgggtagcgctgacgcgctacctggacgatgggggtgtgcccatcgacaacaaccaggtcgagaaccagatacggccctgggcgctcggacgctcgaactggttgtttgccgggtcgctgcgcagtggcaaacgggcggctgccatcatgagtttgatccagtcagcacgcatgaatggacatgatccgtatgcctacctcaaagatgtgctgatgcggctgccgacgcaacgagccagtgagatcgggcagctgctaccgcatcagtggatgccagcctga

SEQ ID NO: 351602 - DNA, 1839 bp, Pseudomonas aeruginosa
atggcactttcaaattttgccgtccggcgcgccaaaaccaccggcaagaattacaccctccccgacgtactgggcctttccctctccgtaacggctgctgggggcaagagctggcacttccgctactactggctcaagcagtcaaagcgcatgtcgctcggaacctatcctgaggtcaccctgcttgaagctcgcgccttgcgtgatgaagcgcgcgccttggtggccaagggcatcaatccgcgcgcgcaccgcaaacagaaacgcgccaccgtccagttcgccagcgaaaacacgttcgaaacggtgtacaagaagtggttcgcccaccgcgcactcagtctcaaaaagggccggcaaaccacgcattcgatcctcccgcgcatttttgacaaggatgtcctgcccttcctaggcaaacgctcgatctacgagatcaaacgctccgacctgctggacgtcattgccaaaatcgaaaagcgcaaggcgctctccgtcgccgagaaagtcaggacgtggttgaaccagttgtttcgctatgcactggtcatcgtaccgggcctggagcaaaacccggcctccgacctcgacgtggtcgccgtgcccttgccgccagtgaaccacaacccctttctgcgcatggaggatctaccaaagctgttgcagcgcgtgcgcaaatacccgggtaggcagcgaacccaacttggactgcgactgctgttgctgagcggtgtgcgtacaggggagctgcgactggcgacgcccgatcagttcgacctcgaccaggggctgtggatcattccacccgagaccgtgaagcaattacagatggacatgcgcaggaagcgacaacggccgcaggacattcctccatacatcgtgccgctctcgattcaggccatcgaaatcgttcgccatatgctgaagcagttcaaaccagcccagcgctacctatttcggcacgataccgacctcaagaaacgcatgagtgagaacaccctcaatggtgctctcaagcgcatgggctacagcgacctgctgacaggacacggtattcgggccacgatgtccaccgccctcaacgagttcggctacccaaaaacctgggtggatgctcagctttcccacgtcgatcccaacaaggtcagctccacctacaaccatgccgagtatgtagagcagcgacggcgaatgatgcaagactgggccgaccggctcgacctcttcgaacagggtcagatcgaaaccgcaagcctgccgctcccccgccttctggaaagcatccccgcgatcttcgaccaacagatcccgacgttccctcccaagccagcgaggtcgccagctctgttggtgacggcaaaacctggggatacaattccgccagtatcagccgctgcgaacaggctgccggctatcacgcctccacgctcgatcatgcaaaaaccgctgtccgacattcagcgcgaaaggatggagcttttcgatgccttcgaggctccacacaacctgcccgtcgtcgagttcgccagcatggcaggcaagtcgcgccgctggatcagctacgagatccaggcaggtaaccttctcgcgctacaggtgggtaatcgtggccagcgcgtgccagattggcatctcaatccactgaaacactcgcttattcaggccatcctcaagctgaatcggagtgcgacctcctggcagatctatcatgcactcctcaaaccacacgcagccctgcgcgaccgctcagcactcgatgctctcacagaggacaatcttgaagagctcatcatgattgtctccatggggctcaagaataacgagcagagcccagtctag

SEQ ID NO: 351603 - DNA, 768 bp, Pseudomonas aeruginosa
atgacagttaacggcaagctaactcgaagcaacctggcgcaaaccatgccagtacatgcagaccctttgagcttcacgaacgcctcattcacaggcttgaatcaagtgacgttcagttatcgtacgcatactgaagcggcagcggcactgctcccagccgagttggaaattgaagataaccccaaggtgtcagtgcttttcctgtcctacggcttcagtagcgttggcgcgttccgagagtacatccatgtcatccacgcacgctttcggggtgaagaggttggatttgtcccgcacatttttatctcgaacgagcggggaatgcttgccgggcgggagcgggaaggctatccgaagctgctgggcgagatcgatttcgacatgagccagcccaatgtgtacggactgatcactgcgcagctttcccgacctgccgatgtcgtattggcacaggggattttccgcccgagtgaattgcttggcgagatcagtagtgatgcgccgcacgtgcttaagtcaatcggattgcgagttattggttctgcgattcccggtggccccttggcagtatgcgagctcgtgccctctgccatggagttttacagcggtcaaatctggtccggtgatgggtcgctaatgttcaccggcgcgtcatcgttctccccgctgcacgaactgccgattgtcggagcggttgaagccattgcatttttcaacgcatcagctcgcttgcgccgacctgccgaaacctatcccctcggtgcttga

SEQ ID NO: 351604 - DNA, 948 bp, Pseudomonas aeruginosa
atgacaagaaaaacagtaacggtcttctcagccacaggcgtagcgggtagtgcttgtgtagaggagcttctggcacaagatattttcaacgttcgtgtattgctacgagaaggcaataccagtgaaaagtcctcatccggactcatattgtccggcgaagaaaagcagaagaagtgggcgaattggcaagcacgcggcgcggagttgcgctctgccgatatcaacagcgtagaagagctggttccggcactggagggaacggactatctggtttcctgcgtgccgctttatgcaacggaatcgcaatatccgctgatttatgccgcaaaagccgctggcgtggagcgtttcgtgccctccgaattcggctttatctatgagtgggaggctcgccagaccacccttacagtgcatagccggatcgcacggcagaaagtgtttatccaacgaatgatcgaaatggcggggctggactacaccatcatccccgctgggctgtggcccgaatactacatgctcgaaccggtgggaatcatgggtgacggcaaccagaaattctcctggtccactggcaaggatgtcggccggatcatcccccatgtgctggcccatccagcatcgcgcaacgccgtttgccccgtagccgcaaccgcctattgcacctggaacgagttgctcgacgttcgtgagcgcatgttgggacgcaaagtcgagcgcaactacatgaatgaggcggagtggaaagcagcctacaacgccgcgcctgacggccccatgaaaaccattctgggtattggtgtcgccgcaacggagcaacctgaaggcatgcctctctgggcgaactggaatggccggtacctgccggagttcaaaggcacgccactggaagagcttttcgttgactacatcgaacccttcaccgcagccatgagcgaggctgcgagctga

SEQ ID NO: 351605 - DNA, 372 bp, Pseudomonas aeruginosa
atgattacccatgctcgctggctgatgggcactgctgccctcttcaacttctccgttgtcctttgctttctgttcctgaacacccagttcagtgcgctacttcaacttgatagtgccaccggcagcaaccttgccatgcgtgacctggcacttgccctgatcgccaccttcggagccgcatacctttatgccgccattgatcccgtacgcggcagaccctacatcgcgctcggagccttggggaagagcttggccgcgctgacgatattcgcccactggttcgccgggagcatcgactggcagctgcctctgttgctggtgggggatgtgctctacagcctgctgttcatccatttcctgcgtcgttactga

SEQ ID NO: 351606 - DNA, 762 bp, Pseudomonas aeruginosa
atgctcgacttcatgcttggcgtgctccatgacccattgcatggcatccatatgggcatgactgcggagaatgtagccaaacagcattgcatcacacgcgaagatcaggacgcactggccctacagagccagcagcgcgccgtacaagccatagctgaggggcgcttcgcgacgcagatcgtccccgtagagatcagcactcgcaagggggtaatgaaattcgaagtggatgaacatgtccgccctgaattgaccctggagcaactcgcgaaaatgaagccagccttcgtcgaaggcggcaccgtcaccgctggcaatgcctcgggcctgaatgatggagccagcgccttgctgctagcgacgggtgacggagtcaagagccagaatctgcaaccgattgccaggcttgttgcctacgcccatgcaggtgtcgacccgctcttaatgggcctgggcccaatcccggcaacccgcctggcgctgaagcgcgcgggcctgagcgtggacgacctcgacatcatcgagtccaacgaagcctttgcatctcaggcctgtgccgtggccagggaactaggtttcaacccgagcaaggtaaaccccaatggctccggaatttccctgggtcatccagtaggtgcgtccggcgccatcatcgtgaccaaggcaatccatgaactccagcgagtcaagggccgctacgcccttgccaccatgtgcataggcggcggacaaggaatcgccgccatcttcgaacgcgtctga

SEQ ID NO: 351607 - DNA, 606 bp, Pseudomonas aeruginosa
atgaataccgcaaaatgcgtggagcccaccaccttcagcggcggcacggtatcgcgtttctcgcgtaatctgccaaaagcgctagagctttttgctgagcgtggattcgctcaagtcagcctgcgtgagcttgccaaccacctcgaaatatcccccggttcgatctacaaccactgttcgagtaaagatgaactgctcttggatttcatagaagagcactacctggcactgctgtctctattcaaccaccgcaagcagcgcaaaaaatcacccaaggacatcctgcaagcgatagtcttgggagtcgactcgctctacgagacacatcccttgcactttcgcctggcaacccgcgatgttgggtgcctcaagccaaagcagcagctatatatcgaacaactccgtcagcagtttgggcaacagctcaacgctctgctgtgcgctgcagggctttccgcccccggtcacgcgaacattccagcagtggagcttctcgaacacctgccaatctggctggccggacactcgctcgacagaccgcagcgctgcgcaatgctcatgcgcctgctgaccgctcccgcccacacccctttcccgccgagataa

SEQ ID NO: 351608 - DNA, 1773 bp, Pseudomonas aeruginosa
atgaatagctacaaagcacctttgcgcgatatcaattttctactcaacgacgtcttcaatgccggcaacctctgggccgaactaccagggttcagtgaggtacttgatgagcacaccgccagcgccatcctggaggaggctgccgttctgacctccgagatcctggcgccactcaaccgcagcggtgacgaggaaggggcgcaatggcatgacggcgtggtgacgaccccttcgggctttcgcgaagcctttgccacctatgccgccggcggctgggtcggtttttctggtaacccggctttcggtggcttaggcatgcccaagatgctcgcagtccacgtcgaggaaatgctccacggggccaactccagctttgctctttactctgtattgagcagcggtgccagcatggccattgacacacacgccactgaagagctgaaagaaaagtatttgccgaacatttacgcaggcgtttgggccgcttccatgtgcctgaccgaaccccatgcaggtaccgatcttggcatcatccataccaaagctgtcccccaagctgacggtagcttcaaggtcaccggcacgaaggtcttcatcactggaggcgaacacgacctgaccgataatattattcatttggtactggccaagcttcctgacgcccctcccggccccaaaggtatctccctgtttctggtaccaaaggtactggtgagtgaggatggttccctgggcacaaagaactcactttcttgtggctccatcgaacacaagatgggtatcaaggcatcggcaacctgcgtgatgaacttcgacggcgctacaggctggctggtgggtgagccaaacaagggtctggcagccatgttcaccatgatgaactacgagcgcctgaccgtcggaatccaaggtgtcggctgtgcccacgcctcatatcagacagcagcggactacgcgaaagaacgcctgcaaagtcgcgccccggatggcccgaaatccttggacaaagccgccgacccgatcatccttcacccagatgtacgtcgcatgctactgaccatgaaagcccttaccgagggcggccgggctctagccacctacgtaggagcccaactggatattgccaagtacggggtcgatgccgaacagcgtgaggtggcgcaaacacgggtagcgctgctcacccccgtgaccaaggccttcctcaccgacaccggtctggaaagctgtgtgcatggccaacaggtattcggaggtcacggctacatccgagaatggggccaggagcaacgggtgcgtgatgtgcgcatcgctcagatatacgaaggcaccaacggtatccaggctttggatctactggggcgcaaggtgctcggggacgggggtaaggcactggacgacttccttgccgaaattcgccaatacgccaacgcgcccagagtggagcatcgcgatgcgctgctcggagcggtcaatgagttggcagtcaccagccgatggatacatgaacaagcggcaaatgacccacgtcaaatcggtgctgcctcggtggaatatctgcatctcttcggttatgtgacttacgcctacctctggtcgaaaatggccagcgcggccaaggccaattacgacgctgcccctgacttttactcagccaaattagccacagccaatttcttctttgagcgcctgctgcctcgcatccaggggctgagcgcatgcctgcgtgcaggtgccgactgcctatacgaactggccaccgagcagttttaa

SEQ ID NO: 351609 - DNA, 2778 bp, Pseudomonas aeruginosa
gtgttgatcacaaagctactccccccgcgctaccaccacgccccgctgctgcggcagcggctgctggatcgcctgaacaacgtggcctatcagctcctgatccatattcgggcacccggtggcttcggcaagaccacactactgacgcagtggcgcaagaccctgatcgagcagggacacaaagtcggctggatcaacctggacgaaatcgacaacgaagaaagccagttcctgagttattgggtagaagccttgaagcaggcaggctgcccagtgcagcaacaactggcggatgcttatgaacgtggccgcccggagaccctcgacaacttcctcacggtactggtcaacgtactcgccgacttcgaggacgagctttacctgatcctcgacgactaccattgcatcaacaatccgcgcatccacgacttgctcggccgtgtcgtgaagtacgcaccggccaattttcacctggtgattagttctcgcaccgaactacccgcctgtctggaagagcagcgtcagaagaatcgtggcaacgaactcaacgtgcgcagcctgcgcttctccgaaagcgaaacccaaaccttcctcaccgagcgcatgaccatctcggtgagcgccgaatcctgccgggcgctttttgaagccaccgaaggctggattgcgggcatccagatgctcgcgctgtcgaacgagctgaaagatccggatcttacggattggagcaaaggcctctacccactggcagaaaccattctggaaaacaccctgagcaacctgccagccgacacccaggatctattgctgcgactttcggttctagagcgcttcaacgtcgagctctgcgaagaggtactaggagtacgaaacgcacagagcgtcctagaaagtttggccgccgacggcctactgctggtaccactggatcacgacgagcagtggtatcgcttccatacgcttttcagcgagcacctgcgccagcgcctggccaagcgcgtggtggcaagcctaggtgacctgcacctgcgcgccaaacactggttagacgtaggcgatccagaaagccgaccaagcctctcgtcctttctgcgtgagtgcaagagcgagctcaacgctgtcgacctaccctccttccactaccgtgccagcctatggtttgaacgcaagggccaactggtcgaggcagtgcaccacgcactggcctccgaaggagaagaacgcgcttacgatctgatcgaccgctgcgtcatgagtgtcctggcaaccggagacctcaataccatcctggcctgggccgacaaggttcccccatcagaactcgccagccgctggcacctgcgagtggcgcgcttctgggccatggtgctgggcggactgcacctccagaatgcccgcaaggagttgcacgaactgcatcaggcgaccgctctcgtagacggattcagcaccttcgaatatcaggtctgccagcgcacgttcgccgcgctcagcggcgacagcctgtcgactctcgaattgctgaaccactggccacctagcggagatacttaccacaacgccgtcgcctgcaacgcactgatctatgcactggctactgcctcgcgcttcgacgacgtgcccagcatattggcataccaccctgagcctcctcccaacgctacacgaggcttcacctacgcttaccggcaatccatcatcggctggatacagtttctcaagggcaatctcgccaaagcgagcagtgggctaagcgaagcactgcaacggttagacgagtgcttcggcagacgctccgcgccctcttgcgtagtatccgggtacttggccgagacactgtatgaaactaacgacctagacgctcttgaatcgctactcggtggccgtcttgaggtcatgaacgcgcgagtttttttcgaaagttatattcgcgcgctcctggctggagcacgcctgcagcacctgcaaggtaatgatgatgccgcacacgaactattagagcgcctacgcctctttggtcagaaaacagacctacaccgccctatcgctgccgccttggccgaacgcacccgcttgctgttactggccggagacgttcaaggggcgagaaacctgcaaggccaactggatagcctggccgccccctatacagcaccgctggcacctgccgcgatgggcagtaccttcgacattccagtcctggccatcctttcgcgcgcacgctgcgcactgagcgagggtgacgcacaggacgccctggacaacctggatcacctcagcagcctgacacctgagctacgcctggactatttcgtcaaagtacgtctactgcaaagcctggcgctgcgtcagttgggtgattcaggctggggcaacacgctgattcaacttctggaaatcactgctcgccaccagctattccgcagcctctgcgatgaaggccccgaaatgcagagtctgttgcaggctctggtgggcaagttgccctccccctccctagaggaacatcttgccaaaatcctgagcggattcaggaacacgcagccagccccccaacggcaacatccggattacagcctgagcggccgggagcaggacatccttgagctactggtgcagggcatgccgaacaaacgcattgcactcgccttgaacatctcggcagaaaccgtgaagtggtatctcaaaaagctcttcaccaagctgaacgtaagcgaccgcttgcacgccgtcgacaaggcccgtcgcgagaagctggtcgacaagagcacgagctaa

SEQ ID NO: 351610 - DNA, 1113 bp, Pseudomonas aeruginosa
atgtctgatattaaggttgtggtctatggtgccagtggctacaccggcaaactgatatctcgccatctggccgggcgcaatattcctttcattgcggcggggcgcagcgcggcgaagatccgcgagcagttcgccacggtgccggaactcaaggatgcgcgctacgaaatcgccgaagtgcccaatgagaaggaagccttgagcgcctttctggagggcaagagtgtcatctataacaccgtcggcccgttcatgcagttggccgagccggttgttcaggctgcgctggaggcgggctgtcattatctggacagcactggtgagcaggactggatgctgttcgcgagggagcgctatgcagccgcctacgctgagcgtgggctgctgctgatacctgcactggcattcatgtgggcggctggcaacctggcggcagaagtctgcttggagactcccggaatcgacaccctggatctggtctatgtaacgcgcggttcggcgccttcggtaagttcgacgttgtctttcctgcgcatgtgctgccagccgcagtaccacctggcgcaaagggagctggtggcctggacaccggcgaccgcctaccaggcggtggtgccgaccttccaccaggtgcttgactgtctgccatggagtggtggcggtgaaccggtgtggttccttgatgatgctcgcgtgcgcaactgcagtctgttggtgaactttggtaatccgcaggtgatgagccatgtgctgaagctggcgaacgagttcaacgagcagcacaagcacaagtcggccgaggatcaggaagccgttaccaatggctgggggcatgaactgacgcccgccgaaccaccacgagaaaacccggatcactgccgcgcggtgatttcctgtcacggtagcggcccaacgagtcaatcaacggtcattctgcagggcaattgcggctatgaacaggcaggctctgtagcgattgccgggattgaacgcattcttgccggtgaggtgaccgcagctggtttcgtcagcccctctatcgctttcggtgcacgctacctgcttgccgctatggaacgtgatggcttggtcgaggtgatagttagccactga

SEQ ID NO: 351611 - DNA, 1626 bp, Pseudomonas aeruginosa
atgcagaacaatgcttcactgatcctggcgaacgtgattcacgacaaggtcagggaaacccctgatcttgatgtgctgaccttcgtccatgtcgatgccgatcagcaattgcgtgactgtactcgcagctaccgccagctttgggaaaatggccagcgaatagcggcgggtctggatgatgagggcatggggcagggcgaggcatttgccctgatcatgtacaaccatcccgagttcgtcgaggccatggttggctcttctatcgccaacactatctttgtccccatcgacgcccgtgcgtgcggcgacaaactgcaatatctgctgtctttctccggttgccgtggggccattgttgccgaccatgcgctggctgcagtcctggaactgatcgatgagctgccgcagttgcagtggctgtgggtgctcgacaccggtggcgtacccgtcgagttgagagctcatccgagagtgcgcgtacgtgctctacgagatgtgttggacgatcgggttcccactcttagcgttcgggctactgatctgcagcaaccgatgcaattgttgtttacctcgggcaccacaggtaatcccaaagcaatcgttgcaccatatgcgcggttcgcagccattgcgatgctaggtgagcaggtggggttacgtgcaggtgaccgaccctacacagggctaagtctgactcacgccaatgcacagtgcatcacccttggcaacgcgctgtacctggggttgcgtgcagtgatcagccggcagttcaccaaatctcgcttgtgggaaattctgcggcgtcatggctgtacatcattcaaccttctgggggggatgaccactgcggtttattcggagccaccaagcccggatgacgctgaccacccggttcgttacgttttcagtgccggtatgcctgccagtatctggaaagacttctcggctcgcttcaacgtggaaatattcgagttctacggtactgcagaaggaggcctgaccctaaatccgccgggcattggccctcaagggtcaatcggtaagccgccatcccatttgcagtgcgcgattcttgatgaggaaggcgagccactacccgcgggagcgcgtggggaaatctgtttccgtgcagcctctggggaggatcatccccctgtgtcctacctgaaaaactctgaagcatccacggcgaagacccgaggcggctggttccattctggcgacatcggtcacatggatgagcaaggctgggtgtatttcgactaccgcgatggcagtggcattcgcctcaatggtgagttcatcgacccggcgcagattgagaaggtcattgccgaagccgacgaagtcggcgacgtgttcgtctacggtcgcggcacaccgggctgcgctcccggtgagaaggaaatagttgccgccgtcgttccagcaccgggtcgtgtactggacgtgcgccagttactggcgcattgcgctcggcacctgccacgcaacctgatccccagccatgtgcagcgggtcgatgaaattcccaagactgcctcggaaaagcccctggagcgcgttctgcgtgagcagctcgaatgcgaactggcagttcccaaccggtcacaacaacaagcgtga

SEQ ID NO: 351612 - DNA, 1284 bp, Pseudomonas aeruginosa
atgagcgggaacgtaaacgaggaactggatcagcaactgattcgtaacgcccggcagaatgcctatgtgattggtgtcggcatgacccgtttcggcaagcacttggggcgcagcctgaacagcctggcgcgcgaggcgatcaagcaggcgctggacgatgccggtatcgaggccggccagctcaacgctgcctggatggggacaggtgccgcgccggtcatcaccggtcaggtatgcatcgccggccaagcggtactgcgtggattgggggtagggcgaatcccggtggtcaacgttgaaaatgcgtgtgcgacggcatccacggccttccagcaagcctgcaccatggtgactcatgggctctacgacgtggtgctcgccgccggttatgaaaagctttaccacgacgacaaggcccgcacgttttcggtgtttgacggttgtgtggatgtggatgagcaggacgctgtgctgggcttcttgcgcgatagcatcagccgctcaggggcgcaggtcgacctggctcaggccggtaaggatcgctcgctgttcatggacatctatgcctcctgggctcgcgattacctggccatggccggtggcgaggcgcgtcacctggcaatggtcacggcgaagaattcccggcatggctcgctcaatccgcgggcccagtttcaggatgtattgacggtcgagcaaatcctcgcggctcgcaaaattgccgatccgttgactctgccgatgtgttcgcccatcggtgatggcgcggcggcagcggtgatcgtttccgagagggcgttgaagcgcctgggggcgcgacaacctatccgggttgcggcatcgatgatcgtcagcggttacgactacgttgatgaacatacacccgaagtggcgcactgggcctctgatctcgcttaccaagcggccggtatcggcccgagcgagctcagccttgtggagctgcatgacgcatctgccgcgtccgaacttatgtgctacgaaagcctcggcctctgtggtcgtggtgagggcgtggcgttgctggagtccggcgcgaccgaactgggtgggcgtatcccggtgagcgtgtcgggcggcctcaaccgcaagggccatcccatcggggccactggcctggggcaggtcttcgagctggtcgagcaattgcgcggcaactgcggtgcgcgtcaggtagagggggctcgtgtcgggctggccgaaaacggcggtggattcatcggtgcggatgccgccgcgatgagcatgaccgtactgactcgctag

SEQ ID NO: 351613 - DNA, 1275 bp, Pseudomonas aeruginosa
atgaacccttccaatttgcctgcgcaggaatggccagcagagcccaaggtgcaattggggccgtggagctttgagcctccgctggatgatgagtctgcggcgtttcgtcagagtctgcgccagttcgcgaccaaggtgatgcggcctattggccaggagctggataagcttagtgccgagcaggtggccgccaaaggctctcgtctatatgagttcttcagcgagtacgacaagctgggtatcagtttggagctgttgttcagtctcagcgatgagcaacgctcggtcatgtttccgattctctttgaggagctcggatggggcgatgcgggtcttgccatcgccgctgcggcgcgcatgttgcctttctacatggcggcgaagatgggcaaccagtttgtgctcaaggaatattccgaacagttgatcggttgttggggcattaccgagccggatcatggcacggactcgctggacgtcagccagcaactgttcaatagccagggcagttacggtcgccccaactgcacggcccgggtcagcgatggtcatcttgtgatcaatggccagaaggctgcctgggtttccaatggcagcattgccgatctttgcgtgctttattgcgccgccgaaacggccaatgggccagacccgaagaatggcttctgcgtggtggtgcccaccaacctgccaggggtttcccgtggcaaaccgctggaaaagatcggccagcgtgcgctgccccagggcgagctgtatttcgacaacgtgaaggtcagcatcgaccacattttggccgggccggaagaattcaagcgctcggtctacgccatccacaccgatgccaatctgctgatgggggcgaccttcagtggggtggcgcgctccgcctatgaccatgcgctggcctatgcccacgagcgcaagcagggcggcctgccgatcattcgtcaccaggatgtggcacgccggctatttcacatgctgcgtaaggttgaggccgcccaggcgttgacccgccgcgtctcgcgcttcaatgcattcgaaccagtaccggcgttgcaggccgccatgatggccaaagtcaccgccaccgagcatgcctttgaagtcgccagtgatgccatccagatgttcggcggcaatggtctgacctgcgaatacccggtggagaagatcttccgtgatgcccgtgcctcgatgattgaggacggctgcaaccagatgctggcaatcaagggcggttatagcctaattaacccggagtggctgtga

SEQ ID NO: 351614 - DNA, 1257 bp, Pseudomonas aeruginosa
atgaatgcaatgttcaaatatgcagccttgacctgtgccttgctggccaccagtgccagcgtcctggcagccgaactgcccgccggaacgctggtgaacaagggcaacctcgatcaggtgctcagtgacaccttcgagggcaaaccgctcagccagttgctcaccgacaaggtgcaatggcaaatccgcaactacaacctgggtctgaccctggcaccgtccaggccggcggcgctcgacccgctttatctcgaagccgctgcggccaacgtcggtaaggtcggcttcgaccgggaaacccgcactgtgcagggctgggagaagggcgtgccctacccggagatcgacgttaacgatccggacgccggcgacaagatcgtgtggaacttcatctatggccggcccatgggcgattcgcaggagctgaagaacttccactacatcctgatcgacgccaagaatggcgtggagcgggtgcagcgctaccgtctcgaccgtttctacacccgtggtcgcctcaacggcccggcaagtctcagcaaggacttcatgctgcaaaacaccctgctgttcgccgaagcgccgcaggacatcaaggggatcggtacctacacgaagcgttacgccgacggcttcaagaccgatgacgtatgggcctatgtgaaatcggtgcgccgtgtgcgccgaatctcgggtaacgcctggatggatccggtgggtggcctcgatgtgcttggtgatgatgtcgacgtgtgggattcgccgcccaactggtacaagagcatcaagctgatcgacaaacgctggatcctcgccatcaccgacacgccgcagaccgtggctatgggcgagcgtgacaacgccgcgctgttccccctgcaggacgtcagcaacccgccgtactggaaccccagccccaagctgggttggcagccgcgcgaggtctgggtactggaaggcactccgccggacgctcatccctacggcaagaaagtggtctacgtcgacgtgcaggccaaccgcccgctgatgtccgaaatctacgacaagagcggcgacttctggcgtttccaccatatgcagcaacaggaaatcgtcggcgaggatggctacaaggcaatcctgccggtgcagggtcagcagatcgacttcaagcgccagcatgcgaccaacttcgtttccacctatgtgatcaaccgcaagggtgccaaggagtctgacttctccctgggcaagctagaagcggccggtaagtga

SEQ ID NO: 351615 - DNA, 1557 bp, Pseudomonas aeruginosa
atgcaatcgaccattcgggccaagcggcccacatggcttatcgcgatgctgccgctgagtatcatgtccgctaacgtccaggcgatggactttggcaatgacgagttcggttttagcctcggtggctacctgcgtggctggtcgtccttcaacctgaaggatgccccggaaacccgtggtgacgacaagggcaaactgtccatggcgcggggttccctgatgctggacgccgatgcagtcactggccccttgagctggaaggccattgcccgtttcgacaaggaatggatgaccggttatcaggatgatctgcaggacatcaaccgatccatggtcaacaccggttttcggggccgtggcagcgacctgatggatcagtacgatcgcgccgaattgcgcgagttctatgtcgattacgaaatcgaccgggtcaagttccgcgtcggcaagcagcaggtggtgtggggcgagaccgacttcttccgcgccatggacgtggtgcacggtttcgactaccgctggcgctcgttcctcgaaccggagaacgaggagctgcgcaaaccgctgatcatgttcaacaccaccatccaggtgccggagctggacggcgccctgcaggtgctggtgcggccgggctgggacgcgcacaacgccatcggcaacagcgtcgatttctacggcgggcgctgggcaccgcagccctatcgcggcaccgatttctactccctgctcgatagcgactacgaacacccggatggtgatcaggacaaggtgaccggcggcctgcgttggtcggggatgatcggcgacgtcaactactcgctggcctggctcaagtcttaccagggcgacccggtggtcaactcgcgcttcaccccctacaagaaggcacccaaaggcgtgctcggcgacttgttccacccggagatcagcgtctggggggccaccgccagcacctatgtggccgcggtggatgcggtgttctccaccgaggtggtgtacaccgaagacgttggcttcaaccagggcagctacgccaacccactgctcggtggtgctgtgccgccggggttctccggtctcctgcgcaaggacaccctgaccaccatgctacgcatggacaagacggttgacctgaccagcctgatcggcaccagccgcccatcgttcctctccgtgcaggtgttcaacacccgcgtactcggcttcgacaaggatgacgacctggtcgagttgccctccatcggtacgaaaaagaagcgcgacaccaccctgctgaccagtgtcctgcaaatgaactaccgcaacgacaccatcaacccgtcgttggccgctggtctcgatgtcaacaacaagggcggtttcatcatccccgccgtggagtttgtcatgggcgacaagtggcgtctgcgcgccgaggccgatctgttcttctccgccgggcgcagtagcgacaacgcggtcaaggcgcagaccgcgcgcggcaacgacacccgcttgttcggttacctcgacaaccatgaccagttcgttctgcgtctgactcgtcaattctga

SEQ ID NO: 351616 - DNA, 2394 bp, Pseudomonas aeruginosa
atgaaggcactgaagaattttgctacccgtttggccgaatggtctatcacccatcgggtgccggtgaccattgtcgtgggtcttatcaccctgtttttcgcgctcagtctgacgcgtcttgaaatccagacacgtttctcggacatgattccgcacaaccatccatatgtgcaggtacaccaggcatacaaggatagctttgctgccggtaatcgggtaacgatcctggtcaagtcgcgatcgaatgacattatccagggcgacattcttgcagaggtgcagcgcatcacccgcgaattgcgcaaagtggagggggtgaatccacagcagatcgtgtcactcgcctcacgcaagttaaagcgggtgaatgcttccagtgagggcatagtgaccgaacccttgatgggggagcaggttcctcgagagcaggccgagcttaatcagttgcgtcaggcgattctcagcaactcgatggtctacggtttgttcgtggatcgggagttcagctcgactctgatccaggtggacttctatgaccatctggtgaactacaaggctatttttccccaggttcaggcaattctcgacgcctcaccaattaaggatcaggtcaccttgcatctggtcggcgagccagtgttgtacggctgggtcgccaactacttgccggagaccctaacgctttcgctgctgtcgctggcggcgatgttggtgctgctgttcgtcttcagtcgcacgtggcgcggtacgctgctgccgttgttggcgggtgttatctccggtatctgggcgctgggaatcagcgcgctgctgggctacaacctggatccgttggtggtcgtggtggcctttatcatcactgcacgtgccttctcgcattcggtgcagttgatcacccgttacgatgacctggtgctggacgatcaggtagagtctcgtcgcgccgccgagcaagccatggcggagctgtttcgccccagtatgctcggcttgtatgccgatgcgggggcgatcctctgtgtgatgcttacgccgatcccgctgctgcacaaggttgcgatcatcggtgcagtgtgggtgatgagcatcgcggtctcggcggtggtgatgacgccgatcatgctctcgtgggtgcgccgcccgcagggtttcgtgcatccgctgaaactcgatttcatcctcaacgctgtgctgcgtctggccgctttgatggtcaccactagggctcgctacgtcgtcgcgccggtgtgcctggcgttgctcgccgggttgttggtcgaggcttcgcggattcaggtcggggatgccagcgacggttcgccgatcctttggaatgatgcctcgttcaaccgcgatagcgcgttgatcaaccgtctgtatccaggctccgagcagatgttcgtggtgattgaggggcgtggccccgatgcactcaaagtgcccgaagtgctggactgggcgcagcgcttttcgcgctacatggaacgtcaaccagagatcggtggcagcgtctcgcttgccgatctggtggtggatatccgccgcaacctctatgagggtaacccgcgctaccgcgagctgggcgcgtcgcagaccgagaatggcgagctgatcaacttctacctgcagggggccgcaccggaggacatggcgcagtacgccgaccggcagttccagaatggtgccatcaccctgttcttccgcgaccataagggtgacaccctgcgcaacgcagtgcattacgccaagcacttcatcgccgaaaacccgttggaggaggccgaagtcaaactcgcaggcggcgggttgggggtgatcgctgcagtcaacgaggtgcttctacgcgaccagatcgaggccatcgcactggcgttcctggtagtggtgctctgctgtctggtggtttaccgctcttcggtcagcggcatcttcttcatcatcccggtgttggtgtccaacgtggttaccttcgccttcatgacatggcagggcatcggcatgagtatcagcaccctgccggtggtcgcgctaggtatcggtctgggcgttgactatgccttctacatcgtcgactcgatcaaggagtacctggagaagcatccgcgtgccagtcacctagacgcggtgctgcaatccattggctcggccgggcgcggggtcatcctcaccgcgttcaccctggccgccggggtattgctgtggggctattcgtcactacgcttccaggccgagatgggcctgctgattggcctgtggctgatggtttcggccttcacctcgctgttcgtcatgccggccttggcgctggtgttcaaacccgacttcatctttgcccccactcatgcgcatgacgccaaggcgcagggcaccttcgactccgagccagccgcataa

SEQ ID NO: 351617 - DNA, 1125 bp, Pseudomonas aeruginosa
atgcgaaatcagcaagccgttctcgatacccgtgcatcgggttctacctgccgacctgtttcagcagttatctcctctcctctgacgcatgaagcgtcgcctcagttcgcgcgctgtaatgcaagtaagtctcaggacgggggggggcttttgtcgtgggcagcgcgtctttctccgtgggggcttattgctggcctagcctatgcggcagttttcattaagccgaccgtcgatgctgcgccattgttacaaccggtagtggagcagcgcgatatgttttttggcgctgccggtgatttgacgtcgctttgggtggttgggcaggacggtgctgtgctgcacggagttcagggcggaactcgctggagtcgtgaggtgttgtctaccaggagcaatctgcaagccgttgcagtttctccaggcggtgtcgtggttgcggtcggcaatcatggtgatttgtggctgaaaacgcctgagcaaaactggcgcaatacgaaactgccagtcagtgaagttggcggcaagttgttggacgttgcctttattggtgggcacttctgggttactggtgagatgggggctctttttcgttcagggcctgaggccggggcttgggagcgagtcggtgaagagcaggatgtcgctttcaacgcgattcgtcagggcatcggtagtgatctttgggtcgccgcagagttcgggcgtctgctgcgtagccgcgatggcgggttgaattggacgacgcaagagctgggcaacgagagcctgcgctcggtttcctttgaaggccaggtcggtgtcgccgttggtaatgcagggcatgtctatgttagtcaggacgggggagacaattggaaagccatctcgttgttcgcctccgatcatctgcgcgacgtagctgtagtggacgggctgtggagcgtggttggcgacaatggcacctacttccagagccgcaagcctgacggtggttggtcgaatgcagcattggaatttggcgggctgggcaaggggtacttcacccgtgttctgctcgtcgctggagggagcctgttggtgggtcagcaattggccgtcatcgatggtgggcagctaaccgtggtcaacgcggggatgcagccatga

SEQ ID NO: 351618 - DNA, 978 bp, Pseudomonas aeruginosa
atgagcgtcgagctcacgctttcggccaaattgcgtgccttgttcggaggcaacgtgcctacccgcttggacgactggcttgaacgcttgcatcctgatgaacggcaggccctgcggaaggagatgttagcctatgtgaaaggtggcatgggtgttaggtgctatcagctggagcaccgcctcgaagttggcgtcggcgaatatcgctggtttctgtctcgctatgggatcacccgcgatgaatacggcaggcccactcatctgttgtgtgcgctgcaggatattgaaactgtcagagagcaggctgtcatgctggataacagcatgcagcgcttccagctcacccttgaaactatccacgatgcgctatgggatatggaggttgttgccggcgatccggtcaacccgcacaacaaggtgtggtggtctcctcagtttttgcgtgtgctgggcttcgatagtggtgagggattccctagagagctgagcagttgggcatcgcgcctacacccggatgaccagttgcacactgtgggcgcttttgcagcctatatgacagatcataaggctgacgctcctctcgaactcacctaccggctgaaacttaagaatggaaattaccactggtttcgcgcgcgtggactggcgcagcgcgacgctagcggcacgcccttgcgagtgatgggatcgttggttgacatacagggcgagcatgaagaaggcgagcggcagcgagtgcaagtcctgcagcatgaggctctgcaggatagcctgaagaagctcggggctatcgtgacctcgatccaggggatcgcgacgcagaccaatctacttgcactcaacgccgccatcgaagccgcgcgtgcaggggagcgcggtagggggtttgccgtggtggcggacgaagtacgcactctggccatgcgaaccaccgaagccactcagcaggcgagggcaatgatgagcggcggcgaataa

SEQ ID NO: 351619 - DNA, 243 bp, Pseudomonas aeruginosa
atgatcaatacaggactccagccgatcaaggcgttcctgggcaaggctgtgcagagattgcaagctgacattattttcttcaagccgacgccactcgagcaccgcatctacattcgcctgttcgagctcgaccagacgttgctgcacatgccgcagagctgcctcagcctgcatggcgagctgccggtcggatgtcacaaggaggcgccccgcctcgcgctgcatcccggcgagctgctctaa

SEQ ID NO: 351620 - DNA, 774 bp, Pseudomonas aeruginosa
atggggcgtttaaatgagcgtgtctgcctggtcactggtgcggccaggggaatcggtttggcaacggcagaactcttcgcgcgggaaggtgcgcatgtattgctgactgaccttgatgaggtggttggcgtgcaggttgccaatacattaagagagcaagggctgtcggtcgaattccacaagcttgacgtgaccgatcaagttcagtggaggcaggtcttgcttgtctgtggggagcagttcggtgggcttgatgtactggtcaacaacgccggtgttggtgcgttctgtgatgttgaacagatgacgctggtgcagtggcgccacacgcttgtctgcaatctggatagcgtttttttgggcacgcagttggctattgagatgatgaaggagcgtggcggttcaatcatcaatgtggcctcgattgaggggctgatcggtgagccactggcaccagcctacaatgccagcaagggcggggtgcgcctatttacacgctctgtggcggcccattgtgcgcgcaaagggtatggcatccgggtcaatgcgctgtgtcccggatatgtcgagaccccgatggttctacaggcgatggcggcggtgccggagtcacaggcgcagggtatgcaggcttatctgcgccagcgcattccaatggggcgaatggcccgcgtcgatgaaatcgccaaggccatgctgttcctcgccagcgatgactccagttacatgaccggggccgatctggtcgtcgatggcggctatctggcccagtga

SEQ ID NO: 351621 - DNA, 816 bp, Pseudomonas aeruginosa
atgagcgatgtagatcagcaatacggtttgcagggaaaggttgcgttggttaccggtgccgctagtggtttgggggcagcaactgcagaggtgctggctcgtgcgggggccagggtggttgtgagtgatattcagagtgaggctgccgaggtcaccgctcaaggcatccgcaagcagggtggggatgctgtttcgctcaagctggatgtcaccagtgaggcaaattgggagtctgttgtgcgagcgaccgtcgagtcctgtggtggtctggatgttctggtgaacaacgcgggtgtcgaaaaggtggcgttaattaccgagaccagtctggaggactttgtgctattgcacgacgtcaatgtcacgggggtctttctgggtctcaagcatgccgcacgggctatgcggcctggcggtgcggccgggcgtggtggctcgatcattaacctgtcttccgttgccgggctggtggggattcccggccttggcagctactgctcatccaagggggctgttcgcttgatgaccaaagccgcagcagtggagttcgctgcgcttggctacggcattagggtgaactccctgcatccggccatcgtcaagaccgagcttggcatcaatgtcgtgcgtggctttgctgagactggattggcgactgatgaggcgcaggcggaaagccttatccagaatatgcacccgctgggctacggcttgccgcaggacatagcgagcgcggtgttgtatctggcctccggggctgcccgttggattacaggtgctgagcttgccgttgatggtggcctgagtgcgcaatga

SEQ ID NO: 351622 - DNA, 381 bp, Pseudomonas aeruginosa
atgactatgacttactccatctccgatctggcccgcgaactggatgtcacgcctcgtgccatccgcttctacgaagagcagggcatgctcgcccccgagcgtcgcggtcaggagcgcatctacagcgccaaggacaaggtcactctcaagctgatcctgcgcggcaagcgcatcggtttttccctggccgaatgcaaggagctgattgagctgtacgacccgactgggggcaaccaaaaacagctgcaaaccttcatgaagaagatcgccgaacgccgcgcacaactcgccgaacaactgctggacatcgaacagatgcaactggagctggataccgccgaagaacgctgcctggcggcgatgagcaaaacccacgcctaa

SEQ ID NO: 351623 - DNA, 1164 bp, Pseudomonas aeruginosa
atgagctacccgaccctcaacttcggtctcggcgagaccatcgatatgctgcgcgattcggtgcaccagttctcgcaagcagagctggcaccgcgtgccgcgcagatcgaccgcgacaacgccttccccatggacatgtggcgcaagttcggcgacatgggcctgctcggcatgaccgtggccgaggaatacggcggcaccaacatgggctacctggcccacgtggtggccatggaagagatcagccgcgccagcgcctcggtcggcctgtcctacggcgcgcactccaacctgtgcctcaaccagatccacaagaacggcacgcacgagcagaaggccaaatacctgcccaagctgtgcagcggcgaacatatcggtgccctcgccatgagcgagccgaatgccggctccgacgtggtatcgatgaagctgcgcgccgagaagcgcggcgaccgctacgtgcttaacggcaacaagatgtggatcaccaacggcccagatgccaatacctatgtgatctacgccaagaccgacgtcaacgccggctcgcgcggcatgaccgcgtttatcgtcgagtgtgactacaagggtttctcccgtcaccagaagctggacaagctgggcatgcgcggctccaacacctgtgaactggtgttcgaggacgtggaagtgccggaggaaaacatcctcggcgtcgaaggcggcggcgtgcgcgtgctgatgagtggcctggactacgagcgcaccgtgctctctggcggccctaccggaatcatgagcgcctgcatggacgtggtgctgccctacgtgcacgagcgccagcagttcaagcaatcgatcggcgagttccagctggtgcagggcaagctggccgatatgtacgccggcatgaacgcctccaagtcctacctgtacaacgtggccaaggcctgcgaccgcggcgaggaatcgcgcaaggacgccgccgcggtgatcctctacaccgccgagatggcgaccaagatggcgctggacaccatccaactattgggcggcaacggctacaccaatgaatacccggccggccgcctgctgcgcgacgccaagctctacgagatcggtgcaggcaccagcgaaatccgtcgcatgctgattggccgagagctgttcaacgaaaccaaataa

SEQ ID NO: 351624 - DNA, 1608 bp, Pseudomonas aeruginosa
atggccatcctgcatacccagatcaacacccgttcgtccgagttcaccgccaacagcgcggcgatgctcgcccaggtaaacgacctgcgcgccctgctcgcccgcgtccatgacggcggcggtgccaaagcccaggagcggcatacctcgcgcggcaaactgctgccacgcgaacggatcaactgcctgctggatatcggctcgccgtttctggaaatcggccagttggccgcccatgaggtttacggcgaggacgtaccggcggccggcgtggtggcgggcatcggccgggtcgaaggcgtcgagtgcatgatcgtggccaacgatgccacggtaaaaggcggcagctactacccgctgacggtgaagaaacacctgcgcgcgcagaccatcgcccagcagaaccgcctgccgtgcatctacctggtggactccggcggggccaacctgccgcgtcaggacgaggtattcccggaccgcgaacacttcggtcggatcttcttcaaccaggccaacatgtcggccatgggtatcccacagatcgccgtggtcatgggctcctgcaccgctggcggagcctacgtgccagcgatggcggatgaagcgatcatggtgcgtaaccaggcgaccatctttctcgccggcccgccgctggtaaaggccgcaacgggtgaagtggtcagcgccgaagacctcggcggtgccgatgtgcactgcaaaaccagcggcgtagccgaccactatgccgacaacgacgaacacgccctggccctggcgcgccgctcaattgccaacctcaactggcgcaagctcggcgtgctgaacaaccgcacaccgatcaatccgctgtacagcagcgaagagctgtacggggtaatcccggcagatgccaagcagcccttcgatgtgcgcgaagtaatcgcccgcactgtcgatggcagcgtatttgacgaattcaaggcgctgttcggcgcgactttggtgtgcggatttgcgcatatccacggctatccggtggcgatcctcgccaataacgggattttgtttgcggaatcggcacaaaaaggcgcgcactttatcgagctggcctgccagcgtggcattccactgctgtttctgcagaacatcactggttttatggtcgggcagaaatacgaagccggcggtatcgccaagcacggggccaagctggtcaacgccgtggcatgcgccaaggtgccgaaattcaccgtgatcatcggcggcagtttcggcgcgggtaactacggcatgtgcggccgcgcctacgacccacgttttctgtggatgtggccaaacgcgcggatcggcgtgatgggtgccgaacaggccgccggcgtactggtgcaggtcaagcacgagcaggctgcacgtgccgggcagagtttctctgccgaggatgaggccaagctcaagcagccgatactcgagcagtacgagcgtcagggccacccctactactccagcgcgcggctatgggatgacggtgtgatcgacccggcacagacccgcgacgtactcggcctggcgttgtccgccagcctcaatgcgcccatcgagccgacccagttcggcgtgttccggatgtga

SEQ ID NO: 351625 - DNA, 801 bp, Pseudomonas aeruginosa
atgaccgacttcactaccgtacagttggaaaaagacccgcgcggcttcgccaccctctggctcaaccgcgccgagaagaacaacgccttcaacgccgagatgatccgtgagctgattctcgccctcgccgccgtcagtaccgacaagacactgcgctttctgctgctgcgcggccgtggcaaacacttctccgccggtgccgatctggcctggatgcagcactcggcaacgctggactacaacgccaacttggccgagtcgcacgaactggccgagctgatgtacagcctgcatagcctggccatcccgaccctggctgttgtgcagggcgcggctttcggcggcgcggttggcctggtcagttgttgcgacatggcgatcggcagcgaagacgcattgttttccctctccgaagtacgcatcggtctggccccggcagtgatcagccccttcgtcgtgcaagccatgggcgagcgtgccacacgccgctacgcgctgaccgccgagcggttttccggccgtcgcgcccacgagctgggcctgctggccgaggtctacccagcgtccgaactggacgcccaaaccgaaggttggatcaacaacctgctgctcaacagcccgcaggccatgcaagtgagcaaagacctactgcgcgaagttgccagcggcgtactcagcgtagatctacgccacgtcaccgagcagaccatcgcccgtattcgcgtcagcccggaaggccaggaggggctcaatgccttcctggaaaaacgcacacccgcctggcaggagccgcacgcatga

SEQ ID NO: 351626 - DNA, 1962 bp, Pseudomonas aeruginosa
atgagccacacacacatcgacaccttactgatcgccaaccgaggcgagatcgcctgtcgggtgatgcgcaccgccaaggctctgggcctgaaaaccgtggccgtgcacagcgccatcgacgccaatgcccgccatgtgcgcgaggccgatctgacagtaaacctcggtggagccaaaccagccgacagctacctgctggtggacaaactgatcgcatcggccaaggccagcggtgcccaggcgatccatcccggctacggctttctctcggaaaacgccggtttcgcccgcgccatcgaagctgccggcctggcattcctcggcccacccgcctctgccatcgacgccatgggcagcaaatccgccgccaaagcgctgatggaagatgccggtgtgccactggtgccgggttaccacggtgacgcgcaggacgtggaaaccttccgcgctgccgccgcacgcatcggctacccggtgctgctcaaggctaccgctggcggtggcggcaagggcatgaaggtggtcgagcatgaggccgaactgactgagacgctgcagtccgctcagcgcgaggcacaatcggccttcggcgactcgcgcatgctggtggaaaaatacgtactcaaaccgcgccatgtggaaatccaggtgtttgccgaccagcatggcaattgcctgtacctgaatgagcgcgactgctcgatccagcgccgccatcagaaggtggtcgaagaggcccctgcaccgggtctgtcgcctgaactgcgccgggccatgggcgaggcggcggtcaaggccgcgcaggccatcggctatgtcggggccggcaccgtggagtttctgctggatgagcgtggcgacttcttctttatggagatgaacacccgcctgcaggtcgaacatccggtcaccgaactgatcaccggcctcgatctggtcgcctggcagattcgcgtggctcgtggcgaaacactgccgatcagtcaggatcaagtgccgctcaatggccacgccatcgaggtgcgactgtacgcagaagacccggataacgacttcctccccgccaccggcaccctggcgctgtaccgcgaagccaatccggggccgggccgtcgagtcgataccggtgtggccgaaggcgatgaagtctcgcccttctatgacccgatgctcggcaagctgatcgcctggggcgagaaccgcgaggaagcccgcctgcgtctgctggccatgctgggcgaaactctggtcggcggggtcaagaccaacctggcattcctgcaacgggttctggcgcatccggcctttgccgccgccgaactggataccggctttatccctcgtcacgaagcgcaactgctaccagcacccggcgaactgcccgccgagttctggcagttggctggcgaagccttcgtgcagagcgccgcgccacagcaacgtcaagacgatggccattcgccctgggccaatcgcaacggcctgcgtctgggcctgccggcgcaaaccgacctgcatctggcctgccagggcgaacgccaggtggtgcgcctgcgccatgcagcgccatcgccggcgcagttgcagggcgatgtgcttcaggtggagcgcgatggagtgcgtcagcaacatctggccattcgccgggatgacaccctgtacctgcattttgccggcgagctgcgcggcatccagcgcgtcgatccgatcaccgaggtcgaggccagccacagccatcacggcggcctgaccgcaccgatgaacggcagtatcgtgcgtgtgctggttgaagctggccagcaggtcgaagcaggcacggcgttggtagtgctcgaggcgatgaagatggaacacagcatccgcgccccccgtgccggcacggtcaaggcgctgtactgcggcgaaggcgagatggtcggcgaaggcgcggtgctggtggagttggaagaaatcagcgcataa

SEQ ID NO: 351627 - DNA, 906 bp, Pseudomonas aeruginosa
atgaacctaccccaacaggtgcgcctggtcgaagtcggcccgcgcgacggtttgcaaaacgagcaacaaccgatcagcgtcgccgacaaggtgcgtctggtcgatgatttgtccgccgccggcctgggttatatcgaggtgggcagcttcgtttcgcccaagtgggtgccgcagatggccggcagcgcggaggtgtttgcgcaaatccagcaattgccgggcattacctatgccgccctggctcccaacctcaagggcttcgaaggtgctttggcagccggggtgaaggaagtcgcggtgttcgctgccgccagcgaggccttctcgcagaaaaacatcaactgctcaatcagtgaaagtcttgagcgctttgttccagtgatggacgccgcccgccagcacggtatccgcgtgcgtggttatgtgtcctgcgtgctgggctgcccgtacgacggctttgtaccacccgaacaggtcgccatggtcgctcgcgaactgtttgccatgggctgctacgaggtgtcgctgggcgataccatcggggctggcactgcgggtgacacacgcaagctgttcgaggtagttgcccgcgatattccccgagacaagctggccgggcacttccacgacacctacggccaggccctggccaacatctatgccagcctgcaagaaggtatcagcgtgttcgacagttcagtcgccggcctcggtggctgcccctatgccaaaggcgcgaccggcaacgtcgccaccgaggatgtgctgtatctgctcaatggcctgggcatccataccggcgtcgagatgggtaagctaatcgaagccggtgctggtatctgccaggtgctcgaccgcaagagtggctcacgagtcgctgcggcgacactcgctaaatgcatgtaa

SEQ ID NO: 351628 - DNA, 900 bp, Pseudomonas aeruginosa
atgaggatacgtcacctgcgctacttcttggtcgtcgctgaagaactgagcttctcgcgggcagctgccagagttcatatcgagccctcccctctctctcgggccatcaaggagctggaaacggagttaggagtctgcctgtttcagcgcaccagaggacgcatccaactaacgtgggccggtgaagtcttccgcgaagaagcacaccgcatgctcaccttcatggaaggtgctaggagtcgcgtgcatgctgcagcacggggattccacggacgattgcgcataggtctggctgacagcctcgcacagcctcgactaacccgactgttggcatgctgccgcgaagaggaacctctcaccgaggtaagagttatcgaaatgaccgtcaaggagatggtcaacgcactacggcacgatcaaatcgatgctggtttcaccgtgcatacggagctctccaatggatttgttaaagaagtcgtctggacggatcgccccgtcatcgcaattcccaagaatcacccgctcctctcgcttgaccagatacctctccaagaggttgccagacactcactgattctttgccatcccgagttgtgctccggtgggtatgacgtcatccgccgctggttctccgagtacacattgccgttgccctcgacaacccaatacgtttcggggcatgaaccaatgatgatgctggtggcagcgggctatggcattggtcttgggttggaatcacaaataaccctgtacaaccaccccgaggtcatcatccgcccggtcaccaatgatgtgcccagcgcagcgacgttcattaccatactcgaccaacctccatcggaggagttgggccggttcatcgcccgcgcccagcaagtaggcaacgcgattaccgtctaa

SEQ ID NO: 351629 - DNA, 210 bp, Pseudomonas aeruginosa
atgtccactgagcaaaccgcgattgccgagcatcgcatcctgcgtcgtgccgaagttgaagccaaaaccggcttcaagcgcgcccatatctacaacctgatgaaagaaggcaaattccccaaggccttgcgcctgggaattcgagccgtcggctgggactccgccgaaatcgaccactggatcaccgaacgcctcaaagagcgcgtttga

SEQ ID NO: 351630 - DNA, 864 bp, Pseudomonas aeruginosa
atgcaggtgatcgccatcatttcgacgaagggcggagtcggtaaaacgaccgtcgccgccaacctgggaggcttcatcgctgacgcaggtctgcgggtgttgctgatcgacctcgacgtgcagcccacgttgtcgtcctattacgaactcacccaccgtgcctccggcggtatctacgagctactggcattcaatgagcaaacgctgccgcagttggtttcgcggacaaccgttaagaatctggatgtagtgctgtccaacgacgagcaccagcaactgggaacactgcttttgcatgctgcggacggacgcttgcgcctgcgcaacctgctgccgctgttccgaccgcactacgacctggtgctgatcgatacacagggcgcacgcagcgtcatgttggagatggccatgctcgccgcagacatggccgtctctccgatcaccccggagattctggctgcccgggaactgcagcgaggaacgctgcagcttatcgatgccatctccccctaccaatatttgggcatccaacctgcgccactgcacttgctgctaaatcgcgtgccagccatctcgtcgaacgcaaaactggttcagcagacactacggctgattttccgtgagcaccatgaaattcagatactacgcaccgagattcccgccatagaggctttcccacgcgcagcaacgtcgagccaaccggtacacagggtcgagtaccgacgcccgaccggacgtcaggcaccagcggccctggaaaccatgcgcgccctcgcaaacgagcttgccccgcaatggcaagagcagtttttcgacatgagcggccgaacaggcaggaggcatagaaatgccgagcgcttatga

SEQ ID NO: 351631 - DNA, 204 bp, Pseudomonas aeruginosa
atgccgagcgcttatgagctctgccgcgatcataagcggttactgccgctgattgagttcgccttacgcgagggctgggaagtccgcggcacaaagggaggacagctgaaactcgtcaagcctggcttaccgccgatcttcaccagttcaacggcaagcagccaccgggccgaacggggccagccgggagactggaatgactaa

SEQ ID NO: 351632 - DNA, 1668 bp, Pseudomonas aeruginosa
atgactaatatctcgccccaggaaatggccggcaagctgatggccgaggggttctctcgttcaggtccggccgcccaggtgttgagcgaccccgttaccgacaacccgatggttgtcacgctcgatgacctgcgtccctatgagcttgacccacgcctgacgcgcaatccgctctacgacgaaataaaggcgtccatccgcgagcgtggccttgatgctccaccaccgatcacccggcgtcccggtgccgaccacttcatcattcgtaacggcggcaatacccggctcgccatcctgcgagagttgtggtccgaaacgaaggaggagcaattctttcgaatctactgtctgttccgcccttggcccgagcgcggtgaaatcattgctctgaccggacacctggcggaaaacgagctgcacggcagcctgacgttcatcgagcgtgcgctcggcgttgaaaaagcccgcgaactgtatgagctcgaaagtggcaagtcgttgtcacagtcagagctcgcccgtcgcctcagcgccgacggctacccagttccgcaatcccatatcagtcgtatgcaagacaccgtgcgctacctgctgcccaccattcccaacgtgttgtacaacgggttggggaggcatcaagttgaacggttggctgtattgcgcaaagccgccgaactcacctgggaaaaatatgcgtgcgaaaaggcgttggccaccgatttcgagacgctattccacgacgtcctagcgccgttcgatggacagccaagctccttttctggcggccgagtccaagacgaactgatcggccaaatgtcggaactactcggcatcgactacaacgtgctggagcttgatgtcgacagcaccgaacaccaccaacgggcggtaaacagcccgccacagctgccagtcgataccgctgccgtcataaaaaccgtcggtgcatccacttccacaccaggttccactcgcacccatggctcttcatctgacacgtcagaaacagcatctaacgacaccgccacaccgctatccccactacagacactgacgccaggtacctcttccggtgagggtgataccgacgcgcacctgctggggcacatcgtctcacctgccaacaacaccgagcgactgcaagctattcaacaaatggtcgccgagcatagtggtgagtcactaccgacctttgcggacaatgtgctgcaggcgattcccgtgcaagccggcggactgttcccgatcagcgacgtctggtacatcgagccgggactggattcgccagatcgcctgcgcatccacattgcacagttcgcgcaggagatcgccgaggaagcccaactggtcgaccatattgaagcggtcatggccggcatcggtttcacctgcagtccgccccatcagggtgtatcgctacccgcgttcggtcgcatggtgttggcgctgttgcgcgcattgagtatccactacgccgccgagcccgatcagggcggtcttcgcctgggcgacagcctcggggcactgttgctgggagccgacatcagggacgcagaagccccaccccgcctgagcgataatggcttggtcaagttgttccgtctggtccggctggcacgccggctgttggatctggaggccaatccagatgagaccaaccactga

SEQ ID NO: 351633 - DNA, 561 bp, Pseudomonas aeruginosa
atgtcgacacctcatccgcttaaccaagctgtcgtcgcacaggctctgcacgatctgcgtaacggtcaacttcgccgttgccaatcgatgggcttcagcgagcgggaactggacgtactgaagcaacccgcgctggtgagtctgctggccaatgcccaggtgccgtggtgctctgtgtccgtgaatacagacgtcctctggcgattggtcagccagttgaacgacatcgagcatgagatagccactgtcgatcgcatgctacgcctcggagccagtaccgaaatggtcagcaagttctacggactgacccatcaggaagtcgccctgcgccgcgacatcattaagctgcctaagcgccgggggcggcatccggttctgaatgaagaacaggaggtgaccctatggaagcagtggaagtccggcattaccgaacgcggcatcgcactggatgacgacagcaagatgctggaactgacgatggttctggccgaagccttatctttgcccatgtccgtaatatgggctgcgataggaagttggatcgaccaaggcctggtgtaa

SEQ ID NO: 351634 - DNA, 1170 bp, Pseudomonas aeruginosa
atggtctcgccggcagtttccgtttctctttcaacgctgctcgacgacgccctgtggcacctgcctcccatcaagggcagcaatccagccagcgatgggttcatctacagcggcaatcgccatgaaagcgtgcctcgcgcgctgtttctcgatcgccgtctgacgccgctggaacgcaacacctggcaggtgtttcgactcctgctcaacgacgatggggtcacggcgttcccgacttacgatcagctccgcccctacctggcctcgacgccctgcgcggagcaggcatcgcacgaaaccgtggcacgtgcgctgacactgttgcgtctaacgcgctggctcagcctcgtgcgccgccgccgcgattccaagaccgggcgcatcaaaggcaacctctacgtcctgcacgacgaaccgctcacgccctacgaagccatgcagcttgaccctgaatatctggggctggtgagccacgctctcaaccacgccagcaaggcgattcagcgggtgggctaccacgccatccaggaactcaccgaagacccgatgctcagcggtcgtgtactgccgacgcgactccagatgctggcgcagcgtatggcccagggcggtatatccgcacgcgaaagttatccacaggcgcagacttcccacaaatccgaagaaggctgcgatgcccttcttcggaatggcgagccgccgtcttcggattccgaagcaggcacgaaagccagcgaaatcgcccctcttcggaatccgaagcaggaccgtactgaagtacctagtaatcgtataaaagaaacaatacgtactgtaccgcgtgcgcgagaactccagagcctgcgactgcctgagcgcttcctgttgctgaaagatgagcagcaggccggtgccctcgttgcgctgcagcaagtcgatgctgaacagcgacaggcggtgctcgacgaatgggccgcgcgctgtcgccacagtgaggtacgcaaacctgccggctatctgttcggcatcatccaggccgctatccgcggcgaattcaaagcatgggctggacaagggcaaagcaacgctgttgccagcgacccacctcccgcgccccactctcgaccggcgaaccccgaaatcgtccaggcgcacctcgcccatctgcacgccctgctgaaccagaaataa

SEQ ID NO: 351635 - DNA, 792 bp, Pseudomonas aeruginosa
atggctaccgacaacactttgcaactgaatctcggatcgctacgcagtgcaatgtcgctgacgctgcacacccaccacgcctcgcgcatctggcacggtcgagcggccagcgacgggaaacccggcatcgttggtttgaacggcttcatcgccatcgccaacaagatcaagcgcggctccgagcaggacgacccttactcggactggtggatgctgagggttgaggaaaagctgacgcagactaaggacacgttgcagaccttgcgcgaacaggtcgaccaggcgctggccgatgtgcctccagcgctgtcgctgggcgagaacatgaatgtacaaccggtgaagctaccgctgttcgtgaacgcgcagctcggcttcctggcggtgtatctgctggccgattacgacgacctggcgcgcaagctgatcctggcccaccacaccgcgctgattgaccgcagcacactcgaacgctggctcaacgaaggagcccactccctgcgcagcctgttctcgctggcacagcagtaccgctactcgggctgcaccagggacgatttcgctgccaagaatgccgcagccagggcggccatcgagaaactcggcgaactgccgcaggacgtgctcgaaggcactctgcgctcccgctacgcgccccccatcatccggcgctcagcgctggccgcctctgcaaaccagggagcggagaatgccagctccggagacttcccggtggaggacgccgatggtccgatggcggcggcaggtgaaggcgaggatgcgccagcatga

SEQ ID NO: 351636 - DNA, 558 bp, Pseudomonas aeruginosa
atgacgaccacctcgacctctgcggcagctcgtcgctttcaccccctggaacaggctgacttccagaaactggaacaggcagcctatctaaaaggccttttacgtccctttccttttaaaggtaagggggctcttactgaatgggccagccagtgccacgcgctgcgcgacaacttgatcgaactggcgcagaggcgcgtcttggcgcaagcagccgactatcccttccgcctgctgcccattgagctggcccagcagaccactggtgcagggaccgtgtttctgcgctggcgcaggcccgaccgctccgccatgggtgtggcattgtggcaggcgttgatcaccagtcctgcgacccccgacacgttgatcgacgacctctacgcgatggaggtccagcgcatcgtcctgaacatgcaaatcagcctcctccacacactgggccgccaggcccaggcctgcgccagcaaagtcgccctggccgaatcgagctacctgcagcgcgtcagcaaacacgctgcacccaccggcaccacccaccccgaggaatcattatga

SEQ ID NO: 351637 - DNA, 396 bp, Pseudomonas aeruginosa
atgagcacgcacttcgttggcgagggcaacatcggctctgcgccagaattcagggaatttccaaacggcaacgacgaaccgcggcggctgctgcgcctcaacgtgtatttcgacaaccccgttcccaccaaggacggattcgaggatcgcggtggctactgggcacccgtggaactgtggcaccgcgaggctgaacactggcaaacgctgtatcagaaaggcatgcgcgtactggtggaaggtcgcacggtgcgcgatgaatgggaggatgcagacgagaacgagcgcgagacgttcaagatcgaggcccgccgtgtcggcatcctgccctaccgcattgaatcagtaatgctgagcccgaaacaggccagcgatccagcccactctgcggagtaa

SEQ ID NO: 351638 - DNA, 1998 bp, Pseudomonas aeruginosa
atgcgcgtgttcctctgcgagaaaccgtcccaaggcaaagacatcgcccgtgtgttgggtgccggccaacgcggcagcggttgctacagtggagcaggcaccgtcgtgacctggtgcattggtcacctgatcgaagcggcccaaccggaagcctacggcgagcagtacaagcgctggtccatcgaacagcttcccatcattcccgagcgctggcgcgtagaagcgaaagctgcaaccgccgcgcaattcaagatcgtcaaacagctcgtctgccaggccagcgaactggtaatcgcaaccgatgcggatcgcgaaggcgagatgatcgctcgcgagatcatcgacctgtgcggctatcgcgggccgattcaacggctgtggctgtcggcactcaacgacgcgagcattcgcaaggcgctgagcgcactgaaaccgtcgaacgagacgctgcccctgtactactcggcactcgctcgcagtcgagctgactggctgatcggcatgaacctgagccgcctgttcacactgctcgggcgtcaagccggctacgacggtgtgctgtcggtcgggcgggtgcaaacaccgacactggcgctggtggtagcccgcgaccgcgagatctcgcgattcgtttcggtgccgttctggaccgtcgagattgcattattggcggacggacaatccttcctcgccaactggatcgcaccggatggctgcaccgatgacacaggccgctgcctgcagcaggctgtggcacagcaagccgccgacctcatacgcgttgccggcagcgcccaagtggtctcagtcgaaacggagcgcgtacgtgaaggtccaccgctgccattcgatctgggtacgctgcaggaagtgtgctctcggcaactcgctctggacgtgcaggagacgctcgacattgcgcaggccctctacgagacgcacaaggcgacgacctatccacgttctgactctggctacttgcccgaaagcatgctcgccgaggtgccagccgtactcgccgccgtgctcaccacagatcccagcctgcgcccgttgctcgatcaactcgaccgtactcagcgttcacgcgcctggaacgacggcaaggtttcagcccaccacggcatcatcccaaccctggaaccggccaacctgtcggccatgagcaacaaggagctggcggtctacaagctgatccgtgcgcactacctcgcgcagttcctgccgcatcacgaattcgaccgcaccaccgcgcagttgctgtgcggcggccagaacctgcaagccatcggcaagcaggtgatcatccccggctggcaccaggtgctggccgtatcggaagcggatgacgcagacggcgaaccgacaccgcgcagccaggtgttgccggccatgcgcggaggcttgtcctgccaggttggccacgtcgatctgaaagcactcaagacgctgccgcccaaaccctttacgcagggcgatctggtcaaggccatgaaaggcgtcgccaagctggtcactgacccccggttgaagcagaagctgaaagaaaccaccggtatcggcaccgaggccacgcgcgccagcattatcaaaggcctgctcgaccgcagctacctgatcaagaaaggtcgtaccgttcgcgcctccgaagcggcttgcacgcttatcgatgcggtgccagcggccatcaccgaccccggtactaccgccgtctgggaacaagccctggacatgatcgaagccggcagcatgacgctggagaccttcgtcgagaagcaatccatgtggatcacccagctcgtgcagcagtatcgcggtgccaccctggccatcaagttacccgaaggcccagcctgtccgctgtgcggcggtgccacccgtcaacgcaccggcaagaccggccctttctggtcctgccgcaactatcccgattgcaaaggcaccctgcccatcctgcaagccagcgcgacacgcaagccgcgacagatccccaaatag

SEQ ID NO: 351639 - DNA, 1479 bp, Pseudomonas aeruginosa
atgcaccctcaacccaacacgcttccactgcagtacggcagcgtctgcagcggtatcgaagccgtcagcctcgcctggcaaccgcttggactggagcccgcctggttcgccgaaatcgaaccgtttccctgctcggtcctcacccaccactaccccaacgtccccaatctcggagatatgcagcggatcgccgcccaggtactcgccggcaccgtaccggcacccgacattctggtcggtggaaccccgtgccaatcgttcagtatcgccggtgcccgccatgggctggacgatccgcgcggtgccctgaccctcagctatgtggagctcgccaatgccatcgatcaagcccgcctcgaaacccaccgccagcctgcagcactcatctgggaaaatgtgcccggcgttctcagcgaccgcggcaatgccttcggatgccttttgggcgcactggccggcgaaagcagcccgcttgagccgccagggatccggtggtcgcacgcaggttgtgtgtctggaccccgtcgccgcattgcgtggagggttctcgatgcccaacatttcggcgtcgcccagcgcaggcgtcgcgtgtttcttgtggcaagtggtcgaaacgatcttgatcccgcccaagtactttttgagtccgaaagcctgcacgggcatcctgcgtcgtgctacgcgccgtggcaaagcactgccgcccctgttgcagcacgcgctggaacggcaggcggctacagcacactgaaccgcgcctacggcaaggtcacgatcagcgtgggattcggcggcgggaacacgtctgggccgatcgacgtggccacctgcctgaccgccagcgctggcccgaagagtgacttcgacgtcgaaacctttatggtgcaatcggtggccggtgccatcagccacaccttagataccgccaacggcggcaaaggctgtggggaggacggcaccggaaaaggcgtgccgatcatcgccacctacgcgccacgagcactggcctttgcccagaactcccgtggcgagctacgcctggagtcaggtcacggccaactctatggagcgctgtcgaccggcggaggcaaacccgggcaaggcctgccgatgatcgccagcgttgcattgaggggacgcgcccatggtctcgccgccgagctgggcaacggcatctcgccgacgctacgcgcatgcagtggtggcggagacaaagggcacgtactggccccctcctacgacgcccactttctctatacgcagaaagaaacagatgccgcagattggtcaccgtggcgcgtgcggcggttgatgcccgttgagtgcgaacgcctgcagggcatgcccgacaactacacacaggtgccgtatcgcggcaaacctgccgccgatggccctcgctacaaagcgattggaaactcgatggcggtgccctgcgtcgcctggttgggccaacggctgctgcaggcattggcataa

SEQ ID NO: 351640 - DNA, 1563 bp, Pseudomonas aeruginosa
atgaacaccatttatctcaagaccaaccagaaccgcttgatcgccaacctgcggcacgctttcaccccgcactccatgctcggtgagctgctacagaacgctcgccgcgcgcgggccagccacatccaggtcatcgccgacggcaacaccttgatcgtcagcgacgacggtatcggtatcgccgacctccaaacgctgatcttcatcgccgagtccggttgggataacgcgctgaaagagcgggagaacgccttcggtctcggcgtcctgtcaaccctgtacttcgccgagcatttgtcggtgcattcaggcaaccaggccttcaacgccgccacggcgaccatcattcgcggcgacgccatcgaggtatatcccgaaccttcgcgtgtcggtaccgagattcgattggacggtgtgcaatcacctcaaccccacctcaccttgccgcaatggctcgagtatcaactcaagccactgtgcgaggcttttccggtacgggtatcgctcaatggagtcgacatcgcccgcccactggcggatgcgagcttgccatggctgcagacaccggtaggccgggttctgctcgacctcgacgcatcaccgacgcaatggcggtgctttctccagggtttgcccatcggcaggattccaaccttctccaagcatcagatcgtgctgttgcgtgacgacatgatcgcccgcctgccggatcgtcagcacctgctcaacgaagaggaggatcaccgacgcatccaggtggcgatcagggaggcctaccggcaagcgctgctcgaagccaaggagcgactggctgccagcgagttcgtagagctgtacgcagagacctgcctgtcgtcgtcgaatgctgacctgctcaacgatgtgccattcgctccgcgtgcgtggtttcgcaactgggaaaacaacccggcaggataccaccgctactgggaacgctatctgctgaatggaatatcggcctgcgctgcgctggaggaaacaggcgtctggtccatcgacagcgacggggaagatgacctcgccgtggaaacctatctgcaagcacgacaagcctttctgctggaagagcatcgtctcgctgcaaatcactggctgaggcacatggtcaagaccgtcacgccggatcaggtaggtgttcgtcacgggccgattctccatagcgaaaattacccgtccctggcggagtgcatcgagctggtcctggtcgacaccctgatcgtcagcctggaaggcgagcctggtgagtatccggtggatacgctgcgcaaggacgacacgctctacctgacgccgaagtctggcagcgtcacggaactcgtttccgactacatcttcgatgaccgctatgacgaaggtcgcgaggatgaggacgcgcaaacactctccacgttcgtcgccgtaggctgctcgcaggaccccgcccacgttgtcagggcgctgctgccagatacgctgcgccaccgttccctaccgaagctggccggagcggtcgtacagctgatcttcgacgacaacggcagactgcaggaggtcacggcctga

SEQ ID NO: 351641 - DNA, 249 bp, Pseudomonas aeruginosa
atgtcccatgcacctcccgcgtcgcccagtaccacccaggtccgagccgagtccatcggttatctggccctgacctacgtgggtgaacgcctgcccctacaggtacgccacagcgccgccggctacttcatcggcactgccgacgaaaacggcccggtctcgcgcgagtccttcgagtatttccgttcgtaccaggctgccgaccaggccctgacaacaggacgctggcaacagcgcctccatccctga

SEQ ID NO: 351642 - DNA, 393 bp, Pseudomonas aeruginosa
atgaacccgtctttaccccaagacgtacttgatcagatcgcgcgggaaatcctgcacttcgacaatgcaccagcagccttcttggacgcctggaaacaaggcatccaaatcgctggtgtcgagtggttcggcgatggcacccacgttgggatgcagaacgccagaaccaagtggggactgcgtccgaatgtactgaggctcaacgacgccctgggcgttctgagcggtggccaacggatgtttctttccgcgatggtcagtttttacaacgccactgaaggcggcgcgatgctcaaacgctgccagttcgaggggctcgccgatctcggcggtctcgatctggaacgccgcaaggtcatcgccgctctggtactccactacgacggctggtga

SEQ ID NO: 351643 - DNA, 714 bp, Pseudomonas aeruginosa
atgaacatcccgatcaatccttttattcgtggctaccagagctttcatattcagcgagtcgccgtcatcagctacgacgaccgctacccagtgacgtatctgccgttgcattgctcacaaagccacttgccggacgaacaggtgacgtaccgccgttgcatcttcactgacagtttcgtgcttatcaccgaaggacaggatattgcaccggagctcgacgcgctgtgcggcggagcgggagcagtccagacagtgctcttcagcatttacggcgacgacaatggcgcgtcgtttcatatcggcgatacccactccgaggaagccgcgcttgagatagtgcggcgactgacttttgagaccgggcattacagtcgctgctgggaaatcagcacggcgcatgtcaccgaggatgcaattcgctacctgtggaaaatggcggatgccgaaaccccaaccggcctgctgttcgtcgccttccacattcccggcagcccggcgatcggggtgaagctgatcaccacgccctggacaaacgtcaacctgctgcacatcgaaggcatcaccgctgagcagctgcgtcaggagcatctggacaagggcgttccagcgtcactgatggatgtcctgcatgaggcggccgatgccgacgttcgcatcctgattctggacgcagacgccctcacgctcgacggactcgagctgtatcaggcgtag

SEQ ID NO: 351644 - DNA, 813 bp, Pseudomonas aeruginosa
atggatacccaagccatccgcgcacaaatgcccgttctggtcgccggtcatgttccccgcaatatccgcaggttcaagttcagcatcttcgacgggcaacccaaggtttcgacgctgggcttccacatcgatcccaaacccttcgagggcaaggtgatcgccgacaccggcgaggccatcgtcgtcaagaccggccgtgccgagttcgccgtgctcgatcgcgctctggtaaccgaagtgcctgatgaaggcaccaaggtgcaggtccagccatatgtccgacgccgtttcgacggtctgcgcgcggacacgccggaagaacgcaccgagtacaccactgatggaacaccctatacggtgaaaacgcacatcctcggttcagcaccggccaagctaccgctcccacagccacgctgcccggagttgcaggagctcatcaaccagcttgaacagttgcccgcccccgacggtttccgctgcatcacccacctcctggtggatgcaggcgcgcgggacttcaccattgtcgacccactgcccgacgacatcatcaagacgtctccggcgatcagcttcaccgttgccacagcgaagttccaaggtcaggtcactgtgctgtacgaacgtgctgacgacctctacgccattgaactgaaacgcgacggggaactcatcgagcgtgtcgatgagattttcttcggcatgctcggcgaaacgcttgaacgtctgatagacgacggacgctggcgactgatcgacgtgagcgtgatcggcgcgaaggcgtcccggcaacgccatacggtgccggcatga

SEQ ID NO: 351645 - DNA, 219 bp, Pseudomonas aeruginosa
atgaagcccgccgcacatgactcctgggtggtgtattcgcccaacgagtccgccgtcagcgacggtgcaggcttctggtccaacgagcatggctggggcgagttcgaccaggcgacatgcttctcaaccgaggacgtcgagagcctgactcttccgatttcgctcggcggtgatgcgcgcttcgttccccagcatgaagccgggggccattgcggatga

SEQ ID NO: 351646 - DNA, 369 bp, Pseudomonas aeruginosa
atgtccctgcgattcaaaggcgcagaactgcgccccgtgcttgccgaagcggtttccaactgctgccgtgtgatcctggccaaggatcagggcgtgtacttccttgctgaacggggcgaacgtcgtcccgaggatagtcgtcaaaagctgctcgcctatgcggtcgactgcaacccagacgtcgacccattcgacgactggtgggagttggcccgtagcgagcttggcggtgacgactttggtgagcacttcgacccgaagtcccaggtgttcgcccgcatcctgcacagcgaggacgatctggagctgtccgccaccgctacgcatctgaccctcaagccggtggcaccgacacccggtgacaactga

SEQ ID NO: 351647 - DNA, 267 bp, Pseudomonas aeruginosa
atgcgcgacacggtcaagatcgaccaccccacctgtatcagtttcagtggcgggcgcacgagcgcctacatgctctggcgtgtattacaggccaatggcggactgccggcggataccctggagtcgctgaatctcgcgagcaagcccagcggtgcccgctttcgcgccgacggcaccagttatgccgaactggcacactttgccgccagccagggcgacctgttcgatcccttcgacgagtccatcacctgctattgcggcgactga

SEQ ID NO: 351648 - DNA, 906 bp, Pseudomonas aeruginosa
atgacctgcactactcccaaccagaagtcgtacttcgacatccatacctcgggtatcggctacatccagcgtgtccgtgaggttcaaggaaaggccggtcgcaaaggccctccatccctttggtgtaccgtcgcagcgctcgtcgggcctgcaacaaacccgatcaaacgctacttcgacgtgcgggtttccggtgccgaagccaaaaaactcgtccagccctacgtcggcatcgatgatcaccagcaacggccgctggttcgcttccgtctcggcgacctttgggtcgatccgttcatccgtcccagcggcgagcacaaaggcaaggccgctgccagtctcaaggcacgcttgctaaccgccgagctgatcgaccgtaccgagttggtccaggtcgaacagcatgagctgatcacctgcggtatcggctatctgagagatcccaaagacgtcccacggaccgctggcggttcgctcctgtcgtgctgcatcgcagcgctgactggccccatcgacgttcctgttggtgaacgggaataccgctacatcaacaccaccgtcaccagtgcggctgcccaggagctggtacgcctctgcgtcctgcccgtcgaagccaagcagaaggtgctgattgcattcaggctcaacgatatgcaagccagtccgtacattcgtaccaagggcgagagggcaggccaagcggctgcctcgctggagtccaagctcatccatatcggccttatcaagatcgatggtgagcaggttcacccgcaggagtccgaagcccccgtcaccgaaggcgcacctgcgcccgaagaaacggttactgccgaggacgacaacggtggtccacaaaccaccgtccaggtccctgtcgaggagcccgcgcgagtagcttcgttctga

SEQ ID NO: 351649 - DNA, 828 bp, Pseudomonas aeruginosa
atgcaactcgcctctcgtttcgctccccgctcgccaatactgcgcgctgatcatccgctgtccgatgaacagattcgcatagtggcaccttcgatcttcgcggaaaacccgcatgaaagccggtctgagcgatacagctacatccccaccgtctcggttctcgctgaactgcgcggagaaggcttccaacctttcatggtgtgccagacccgcgtgcgccacgaggaccgccgcgaattcaccaagcacctgatccgccttcgccacgccagccagatcaacggcaacgaagcgaatgaaatcatcctcctcaactcgcacgacggcaccagcagttaccagatgatcgccggcatgttcagattcgtctgccacaacggactggtttgcggtaacaccctcgccgatgtccgtgtgcatcacaaaggcaatgtcgccgaacaggtaatcgaaggtgcctacgaggttctacacggcttcgagcaggtgcaggagtctcgcgacgcgatgcgcctcatcaccctggatgagggcgagcaggaagtgttggctcgctctgcactggcgctcaagtacgacacacctaacaaggccacgccagtcaccgaggctcaggtgctgatgccccgacgcttcgacgaccggggcagcgacctgtggtccacgttcaatcgcattcaggaaaacctcgtcaaaggcggtttgagcgggcgcaacgctcatggccgccgccagagtacccggccagttcaaggcatcgaccagaacctgcggctcaaccgcgcactgtggatgctggccgaaggcatgcaacaactgaaggtctga

SEQ ID NO: 351650 - DNA, 669 bp, Pseudomonas aeruginosa
atggcagcctcagcagccctgcagctatctgcatcatccttcgttgttcccggccagctcacgttacgcaccatccacggccgaaatgggccgttcaatgtcggcagcctcatcacacccgttggcaagtttgcagtcaaggacgcggagttggagcagtaccccgaaggcaaatacgacggggaattcgtcatcagctacatctacgcgaaagcctatccctccgggggcggcatccgcatcgaagtccgcgccacgctggatggcatgacactctcgggtatcgacaaactgagcagggccgaagcccgtgctttctccaatcaggaagtggacccgctcgatgaagagttgggcacgcaaccggcgatgccggcagcaaccccgctgccagagcctgcccgcatgcaggcatcgaaggacccactgatcgataccgcgccgtttggcgtggacatgccatccgctgcagtcgccacctccggcggccccgacagcgacgatgccgccttgttcggcctgctgtggccgctggaagagtcggtgaaactcgactcgaccatcgatcgccgcacgctgcgcctgcagatcgcacgtctgggtgtactgggctacacgctcgacttcaagtcacagcaatggaaccagcctgaccaacaggctgcgtaa

SEQ ID NO: 351651 - DNA, 399 bp, Pseudomonas aeruginosa
atgggctggctctattcttcccgctcccgttccgagctgatccaccacctgatccaagcgcaagaccatccgcaaaccagtatccacgtcatcgcgcatgcactgcgcggcaacgtgctctggtccgtcgtcgaagtcaccgcgaaagtcgaaggcgtccacaaggatctcgcccccggcgagtccatgcgttacatccgctgcgacctgctgcaacgcagtggtggccagtggggttacaaggacatgagtgagtccgtccatccgttctactacacctgcccgttgagctacctcgacatggcaccggtgcagtcgcccgaatggcgtgaacacgttcgtgcctaccacgcccagcggcgcggaatcactgcccctgccacgttgctgacggcctga

SEQ ID NO: 351652 - DNA, 657 bp, Pseudomonas aeruginosa
atgcctgcaccttcatcacccacgacgctgtatcgcatcgacgagtgcgccgacctgatggccgacgcctgcgtccgcgacgaacagggaaacctgatctttatctcggtctgggcgcgggataccgctatccagcagttcctggcccggctgaccctgagccgcgacgaggatgggctggatcagttccatctcatcaccgagcaagggggttccattcccgtcttcattggtacggtcgagcgtttggaaaaacgcctgacccgttcctatcgccgcacgctgttcggctcgatggtcaacctctggctgttcgaccggcgctgcatacgaccggacaagagtacggccagcgcactggcgctgctgccgcgctcggtaaccgatccaacgtcacgcctgtggcaactggtcagggacacctgcccactgccgctgctggatcactggcaaatgccggtactggcgctgctgcgcgatcacaacatgctccaggacctgccggtggctctcgggccactgcgcggattacgcctggggttggacgtgccagcacttaccgaagcgctgggcgagttgatccgccatggcgtactcaccgcctatccatcccagccagcggcaaccgccgacctggtcttagaagcagtggcctga

SEQ ID NO: 351653 - DNA, 1110 bp, Pseudomonas aeruginosa
atggctctcatgttccccaggctcgcacggaatttcgccaagaatggctactacccaaccgacgaagccacccttgaaagagcgctcagcgcactgacacccagcgatgggccgatgtgcattctcgatccttgcgccggcgaaggcgtcgccatcgcggaagccgcgcacgccctcaggcaggcgcaggtctccgcgtatgccgtcgaatacgaccatgaacgcgccaaccatgcgcggcggctggtcgatcactgcatccaaggtgatttgatggatgcgttgatttcccgtcagagcttcggcctgttgtggctcaacccgccctacggcgatctcgccagagacgccaacggcaatatgggctacgagggcagaggccgcgccaggctggaaaagttgttctaccagaagaccctgccgctgctgcagtacgacggcatcctcgtcttcatcgtcccgtcctacgtgctggatcaggagttggtcggctggctcacgcgacacttcgccgacctgtgcatctaccgggctgtagatacgcaattcaagcaggttgtcgtgttcggtcgccgagtccgccagcgcgagctggcgagcgacgacgtgaaatccatccgcgcccggctgctacagatcgggcaaggcgaactcgacgcggaagaacttccagccgagtggccgttactcccctatgtcatccccgccgcactgagcgagcccgagcacttctaccgcatcagcatggagccggcgcagttcgccgaggaagtgcagcgcctgcagggcctgtggccgtcattcgagacgcatctcggtgccgcgcagcagtccttgcgcgctccggcgcgtgccctgtcccactggcacctggcgttggccctcgcggctggcgcgatctccggtgtcgtgcaatccaagaatggtcgaatcctggccgtcaagggcgatacccacaagcagaaaagcacctgcacggaataccgcgagcgcgacgacggctccatcgccgaaacacgcattctcacggacaaattcgtgccggtaattcgcgcctgggacctctcccccggttcggccacgctgggccgaatcatcaccatccactga

SEQ ID NO: 351654 - DNA, 321 bp, Pseudomonas aeruginosa
atgtttccacgtttccgcaagcggcccgcgccgccggcacaaccgctgttcgccctcggctcgttgcagttgagcgagaaagtgtactggctggccagcaaaagcctcatcgacccgctgccctacgtccaacgccatctggctggagactggggcgacgtcggcgaggccgagcagcaggcaaacgcagtggctctcgatcaggatgcgcccatacggtctcgctaccagatcacgccacacctgtttctgctcgtgatcaccaacgatgaccatcgcacaaccgtcgttcaactgcccgaggaaagccacctgacctga

SEQ ID NO: 351655 - DNA, 306 bp, Pseudomonas aeruginosa
atggcacccgaacctcccaccggcaaccgccgttccttgctgttcgcaatcggcgcattgatcttcagtcccggcatcgaccgcctcatgcgggaaggccgccttgatcctctgccgtacttccagcgtcacgccagtggcgattggggaaacatcaccgatacgcagtggcaagcgaacaacgccgccctgcaatccggtgatcgactcgaatcttcctatgcggttcaccgtgaactgagcatctgcatcgtcaccgaggcagaccgcagcgcaacccatatcgtgctgacgtccgagcgctga

SEQ ID NO: 351656 - DNA, 2274 bp, Pseudomonas aeruginosa
atgtcccacgatattgaaagcatccccgataccgccgtgcagggagacctgctcgaagcggcggaatctcccctctcgctcagcctgccagacttcgtgtccgagttcggcgacgagctgctcgactctctcaaccgcaccaacccgccggtctacgccggccaggcgcggtcgcatcggcaaatcgtcgtcgccagcctcaagcggcagttgttcgcggcgcaagccgatgtggtccacgccgtcgccgaactgttgatcgagcgtggcgaacgcgccgcgatcgtcaacggcgagatgggctgcggcaagacgacggtgggtattgccaccgccgccgtactcaatgccgaaggctaccgccgcaccctggtgctctcgccgccgcatcttgtctacaagtggcggcgggaaatcctggagacggtggccggtgccaaggtctgggtgctcaacggcccggacacgctggtcaagctgctgaagctgcgcgagcagttgggcgtatcgccacagggtcaggagttcttcgttctggggcgcgtgcgcatgcggctgggttttcattggaagccggtcttcacccggcaccgtactcgtcacggcgacgtgggcgcatgccccgactgcggccaggtcatcaccgatctcgacggcgaaccgatcaacccgatcgaactcgaagccggggaacaccgccgcaagtgcagccattgcgctgtaccgttgtggacgctgattcgtcccagaggcttgtccgccagcgaccagtcttgcgccgtactcaaggcgctgaagcgtattcccaccattggcgaagtcaccgcacagaagctgatgcagaagttcggtgatgcgttccttgcgtcgatgcttggcgacaacatccacgagttcatcaacctgatggatggcaacggcgagctggtcttctcggatcggcaggcccaccggatggaacgcgcgatggcgagtatggagttcggcttcggcgagggcggctaccaaccgtccgagttcatcaagaggcagcttccccagggcacgttcgacctgctcatcgccgacgaggcgcacgagtacaagaacggcggctccgcacagggccaggcgatgggggtgctagcagccaaggcacgcaagacgctgctgctcaccggtacgctgatgggcggctacggcgacgatctttttcacctgctgttccgcgccttgcctgggcggatgatcgaagacggctacaaaccctccaagagcggcagcatgacgtcggcggcgatggcgttcatgcgcgatcacggcgtgctcaaggacatctattccgagagcacgggcacggcgcacaagacagccaagggcagcaagatatcggtgcgcacggtcaaggcaccgggattcggtcccaagggcgtgttgcgctgcgtcttgccgttcacggtatttctcaaactcaaggacatcggcggcaacgtgctgccgccctacgacgaggaattccgcgaggtcaccatggatgaagaacaggcctccacctaccacaacctgtcgcagcgtctgagccaggaactgaaacaagccctggcgaaacgcgacacgaccttgcttggcgtggtcctcaacgtgctgctggcctggccggatacgtgtttccggtcggagaccgtcacgcatccgcgcacgcgcgagctgctggcgttcaccgcctcccagttcaacgagttggaggtgatgcccaaggagcgcgagctgatcgagatctgcaggcaggagaaggcagaaggccgcaagaccctggtctacagcgtctacaccggcacacgcgatacgacgtccaggctcaagctgttgctggagcaggaaggtttcaaggtggcggtactgcgcgcaagcgttgatgcttctcgccgtgaggactggatcgccgagcaactggatcgcggtatcgacgtgctcatcaccaatcccgaacttgtgaaaaccggattggatttgctggagttccccacgattgtcttcatgcagtcgggctacaacgtgtattcgcttcaacaagccgcgcgccgctcctggcgtatcggccagaagctggcggtcaaggtgatctacctgggctacgcgaccacctcgcagatgacctgcctggcgctgatggccagaaagatcatggtgtcgcagagcacctcgggagacgtgcccgaatccgggctcgatgtcctgaatcaggaaggagactcggtagaagtggccttggcacggcagctcgttgcggcctga

SEQ ID NO: 351657 - DNA, 1086 bp, Pseudomonas aeruginosa
atgcacgaaactgggagaatttttgctgttgatcttttttgtggtgccggtggcctcacttatgggcttgaggctgcaggtatttcagtgaagcttggggtcgatatcgacccaaactgcgctcaccctatcgaagctaattctggcgctaaatttttgcaggcagacgtcgcttcgctagaccatattgaggtcggtaaagcattgagtggcgggggctttacacttctagccggttgcgcaccatgccagcctttttctacgtactcacgtgcagctaaacaaaaacatggagaaaaagccggcaatggccgcaacgaggactggcgtctagttgagcactttggcaatcttatccagaaagtacaacctgaccttgtcactatggagaatgttcctccattggctcagcaagatattttcaaggttttcttagataaattggaggggtactggattgactggaaagtcattgagtgccattcaattggccttccccaaacgagaaagcgtttggttctggtagcgtctaaactcggaccaattacaattccagaattcgatttgcctcgaaagacagtacggtcagttataggtgatctacccgcattaattgcaggagagcaagacccaaatgacatgcttcataaggcaagtcgcctcagcggcatcaacttggagcgtattcgatactctcttccaggtggaacttggagggattggcctgagcacctccgcgcttcatgtcacaccaaagagtctggcgctacttacccatcggtttatggacgtatggcatgggactctccagcgccaacgatcacaacacagtgttttggatatggtaatggaaggtttggacatcctaagcaagatcgagctattagtctgcgagaggctgcaatgctccaagggtttccgcgcaattattccttcattccagcaggtgagtccgttagtttctcaaaggtaggcaggctcataggaaacgctgtacccgttacgcttggagctgtcataggtgacttcctcaaacagcacgtattggtatacgagcatgcgagtcgaagattgctgacagagtaa

SEQ ID NO: 351658 - DNA, 714 bp, Pseudomonas aeruginosa
gtgactgccctccgtacagctctttttgagcgcaaggaagacttccttgttcacctaacgttagcccaagctttggatcgacgcctttttgaaagtggctctgtacctattggcgagacttctctgactgtgcgccatttgctgacaattaaatcagggctaattgttcatctatataacatcgtcgaggcagtgatgacgcgcacgatcgaggaagttggggcggcagtccggtcgacacctccctccgagtggtcgagcgatactttaaaggagtggttgcgtctatatgcatccactggaattgatggtaacgaggagacaaggcttgatgttgttcataaagctgcactcaagctgttgactatagagcccattcaggatttgaaatttaaaaagccttctggaacgtggtcagacaaagtgatttttactttttcgaaacgcctaaaggtaaattttagattaacacctgagatcgcacgtaaaattaaaccgtcagagaaatacggggaccaaactcctttggagtttctcgcagacagaagaaatgctatcgcgcatggacggcgttcatttgaaagtggcgcagtagatttgactttgctagacatccaagatcttgccagcgtaactcttgagtacatggagttcgcagtggatgcatttcaaaatttcgtaaatgatagacaatttgtggcgactgcgatctga

SEQ ID NO: 351659 - DNA, 1101 bp, Pseudomonas aeruginosa
atggcaaagaaaagcagaagtgccgcgccgagtgaagaagcgaagcgagatgctgaagctgccgtctcttctgtagcacgccaagtaaaatttaacgtcgctgaataccccgtctcaatgtacgttagcagatttagtaatgatattgatgatcgttattttgtaccatcataccaacgcaatctttcttggaatgatgagcagaagtctcagtttatagaatcactgattattggcttgcctattccatttatgtttttctatcaaacggctgatggcagaatggaaatagttgatggttcgcaacgaatgagagcaatgagatcctttcttaaagaagggttacggttgcgcgatttggttttggtgccggagctgaacggattttcttttgctgaccttcctagtgatcgaattaataagctggaagatatcacaattcggacgattattctcgatactgacaccgacccttccacgcgtgcagagatgttcgctcgtataaatcgcatgggaacgactgcgaacgaagcagaaattcgtcgtggatcattgccgggccctgtaactgaaatgattgccgagctagcagaagacccacgattcatggctatgaccccacttaccacaaaggcaattagctcgagagaacgtgaagagctagccactcgcttctttgcgtatctgaataaaaacgatacgcaagatggtcgcttccctggatatcgagatcgcccaaagaaatttctttacgattatctaaaggatgcaaatcaagcggctgtgcaaagtcccgacatcgtccaggaaatgagcgatgaattcttccgaatgttgacctttgttcaaagcgcattccctctgggtttcaggaaatccggaaccgcaaatactgtgcctcgtgttaggtttgaggccatagctgtaggctctgccctcgcactaagaacaaatccagatttgaaagttaactcaaaagttatcgctgagcgaatggggcgagttgaatttgacggtgtggttgtttcggatggtgcaaacgtacgctcaaaacttgaaggaagaatagatcttgttgtgcgtattttggaggaagtgtga

SEQ ID NO: 351660 - DNA, 522 bp, Pseudomonas aeruginosa
atgcacgccatcccttcctactgcagttgcctgctgctggccgcgctggcggccggctgcgcaacacctccaccgccctctcccgctccggatgaggtaactgctccggcccctgagtacgtcccggtagtccgctacagtcgctacacccttgtcgagctggccccgacagccgcccagcaggatctgctgttgcaggtcgtcgacgtgtccattcccgacaccctcaacgccaacgtcgccgacgcgctgcgccatgtgttgcaacgctccggctaccagctctgcaacggacgtgaaaccgatgcgctgagcagcctcccgctaccggcggcgcactaccacctcggtccgctgcaactgcgcgacgccctgctgaccctggccgggccggcgcggacgctacacgtcgaccacagcgcacgccgcgtctgcttcgcccagcccctcgacacacctgccgaagcgccgcctgccactgcggatacagctcccggtgccgttggggagccacagccatga

SEQ ID NO: 351661 - DNA, 654 bp, Pseudomonas aeruginosa
atgatgacgatgccaggcagtaggcaacaccgtcacggcacgctgatgcgcgccgccaccatcacctggctgctgctcatcagcgccgccgtcgtgatcgatcacgtcgcgctgtcgggtctggcggcacggatcgaaaccagcgcacctggcttgcaggtcgccgtgctggaaaagcgtctggccgaactggttcagcagatcgagcaagcccagcagcaaccggacgccctgccccaggcacgctacgaaattgagcaccaggcgctgaaacagcagctgaacacgattgagcaggcactcggcagccgcccgacagcggacaacctgctgccgctgcaagcccgcatcgagcagctggaaatgcggctttccacccctcgcccgacgccacctaccacgccccgtccacgagtctctgcccccgccaaaccaaagtcccttgaaccgccattccgggtaatcggtgtcgagctgcgtgctggcgagcagttcctcttgactctgccagcagcctcgggcgcgctctcgcaggttcacctgctgtgccccggcgaaacggaagccggctggcacctcgaaaccatcgaagggaacgccgccgtattccgccgcggcgaagacacccgtcgcctgcccgttcccacgcagtag

SEQ ID NO: 351662 - DNA, 717 bp, Pseudomonas aeruginosa
atgaggccgcgccatatcgtccccgcactgatcgtcctgctgaccagcagccttgcccagggcgcagagccactcaccgccggcaacattcccagccgcgagcggccgatgtccaccgaacgcgcagacgagcagcacgctcgggactgggaactgagtaccgaggaatgggtgcgctaccgggcgctgatgcaagggccgctgggtatctattcgcccaacctcgatccgctcaccgcactgggcatcgaagcacgttccgaccaggaacggcagcgctacgccgagctgcaggtcgaggccgaagcgcaccgcgtcgagaagctgctcgcgtaccagcgggcttatgacgacgcctggcagcggctccacgccaatatgccgcgcgtgattctgcccgatgccggcccggcgttctcgccggcatcgaacggacgagttgccatattcgtcaaggacgcctgccctccttgcgatcagaccacgctgcggctgcaggcaaccgccatggggttcgatatctacgtcgtcgacagccacgccgacgacacacgcatccgcgcctgggcgcagcgcatcggcatcgatccggccaaggtgcgcagtggccagatcactctcaaccacgattcgggacgctggcaatcgctgaacctgcagggcgacctgccggcagtcgtacaccaggtcggcggccagtggcagcggcagccgtaa

SEQ ID NO: 351663 - DNA, 564 bp, Pseudomonas aeruginosa
atgtcgcgccgcaccgtactcgtgctactggcctgcgtgctgagcggtactgctcaggcacgggaaatcccaccaccggcctatcaggttgccgcacagcgtgccggcattccctcgaccgtgctgtacgccatcgccttgcaagagagcggcatccgcttgcgtggccgtctggtgccatggccgtggacgctcaacgtcgctggccagccgcagcgttacgccacccgtgtcgaggcttgcaccgggctgcgccaggcactcaggcgcacacccgccacgcgcatcgacgccggcctcggccaggtcaacctcggttaccacacgcagcgctatgcacagccctgcgacctgctcgatccctaccgcaacctcgccatcgccgccgagatcctgcgcgagcagcacaccctgggcgatgactggctgctcgccatcggccgttaccaccgccccgccggcggcgctcctgccgcgcgctaccgccacagcgtcggccaacacctggcccgtgtgctgggcgaaccacgagtggaaatcgcctcccgaaggaacctgccatga

SEQ ID NO: 351664 - DNA, 528 bp, Pseudomonas aeruginosa
atgaaatccctacctaccctcgccgcctgcctctttctgtcgtcgctgccgatgatcgcccaggccgacatgctgaccgtcatcgcagaccatggcggtacgtcagccctgccgtactacgaagccttgaagctgcagtcgcgcgccagtgtgacatcgccacgcatcgagattccgcgtcagccagccaaagcgttcagcgaagccgacatgctgccagtacgttcgatgcgcctgtcgcccggcaatgtggcgcgccgggtgatcgaagcgccggggctgacgccgttctttctcgtcggcgacgatgaacgttcgcacgcctggttgcgccagcgggcaccacgcctgcgggagctcaactcggtaggactggtagtcaacgtcgactcggccagcgcattggccgcgctgcgtgcgctggtaccggaactgtcgctgtcaccggttgcgggcgacgacctcgccgagcgcctgggcttgcatcactacccggtgctgatcacagcaaccggcctcgaacagtga

SEQ ID NO: 351665 - DNA, 2172 bp, Pseudomonas aeruginosa
atggcccagccccacgcgatcgaggtgctgttgcggccagccgtggagctgtacaccgtggcggtctgcgccgccgccgcgctgctgtccctggtggcgccctgggcgctcgcgctgagcccatcgattggcctgggcagcgccctggccttcctcgccttcggtgcgatccgcctgcgtgatgcgctggtcatcctgcgctaccggcgcaacatccgccgcctgcctcggtacgtgatgaccagccgtgatgtgcctgtcagccagcaacggctgttcatcggccgaggctttcgctgggagcaacgacacacccaccgcctgacgcagacgttcaggccggaattccgccgctatgtcgagccaacacctgcctaccagttggcgcgccacctggaggagcggctggagttcgcaccgttcccactgtcgaagctggccaaacttaccgcctgggacgttgcgatcaacccggttcgcccgctgccaccggtcggcggcctgccgcggttgcacggcatcgagccgaacgaagtcgatgtcagcctgccgctgggcgaacgcgtcgggcactcgctggtgctaggtgcgacacgggtgggcaagacgcgcttggccgaactgttcgtgacccaggacatccggcggcgtaacaccgccggagagcacgaggtggtgatcgtgtttgatccgaaaggcgacgccgacctcctgaagcggatgtacgtcgaggccaaacgtgcgggccgcgaaaaagagttctacgtttttcatctgggctatccagacatcagtgcgcgctacaacgcagtaggaaggttcggacggatcagcgaagtggccacgcgcatcgccgggcaactctcgggcgaaggcaatagcgccgctttccgtgagttcgcctggcggttcgtcaacatcatcgcccgtgcactcgtcgagctgggccagcgcccggactacctgctgattcagcggcatgtcgtcaacatcgacgcgctgttcatcgaatacgccgcccattatttcgcccgcaccgagccgaaagcgtgggaggtcatcgtccagttggaaggccggctgaacgacaagaacatcccccgccacatggtgggccgggaaaagcgcgtggtcgcgctggagcaatacctctcacaggtacgcacctacgacccggtactcgacggcctcagatctgccgtgcgctatgaccggacgtatttcgacaagatcgtcgccagccttttgccgttgctggagaagctcaccaccggcaaaaccgcacagctgctcgccccgaactactccgaccttaacgatcccaggcccattttcgactggatgcagatcgtccgcaaacgcgcggtagtctatgtcggcctcgatgccctgtcggatgcggaagtggcagccgccgtcggcaactcgatgtttgcggacctggtatcggtcgccggccatatctacaagttcggcatcgacgatgggctgcccggcgcgatggctggagcaagagtcccgatcaatgtccatgctgacgagttcaacgagttaatgggcgacgaattcgtgcccctcgtcaacaaaggcgggggggccgggctccaagtcacggcgtacacccagacgctttcggacatcgaagcccgcatcggcaaccgcgcgaaagccggtcaagtcatcgggaacttcaataatctgttcatgctgagggtgcgagagaccgccaccgccgagctgctcacccggcaacttcccaaagtggacgtctacaccacgacgctggtcagcggtgccaccgacagctccgatgttcgggggccaacagacttcacctccaacgcgcaggatcgcatcagcaccgcaagcgtgccgatgatcgaacccgcacacgtggttggtttgccgaaaggccaggcattcgccttgttgcaaggcggccagctctggaaaatccgcatgccgctgcccgcaccggacccggacgaaatcatgccggaagacctgcagcagctcgcgggctacatgcgccagcactatgccgaggccggcgactggtgggaaaaccagggcctgccaggcctgcaggatcagccgctgcccgatgacctgcttgatggcttccgccacctcgcggccaccgagacaagcaacgtcgaggcacggtcatga

SEQ ID NO: 351666 - DNA, 750 bp, Pseudomonas aeruginosa
atgagggacccagccgcaaccacccaacgcgaacaaacccgccagcaaggcttgctcgccagcatcgtcaccctgccgctgcgcatgctcggtgtgctgatcggctcgctactgctgtcgatcatcatcgagtgcgtcggcatgcacctgttctggcccgagcagggctggcgtcacgcccagggcatgctcgactacgaactgaaccacctttccaaccacttcacccgcagcgcggtggtacaggagccaggccgtacggcgcaccagcttgtcgagggcgcttaccaatggatcttcgtgaaaaccggcctgctcgactggatgagtcaggcatcagcgcgctcccgtgcgcccagccatggcgatgcccgagacatccgtttctacatcagccaggtttacgtctggagcgagaactacctgatcgccgccgcattcacgacgctgacgttcatggttcggttgctggttctggtgctgacattgccgctgtttctactggccgctttcgtcggtatggtcgatggcctggtacggcgcgatattcgcaagttcggcgcgggccgagagtcggggttcatctaccaccgcgctaaagccagcctgataccgctggcggtactgccatggatcatctacctcaccctgccgatcagcgtgcatccgctgctggtactactgccgagcgcggcgctgctcggcctggcggtgaacatcaccgcagccagcttcaagaaatacttgtga

SEQ ID NO: 351667 - DNA, 204 bp, Pseudomonas aeruginosa
atgttgatcctcactcgccgcgttggcgaaaccctctgcatcggcgatgaaatcaccgtgacagtcctgggcgtccagggtaaccaaatccgcctgggcatcaatgcacccaagcatgtcgaggttcaccgcgaagaaattcacgcacggatacaggccgagcgggcaaaacgtccaaccgagcaaaaagccgaaactgtgtaa

SEQ ID NO: 351668 - DNA, 1044 bp, Pseudomonas aeruginosa
atgactgtgaatgggaatgagggcaggcgatcgggttggctggggcgggtatttcgccaacgcctggcggagcacgaagcgatacgccgggagcgtttcgagaatgtcatggcgcgggccagggcggtggcggaggtcgacccgcttggactttccaccttggtccgcctgatctccgcaccgttgcaggcacgagccacgacgtcgctggtattccagcctgtgcatggcgcgcgtagcacctacgatctgtccgacttcttcggcactctgctcgcgcgggtgacagcggaaggggggacggctgaccaggtgagcgtccatttgacggaggcacgttatagccttcggctggggcgtgatccgatcctggccgtgccctggtcagaatccagtttgacgaatgccattgccaacattgggcattcgcgctgcatgggcgagtggcgcgcggacttcaaccacaaggtagaactgctactgccattcgggctaaccctggtgcatggcggcaaccattcgttggcggctggaatcaccaatgccgagggtgcggtggtggcggagacggtgactgatcttgcaccgctgtacggccatgtgcgctatgacggcgtgagtatgatcaggatgcacgatggctttaatttgtggacgccggttgatgaagagctcggcatcctgttcgagatcgggcgattgatgctggagcacggggtacgctatgacgcgcaagtggccgccgataatgagagcaaccgtgatgaaagcgacgagagttttccgatctgctaccgggtgctcgtcgatggccaggacaccggctattcgctttccggtagcggtgccacacgggcgctgttgcaagctgaaatcgagccaggcagtgccgaggcgcgctctgtgattgtcgagggtgcggcattcacgcaccgtaaccgggccggcgaagacaggcgggtggtgcttgagcactatggacgcaggccccttgtcgatgatctggagcgtgtcgctcacctttcgatatacggaaaggattga

SEQ ID NO: 351669 - DNA, 372 bp, Pseudomonas aeruginosa
atgtcgaagcaacttctccctccagccgacaggcatcacgcacccggtctgatcctggcgctactgctcggcctgtgtgttgccggccacaccaacgccgacgacgccacccccgaacacgcccggctcgccgccgcgctgcgccagctcgatagcatcgaacggctggttgcccagcaagccacgcagcagctcgacgcacacgcccgctatcacttcgactacgcccgcctgagcgccgacctcgaccgcgtgcgcaccggcattcgcgactacctgactccaacacgcgcacaaccgcgcgaccccgccgtgctgcttggcgactaccgccagcccgccaccgccctcgaaccgcaggccgcgccatga

SEQ ID NO: 351670 - DNA, 234 bp, Pseudomonas aeruginosa
atgaacgccgcgcaaaccgccgcgttccaggccaacagcggcatcaccccttccgacatggcgaccgtgctgctcggtgcggtgttcgccgtgttgctcatgtggggcgtgtgggcgatgcgcagcgcctacgttggctgggcggagaaacagctttcccaacgtcagttcctggtcgtcgtggtgcgcttcgtcgtgctgtacctggtgctgaccttctttctgctctcgtaa

SEQ ID NO: 351671 - DNA, 396 bp, Pseudomonas aeruginosa
atggctgaagacatccgcccggatgggaccgtggcgtttctgccccaccgtctcaaccgtcatcccgtggtcgtgcgcgggctgacggcaaatgaactgtgggtctgcgcgggctcgtcgggcctgatcggcctcgtgatcggcattgcgctggccatcatgttcgcgacgattgccatcgtccccacgaccatcctgctggcggtcagcgctggcattttcatcggtggcggtacgctgcgccgactcaagcgcggcagacccgaaacctggctgtaccggcaattgcagtggtggatcgccgtccacatgccgcagctcgcaccattcattgatggccacaggctggtgattcgctccggttactggagcacacgccggagcaacgcaccgtga

SEQ ID NO: 351672 - DNA, 675 bp, Pseudomonas aeruginosa
gtgagcagagtcaagaatgaagtgctgcggctcgacgcccatatcaagaccctgcgcatcggtgccagcatgctggccgtactggcactggtcatgggcgtcggctggtggagcgcgccgcgcgacctgactatccatgtaccgcctgacctgcgctcaggcagtacacgccaatggtgggacgtgccgccggaatcggtctatgcgttcacgttctatgtctggcagcaactgcagcgctggcccaccaatggcgacgacgactacccgcgcaacctgcacgcgctgtcgccctacctcacacctgcctgtcaggcgttcctgcaacaggactacgagtaccgccgcaatgccggcgagctgcggcggcgcgtgcgcggcatctacgagattcccggtcgtggctacggcgacaaccccacgctgcgtgtgcgcaccgtctccaatcgcgagtgggtggtaagcctcgacgtcacggcagacgagtactacgcctccgaacaagtcaaacgtgccctggtgcgctaccccctcaaagtcctgcgcctcgacgtcgacccgcaacgcaacccgttcgggctcgccatcgactgctacgaaggtgcgccacagcgcattgccccccctgtcgatccgtcggccacgcccgcccactccccggaaaacatgccatga

SEQ ID NO: 351673 - DNA, 870 bp, Pseudomonas aeruginosa
atgaaccgcctcttgcctctggctctcgcgacgttcgcgctggcctcgttcagcgccgcccacgccaccgaactcctgcgctgggaaaagttgccactggccgtgccgctggtggtcgaccaggaacgcatcgtcttcgtcgagcgcaatgtccgcgtcggcgtacccgcgtcggtcggtagccgcctgcgcgtgcagagcgccgccggggccatatacctgctggcgagtgagccgatcgaaccgacccggctgcaattgcaggacgccgataacggcaccgtgatattgatcgacatcgccgcagagccctcccaggacggtcagccgccgctggaaccagtacgtatcatcgaggcagcagcatccgcgactcaaaccgatgcagatgacggcagtaccgccgctaccccgcccgtacgtgaaacaccgcagcccgtcatcctgacccgctacgcggcgcagaatctctacgcaccgttgcgtaccgtcgaacccgtgccgggcgtcacgcgcgccaccctgcgccgcgacctgccgctggacagcctgctgccgacgctgccggtacaagcccaggcactcacggcatggcgtctggacgacctgtgggtcagcgccgtgcgcctgcgcaacagcgccgcacactggctcgacctggacccacgcgcgctgcaaggccacttcctcaccgcgactttccagcattcgacgctggggccgagcggcacgccggacgacaccaccgtcgtctacctggtcacccgtggacacgggctggcgcaggccctgctgccggccatcgcccctatcgatgccgccctcaacctgcccgcgccgcaacacgacggaggccgcgatgcacagtaa

SEQ ID NO: 351674 - DNA, 1419 bp, Pseudomonas aeruginosa
atgcacagtaatggcctgctcaagtggctgatgatccccctagcattgctgctggtgttcatcggcatcaagttgttctccagcgacgacgcgaccccggtagcggaagaagcagttcggctcaccgccgatgaagccaaagcgcttagcatcgaaggcgacaccccacgcgacacagtggcgacgctggtcgcccaagtccgccaactgcgcaccgagttgcagactgcactgagcgataacaaaactcagcgcgacgagaaccaacggttgcgccaacgcgaaggcaccatcgaccgccgcatccagaacgcgctcgaaagcgaacgcgaccagttgcatcaggatcggcagcatgtcgccagcgagcgtcagcaaacccagggcctgctgcaacaactgcaacagcggctcgacggcatcggcaaggataaccccgccgatctaccggtcggcctcggccttgagccgggcgacggcctggctggcgacaccctgcgctgggtcgagccagaagaccgccgcgacgacggcaagcagcgcaacgccggcaatgccaacagcttcagcttcccaaccagcttcgcaccggcgcagaagaccctcgaaaccaccgccagctctgccgtcgacgccagccgccgcgcggcgggcgtaccgcagacctcagccgtctacaccgtgccgaccaactcgaccctgatgggctcgatctccatgacagcactgattggccgcgtcccgatcgacggaaccgtcaacgatccgtaccccttcaaaatcctgatcgggcgcgacaacctcaccgcaaacggcatcgatattcccgacgtggccggtgcggttgtcagcggcacggcttcaggcgactggaccctctcctgcgtgcgcgggcagatccgttcggtcacgttcgtattcgaggacggcaccatccgcaccatccccaaagacgacgagcgcggcagcaaccgccaacaaaacagcagcaacaacacccaggacggcatgggctggatcagcgacccgcacggtatcccctgcgtcagtggccaacgccgcagcaacgctcaacagtacctgggcacgcaggccctgatcaccgcagccggcgcgggcgtcgcttcgttgatcgactccgacagcggccaggtctcctacatgagcaacgacggctccatcggcacggtcggcatcggcgcgaacgaagccatgggccgcatcctcgctggcggcgtgcaggacatgtctgcctgggtcaacaagctctacggccaggcgttcgcagcggtgtacgtcaaacccggtgccaaggtggccgtgcatctcgaagaacccctgaccatcgactacgacccgaaaggtcgccgcgtcgatcaccgccttggaggactgccccatgcgcaagacctggactga

SEQ ID NO: 351675 - DNA, 420 bp, Pseudomonas aeruginosa
atgcgcaagacctggactgacagcctggcactgctggccatcgtgctcacactcggcggctgcacgaccagtaaggaagaactgctgccgcacgacgacagcaccatgctcgatatctggaacgtcgagaccggcggcggcactgctcggcaactgctcgatgcacgccaggcgttgcgtcgaccactgaccgatgccgatgtacaggccgcgccaggcatacaggcccgctacacgcgcacggcgcagaacgaaatctaccggcagttccaccggctgcccaatcctgacttgctgatgtatgtgttcccgcacctggccggcagcgaccctgttccggtgcctggctacacaacgttgtttcccctgtaccagcgtgtgcagtacgccctgcctggcgaacggctggaggactactga

SEQ ID NO: 351676 - DNA, 2856 bp, Pseudomonas aeruginosa
atggcctggttcctgctcaagcgccggccccaagccgcggaacccgcgccacctgcggacgcctgggcgcggcacgttaccgagttgcacgcccacggcattgtcgaacccggcaccgcgcgcagctcgcgtcggccagccacccaggccgacgagcaggcactctacgatgccgccccctcgttcacagacctgctgccatgggccgagtacctgccccagtcgcaaagcatgctgctcgatgacggcacctcggtggcggccttctacgagctgcttccagtcggcacggaaggacgcgaacctgcctggctgctgcagatccgcgacaccctggaaaacgtgctacaggatgccttcgacgaactagaggacaacccctgggtcgtgcagctctatgcccaggacgacaccaactgggatcgctatctcgacgagctgcgccactacgtccagccccgcgcccagggcagcgccttcaccgagttctacctgcgcttcttcggccaccatctgcaggccattgccaagccgggcgggctgttcgaggacaacaccgtcacccgcctgccgtggcgcgggcagacccggcgcacgcggctggtcgtctaccgccgtgtcggccatgcgccgcagcgccgtgggcaatcgcctgagcaggcgctcaaccgggtctgcgaccgtctcgtcggcggcctggcccatgctggtgtgcgcacccggcgtcttggcgcggcggaaatccatgcctggttgttacgctggttcaacccccatccgacccagctcggcaacaccgccgcagaccgggaacgcttctatgccctgacccgctacccggatgaacaggagcacggcgaaatcgagctggccagcggcagcgatttcgcgcaacggctgttcttcggccagccgcgctcggatgtcgccctgggccagtggtatttcgatggcatgccgcaccgcgccatcgccgtcgaccgcctgcgcagcccgcccacaacaggccacgtcaccggcgaaacccgccgtggcgacgcgatcaacgcgctgttcgaccagttgccggaagacaccatccagtgcctgaccctggtcatcaccccgcaggatgtgctcgaagcgcacctcaaccaccttggccgcaaggccgtcggcgacaccttgtcctcggaacaggcccgtgccgatgtgcagcaggcccgcagcctgatcggcagtgcccacaagctgtaccgcagcgcgctcactttttacctgagtggccgcgacgaggccgagctgaacgcacgcggactgcaactcggcaacgtgctgctcggtgccggattgcagccggttcgcgaagaagatgaggtcgcaccactcaacacctatctgcgctggcttccctgcgtctacgacccggcgaaagacaaacgccagtggtacacccaactgatgttcgcccagcacgccgccaacctggccccgctgtgggggcgcagccaaggcaccggccacccgggcatcaccttgttcaatcgcggtggagggccgatcaccttcgatccgctcaaccgcctcgaccggcaaatgaacgcccatttgtttctcgctggcccaacaggctcgggtaagagcgcgacgcttaacaacctgttgaatcaagtcaccgccatctaccggccaaggctgttcatcgtcgaggccggcaactcattcgggctgtacggcgacttcgccgcgcggctgggcctcaccgtgcatcgtgtgaagctcgcaccgggcgcaggcgtcagtctcgccccgttcgccgatgcgcaccgcttggtggaaacccccagccaggtacagacactcgacgccgatgcactggacgaagacgacgccgctaccggtggcgacgagcagcgcgacgtgctcggcgaactggagatcacctcgcgcctgatgatcacaggcggcgaagacaaggaagaggcacgcatgacccgcgccgatcgcagcctgatccgccagtgcatcctcgacgcggcgcagcgctgcgtggatcagcagcgcacggtgctcacccgcgacgtgcgtgaggcgctacgcgaacgtggccgcgacagcacgctgccggagatccggcgcgtccggctgctggaaatggccgatgccatggacatgttctgccaaggcgcagatggcgagatgttcgaccgccccggcacaccctggccagaagccgacatcaccatcgtcgacctcgccacctatgcccgcgagggctacaacgcgcagctctccatcgcctatatctctctgatcaacaccgtcaacaacatcgccgaacgcgaccagtttctcggtcgtccgatcatcaacgtcaccgatgaaggccatatcatcaccaagaacccgctgctgtctccttacgtcgtaaagctgacgaaaatgtggagaaaattaggcgcgtggttctggctggcgacacagaacctcgacgacctgcccaaagccgcagaacccatgctcaacatgatggagtggtggttgtgcttgggtatgccaccggacgaggtggagaagatcgccaagttccgcgaactcaccccggcgcagaaaaccctgatgctctcagccaggaaggagagcggaaaattctcggaaggcgtgattctgtcgcgtagcatggaactactgtttcgcgcggtgccaccgagcctctatctcgcgctcgcccaaaccgaaccggaggaaaaggccgagcgctaccaactcatgcagcagcatggcatcagcgaactcgacgccgcgctcaagatcgccgagaacatcgaccgggcgcgcggcatcgacccactgccgatggactggaccatccactga

SEQ ID NO: 351677 - DNA, 363 bp, Pseudomonas aeruginosa
atgaacaaggccctcaactctggcaaaatccacccactccatcgaagccgaattgctgcaatgcctttgacctacgaggtcgtacacctattcagctcaccgcagggccacctggtcgaggtcaagcacctcgaccgacaggccgataccgcccacgaatggctctgggtcaccgagcagtccgttaccacgctgcgcccccggcacggcgacggcggaacgttccgcgaagcacacctacagatcgatggtcagcgtgccgagctggcctggcccaatggcgaacagctcgccctcaccgcgagcccgatgcaggcgctgcccaccctgcaacaccaactcatccacaaccatctgagttga

SEQ ID NO: 351678 - DNA, 501 bp, Pseudomonas aeruginosa
atgctcacatccctggcccacatcgactcccgggcaaaaccctgcccgccatcagtcctcgaacacgagaaccacatcatcgcgcaagccatcgagttgctggagcgccggctattcgccaatggcccccatctgttgaacccggaggctgtcagtgactatctgcgcctgaaactgatgccggaacccagcgaagtgttcgtcgccgtattcctgtcttcaaagcatcaggtcatcgcctgtgaaacgctgttcaggggatccattgattcagctcaagtccatccccgcgtagttgttcagcaggcccttgcctacaacgccgccgccctgatcgtcgcgcaccaacacccgtccggctgctccgccccctcatccgcggatgaacgactgacccagcgcctgaaaagcgcgctggactgcgtggacgtgcggttgctggatcacttcatcgttggcctgggcgagccgttctcgttcgcctcgaatggcttgctgtag

SEQ ID NO: 351679 - DNA, 438 bp, Pseudomonas aeruginosa
atgccagcgccgcagccttacctgccctcactgcgcaagtatccacttgccacagcgctttgcgccgcgctgctcggcccactgacgcaggccgacgagattatcgtcgtcaccgatagccagcacccggtacacgccaccagcgacgttcgacttatcgagctggatcagccgactcgcatcaaggccgagctaggtgcccatctacctgccgacccagcgcgcggtgccgccctcgtgcagcggcgtctgaaagacggcggcagcacactgcaggcacgtcttggtacggcttaccaaggcgtggtggatgcctggagtttcggcgtcaccacgattcctgcggtgatcgtggatcgacactatgtggtttatggcgagccggacgtcgccaaggcggttgcgctcatcgaagcgcatcggaggacacagccatga

SEQ ID NO: 351680 - DNA, 936 bp, Pseudomonas aeruginosa
atgatgtgttctcaccgcctgcgcgccggcatcgccaccattttgctgacgacgggaacgccgtcgttcgcgctcgacacctcgaccatcacctcctcgacgctctcgcctgactgcttggaataccgggtggtcggaatctgtttctggctgttctgcacgaatttcggttgctccgtggagacctcggtcaaggtcaggcactacgtgcccgacgcggttgtgtccagctactcgaacactggcgcgaatccgtgggtggacgtgcagtcgatgagccaacccaacgccacggcccaagccggcggcgacggtacgacgaaccacgacaacgagaacaacctagcgaagttcaagaacggcgacgtgatcggacatcccggcggctatgtgttcagccagttcacctccagcttcggctacagctgcgaaggggctggcaccgcgttcatgccttacctgttgagcaccctcgacaccctcgcgtggcgctacaacatccccgagatggtgtacccggaagcgctgattcccggcgaacgcgagatcggcactcgcaccgaccgcaatctctggggcaacgtctatccacgcggcggcttcctgcaccagaacgacgactacatgaccggtgccgtggtggcccagcgcgccggggatatcgtcacccgcagcggccagattcacgtctaccagcccctgctcgctgatgccgaggacggctactggcccgccggcgagttggtcgagaccgatgcgcagacgggcaagtggcaggagctgacgccgacgctctcccgcacctgcgcggtcttcccccacaccaacagccgtatacaggcgcagcagggcgattacgcctgggcactgtggcggccctacagctgctgtgaacgcgaaggccaggtgtttcttggcagcgtcgacttctactga

SEQ ID NO: 351681 - DNA, 1398 bp, Pseudomonas aeruginosa
atgatgacccattgcatgccctctccctccgaaacgctgcgctccgtcctgctgactgctgtcctggcgctgatctgtgccagtgcatccgcccagaccagcgtcaaccagtacggcgtgcaacaccagggctccgtgatcggtgacgacgtgctgtattcgatcggcggcggtcgcgccgtatcgatgacgcccgcctccaacatgcgctccattggcgttggcgtcggctggaacagcaacctgatctgcggcgacatgtcgatctccaccaccatccagaaccaactcaacggcatcaccaatggtttccagacgatcatgtcgaacgtgatccagaacgccacggccgcagtggcgtcgctgcctgcgttgatcatccagcgcgccgatccggggctgtataacctgctgactaacggcatcctgcaggcgcggatcgacttcgaccgttccaagctgacctgtcgcgccatggcggagaagatggccgacgtagccggcggtcaagttggatggagccagctcgccgatggcatggtgctcacacaagccgtcgccagtaccgatgccgtatcggccatcgagcagaccgaagcgagccgcggcaacgaaggggtgacctgggtcggtggcgaaaacgcgggaggttcggggcaacgtccgattcgcgtcatcagtgacgtgactcgtgcgggctataacctggtcaacgggcgcgatgtcgacgataccagctcgatcaatccgaacggttgcggcggcaacctgacctgcgagacctggagctcgccagccgcagcttccgcctgggcggtgcgggtgctcggcgagcaggaacagcgcacctgcgaagcctgcacaaaaaccgtgaccacgcctggcgtcggcttaacgccgctcattcaagaagagtacgaaaccaagctggaagccctgcaggagctgatcaccggcagccgtcccctgagcctcgacaacctgcaggccgccggcagcgcctctctgcccatcacgcgcggcgtgatcgaagcgctacgcgatgagcccgatcaagacattctggcgcgacgattggcttcggaaatcgctttgtccagcgtactggagaaagccttgctgctgcagcgcacgctgctgaccggtcgcaaggaaccgaacatttcagccaacgagctggcgcagaaagcagtgacccatgagagcgacctgctcgaccgcgagatccacaacctgaaaaccgagctggagctgcggcgcgaactcgcgagcaattcgcccaccgccatcatccagcgtcacagcgcacgcgccgccgggtctcgctctatctacgagggcgacccgactcccgaccggctcgatcagttgcagcgcccaccgaacagcactccctga

SEQ ID NO: 351682 - DNA, 708 bp, Pseudomonas aeruginosa
atgcctaggaagaaggctgcgccagcggcgggtagtccgccgccggccgctgatagctacctgaccccagaaccaccggcaacgctccatatcacccctgtcaccctctctcgcaagaaggttctgcaccgggtgcattcggaggactacgagggggacgagttcaaccctggtctcaagggcaacgcacgcttcagccccattcgcaatgctgaaggtgatcctattccgaccctctatgcggcggataccttcgaggccgccctgatggagtcggtgtttcatgacgttccccatgcgccgggtttcaagcagctcgacaagcgcaagctggaagggcaggagcattcgacggtgcagaccacgcaggacctgaaacttgccgacctcagcagcaagcctctgcgcaagctgggggtgacacgcaagcaactgatcgacaccgagaaggaccaatacacgaagacacgcgagtgggcagaagccattcatgcacaggactcggatattcagggtttgtactgggtttcgcgtcaagacgattctgcccgagcggtgatgctgttcggcgaccggattcccgagggtgtgctgcagcaggtgggggatgcacgcagcctgttgaaagacgaacaggtctatggggaagttctggacctggccgaggtcatcggtgtcaacattgtgcccggcaaaggtatcaaatag

SEQ ID NO: 351683 - DNA, 672 bp, Pseudomonas aeruginosa
atgagcgccgtacatgattcgcccgctttcgccgccttggtcggaacgcctcgggaagtgcgcagccggctcgacaaatccaaggcccggcaggtgatagtactgccggtggacgatgcggattcagagcatgctgacctgctgctcaagacgttgagcactgtcgccgccttcatcacagtgaagctgcgggagcaggatgagcaggtcttcaaggccctggtcaatgccgtgctgcccaaggcaccaccctcgccgaacctggtcagggaggcgacgatggctggtcgtgcgcgcaaggccgtgctggaaggcgcagactggctgaccgccgcccagattgcggaggtcgctggcctgagcgcgagcaacccgagcacgcagcccaacaagtggaagcgccaggggcagatcttcgccgtccaccacaatggcgtcgactacttccctggttatgccctggatcccgaggccgattaccggccgcgcaaatccctcaagcccatccttgaggtctttgctgacgaaaaggacggctggggcctggcgtcctggttcttggccgccaacagcttcctcggcgggcgcacgccgcaggatgtgctgacgaccgagcctgagcgggtactggccgcagctagagacgagatggaggaagtggcccatgcctag

SEQ ID NO: 351684 - DNA, 333 bp, Pseudomonas aeruginosa
atgagcaggaccgtgctccatcggcacgggcgacgtctaggcctagcgctgctgtggacgctcctgctgctggttgtcacgatcgctgccaatgtcatcggcatccacctggccggcggcattgagggctggcagcagtggctgacggcacacaccaaccattttctggcctggcggttgttgctctatgccggcacagcctggggctggctctgggtgcgccgccgtgtgctggcacgcgagcccggcacgcggcagcgcctgctacgggccgaaattgctgccgtcgtcgcggtaatggcactggaaatcagccagatgactggagactga

SEQ ID NO: 351685 - DNA, 1518 bp, Pseudomonas aeruginosa
atgagcctctacacgaccgactacttggaattctatctgactctggtgagttggatcgtccacaacggcatttgggctgtcttggtggcaagcggcgtattcgccattccgttcctcgccatcgtgcttcaggaatggctcaaggcgcgtgccgaaggtgcagacgaaggcaacaaaggcgcgctatcggcggtgcgcatcgagaaccgaatcttcgtggccatcgtggtcatcatgttcgcaggcatcccgttcatcgacgtggctttcaacacgctccagctcgatcgcacccgctcgactcaatgccaggtgaacgtcccgctgcctgctgagacgggctggtcgcaatccttcagcaccctcaacaaccaatccgcgaaagtaccggtgtggtgggccttcatgcacaccgtctcgcgggcactcaccggcgctgcggtggcggcgattccctgcggcaccgacctacggcaaataaggatggacgtcgacgccacccgtatcgacgatccagtccttgcgcaggaagtaagtgatttcacccatgactgctacgggccggcacgtgccaagctcttcatgaatcgcccggccctggacgaggagcagatgcacgacgtgacgtgggttggctcgcgcttcttcatcgacacgacgggctactacgacacctaccgcgcaaagacgccacgcgaggactgggcctacgacagcacacgggatgcggggctggcagaggtgcccagcggtgccggctatccatcctgccagcagtggtggtccgacggcacgaacgggctccgtgcgcgcctgctcggtcaggtagaccccagcctgttgacccgtatcggcaactgggcgggtttcctgaaccaggatcaggtcaacgactcggtgatccgcaccatcgcctcgcctcggcagcagaagctcaaccagggcgcgatctacaacgactacggcggccagatcgagatgacggttcccaatgtcgccactcgcgccgtcagtgacgtcgggctggccatcggttccattgcgttcttccctgcgatggatgcgatgcggcaggcactgccgatggtgctggcactgctcaagatggcattggtggtctgcatcccgctggtgctggtgatcggcacctacgatctcaaaaccgtgatcacgatcagcatcgtgcagttcggcctgttcttcgtcgacttctggttccagctcgcgcgatggatcgactcgacaatcctcgacgcgctctacggttggggctggggttggaatcggccgcacatgaacttcgatccgctgatcggtttgaacaacaccttcggcgatatgatcatcagcttcgtgatggcgacgatgttcatcgtgttgcccacgttttggatagcagctttgggatgggttggcgtgagtgctggcgtgatcgctcagaatctcgccgtcggctccaaagatgccaaggacagcactggaggaggcgtgaataaagtaacgagcaaggtgttgtaa

SEQ ID NO: 351686 - DNA, 378 bp, Pseudomonas aeruginosa
atgaaatcttctgcacagacttcattcgcggagcgctttggccaaatgctgggccggatgtggcgcggatacctacgtcaagagcggaaggtgaatggctggtttgtagcgcgcggtgtacctgcgggtggggctagcgtcttgctctggatcgtcaagctggtggtgttcggtgtgctgctatacgtcgcgttctggtttgtcctgctgctggtttttgccttgttggctgctcgtggcttggcacaaaatgggccggacgaagacctttgggcgcaaaaagacgaactgcgctatggtgaggatggttatggactgtattcgtccagtggacagcgcatcgaccctcacgacccgaataatccatacgacgaatga

SEQ ID NO: 351687 - DNA, 414 bp, Pseudomonas aeruginosa
atggcggggttgcgcgtcgtgctcgacaccaacgtgctggtgtcgggcctggcatatccgggcagcgtgccggggcgcattgtgacggcctggcgtcaaggcggtctggatgtcgcgctatcgcactacattctggacgagctggcccgagtgttgccgcgcttgccgaggatcggcatgacccccatggagatccgcgacctggtcgacagccttatgttcctggtagatattgtagaacccgagggcgaacatgcggcagacctgcgcgatccggctgaccagcccgtactgctcacgctgttggcggcgcaggccgattatctgattaccggcgacaaggacttgctggcgctggcgaatcggtatccgattgtggcacccgcggaattttgggcgcgtcacggtgcctga

SEQ ID NO: 351688 - DNA, 336 bp, Pseudomonas aeruginosa
atgccgaacctataccataatgaccatatcaatcataatgaccgttatggtgtggggtgcatgatgatcaccgaagtcagtgccgtgagcttccggcagaacctgggcgagatgctcaatcaggtgcagtatcgcaacgacagcatcgtcataaacaaggacggcaagccggtcgcggcccttgtggacgccgagctgttcgcccgcattcgacgcatgcaggagcgcttcgatgcgctgaataaccggatcagcgatgcctacgccggcgtaccggtcgaagacggcctggccgagatcgaggctgcggttgcggccgagcggaagcgggactga

SEQ ID NO: 351689 - DNA, 1815 bp, Pseudomonas aeruginosa
atgctcgcgctgttccaacgcaaacgcccaccaccaacgacctctctcccctcggccggagacaagggcaaagggctgatgcgaccggagtcggcaacctccctgctgtccacaacgcgcaggcagaaactgctggagcacatctggcaacgcacctcgctctcacgccagcatttcgcctcgctctacctagctccactgcaacgctacgccgagttggtccagcagtttcccgcatcggaagcccaccatcacgcctaccccggcggcatgttggatcacggccttgaaatcgtcgcgtatgcgctcaagctgcggcagtcctatctgttacccagtggcaccacacccgaagaccaggtcgtacaggccgaagcctggaccgccgccatcgcctacgcgtccctactgcatgacatcggcaagatcgccgtcgatctgcacgtcgaacatgccgacggcagcgtttggcacccctggcacggcccgctggcccacccctaccgattccgctaccggcaggatcgcgagtaccgcctacacagcgcggcaacgggcttgctgtatcgacaggtgcttgatggcgagattctcgactggctcagcacctttcctccgctctggtccgcactgctgtacgtcctcgctggccagtacgaacacgccggcgtcctcggtgagttggtgattcaggccgaccgtgcttcagttgcccaggcgctcggcggcgatcctgcacgcgctatggcggccccaaagcacgcgctgcagcgcaaattacttgatggcctgcgctacctactgaaagaggagctgaaactcaaccagccccaggcgtcggatggctggctgacgcaggatgctctgtggttagtgagcaaaaccgtctcggacaagctgcgcgcgcatctgttggcgcagggcatcgacggcatccccgcgaacaacactgccgtgttcaacgtgctgcaggaccacggcatgctccagcccagcactgacggcaaggcaatctggcgagcgacaatcaccagcgagaccggctggtcgcacacgttcacactgctgcggctggccccggctctgatctgggaaggagacgatcggccggagccgttcactggcaccgtcgtaatagaggtggagtccagcgacgcacccgcagcaccatccaccgatagcgatgacacctcaccggaggtgaacgccgcacctgcaccgcctgctgcacccgccgccgatagcgtcgacgccctgctggcacggctcggcacccctgataccgaaccatcctcacagggggcggcggttgaaccgtcaccaacaacttgcgtcgatgaaccgccagcaccttctcaggagaacaactcaacgtcaccacaaccctttgtacttccttccaccgcaggtgtcggaaacgtgcgggaaccaccttccggcgaacacttcatggcctggctgcggcagcgcgtccagggccgaaaactcatcatcaatgacgccaaagccctggtgcataccgtggccaacacggcgttcctggtcagccccggtgtgtttcagcgctacgcacaagagcatccacacactgctgcactcgccaagcaggatcagatagctgactggcagtgggtgcaaaagcgcttcgagaagctgcaactgcaccgcaagcaagccagcggcctgaacatctggacatgcgaggtgacagggccacgcaagtcgcggcggttgcatggctatctactggcagacccgcagcgcctattcgaagacgtgccgcccaacaatccctatctacggctacagaattga

SEQ ID NO: 351690 - DNA, 1179 bp, Pseudomonas aeruginosa
atgcaagacgtcgtaatcgttgccgctacccgtaccgccattggcagcttccagggcgctttggccggtgtgcctgccgtcgaactgggcgctgcggtgatccggcgactgctggaaaagaccggcctcaatggtgctgaagtcgatgaagtgatcctcggccacgtgttgaccgccggtgccgggcagaacaccgcacgccaggctgcggtcaaggccggcctgccgcacgctgtgccggccctgaccttgaacaaggtctgcggctcgggcctcaaggctctgcatctggccgcccagtccatccgctgcggcgacgccgaggtggtgatcgctggcggcatggagaatatgagccagtcgccttatgtattgcccaaggcccgcaccggcttgcgcatgggccatgcgcagatgcaggacagtatgatcgtcgatggtctgtgggatgccttcaatgactaccacatgggtattaccgccgagaacctggtggatagatacgatatcagtcgcaaggagcaggatgccttcgccgttgagtccctgcgtaagtccatcgcggccatagaggccggtcgcttcgaggccgagatcaccccgatcctgactccttcgcgcaagggcgacccggtcagcttcgctaccgacgagcagcctcgtgccggtactactgcggagagtctggccaagctcaagccggcattcaagaaggacggcaccgtgaccgcaggcaatgcctcgacccttaacgatggggccgctgccgtgctgctgatgagcgcagacaaagccaaagcgctggggctgccagtactggcgaagattgctgcctatgccaatgccggggtcgatccggcaatcatgggcatcggcccggtgtcagctacccgccgctgcctggacaaagccggctggagcatcgccgacctcgatctgatcgaggccaacgaagccttcgccgcgcaggcattggcggtgggcaaggagctgggttggggtgccagcaaggtcaacgtcaatggcggtgccatcgcccttggacatcccatcggtgcctccggctgccgggtgctggtgaccctgttgcacgaaatgatcaaacgtgacgtcaggaaaggcctggctaccctgtgcatcggtggtggtcagggtgtggctctggctatcgagcgctaa

SEQ ID NO: 351691 - DNA, 657 bp, Pseudomonas aeruginosa
atggcactttcccgcgaacagatggcccagcgcgtggcgcgcgaactcaaggatggttactacgtcaatctcggcatcggcatcccgactctggtggccaactacgtgcccgagggcatggaggtgatgctgcagtcggagaacgggctgctcgggatgggcggattccctgccgaagacgaggttgatgcggacatgatcaacgccggtaagcagacggtgacctccgttaagggggcgtcgatcttttcctcggccgagtccttcgcgatgatccgtggcggtcatgtcgacctcaccgtacttggcgctttcgaggtggatgttgccggcaatatcgcctcgtggatggttcccggcaagctgatcaagggcatgggcggtgcgatggatctggtcgccggtgccgacaacatcatcgtcaccatgacccacgcctccaaggatggtgaatccaaactgcttgagcgttgcggcctcccgctgaccggggccggctgcattcgcaaggtgctcaccgatctcgcctatctggagattgaggatggtgccttcatcctgcgtgaacgtgcgccgggtgtgagcgtcgaggaaatcgcggagaagaccgctggtcctctgatcattcccgagcatgtgccggaaatgatcttctga

SEQ ID NO: 351692 - DNA, 699 bp, Pseudomonas aeruginosa
atgagcggactcgacaaacgtgttagtagttatgaacaagcactggacgggctgcgcgacggcatgaccgtttttgccggcggtttcggcctgtgcggcataccggagaatctgatcgccgagatcaagcgacgtggtgtgcgtgatttaaccgtggtttccaacaattgcggcgtcgacggcttcggccttggcgtgctgctggaggatcggcagatccgcaagatgatcgcctcctatgtgggtgagaacgcgctgttcgagcagcagttgttgtccggcgaattggaggttgagctgaccccgcagggaaccctggcggagaagatgcgggccggaggtgccggtatcccggccttcttcaccgcgaccggctacggtacgccaatcgccgaaggcaaggaggcgcgcgagatcgacggccgccactacatcctggaaccggccatcaccggcgacttcgccatcgtcaagggctggaaggccgaccgcttcggcaacgtcatctaccgccacaccgcgcagaatttcaacccgctggcggctaccgctggccgtatcaccgtggtcgaggtggaggaaatcgtcgagcccggcgagcttgatcctgcgcatatccacacgcccggtatttatgtcgatcggatcattcagggcagttttgagaaacgcatcgagaaacgcaccgtgcgttcctga

SEQ ID NO: 351693 - DNA, 888 bp, Pseudomonas aeruginosa
atgacggtcaagcagctgcgggcgtttctggcggtcgcacaaagcctgagctttgcccaggcctgcgagcgcctgcatttgtcacagccggcattgagcctggcaatcaagaacctggagcaatcactcggtggggcgctgctggtacgcacgacgcgcagcgtgtcgctgacgccggaaggcgaaagcctgctgccactcgccgtgcgcctactggcggactgggataatgccgaggagctgttgcgccagcatttcaccctgcagatgggcaaggtctccgttgccgcaatgccttcgtttgccggcaatggtctgccggtggtactcaaggcttttcgcgatgcttatccgcgcgtcaacgtgaccgtgcatgacgtgatcaacgaacaggtgctgggcatggtgcgcgacagtcgggtcgagctgggcatcgctttcgaaccagctactctcgatggcttgcagttcatacccttatacaacgaccgtttcgtggccgtggtaccgcttgacagtcctttggcagcacgctcccgcttaagctgggcggaactgctcagcgagccgttcattactttgcagcggccatctgcggtgcgcctgctactggaagacagcatcgtcgccaggcatggcaagctaccggtagcgtttgaaagccatcagttggtgaccgtggggcgcatggtcgccgaaggacttggcgtgagtgcagtgccgaagttgtgcctacgccagatggaagaactgggcgcccgctgcctgccgctggacgagccgcaggtggagcgtcgggtcggcctgctgcacctggccgggcaccagttgtccagtgcagcgcaggcattaagtgatgagatagtcatgcgatatcgttgtcagtaa

SEQ ID NO: 351694 - DNA, 123 bp, Pseudomonas aeruginosa
atgcgtagagcgctgaccgccctcggtatcatcgtcgccctcggcctggccgcagtgttcgcagcggaggtattcccgattctgcggactcttgcggcctggcagacggggtgcttcggatga

SEQ ID NO: 351695 - DNA, 834 bp, Pseudomonas aeruginosa
atggagcctgatcaggggaaggacttgaaaaagaaatttagtattctacgaaggaagatgatctaccctgttctgctgggggcagctatttatccattggtaataatcgccctggtggttgtgaaatatatttctaaattcgggtctgagttgtcgagcaatcaagaggtgtgggggcagtttggcgattactttgggggggttttaaatccaattttatctttttttgcttttgctgcactcctgtatacggtccatcttcaaattgagtcaggtaatgaatcagaggatcgccattccgagcaggtatttgattcaaggctctttcaactgcttaatgtgaactttgaaatattaaagtcactggttgtttatcagtctgagtcggccgcacagaatagtgggccatatgagggttaccgaggcttgcattttgtctggcatagactgtgtgatgaccatttgatgacaacccagcgaggggatcatccaggctccgagcgtgaagctgtttttcggcatgtgaatagtattcgccggctatacagaccagcaatatcctcctatttcaattctgtatttttcgtgcttgattatgtccaagaatattcgggtggggataagcagacggtttttgctcttaaagcattgcgctcacaaatgagtgttggaggtagggctcttctgttctatttcatgattgttgatgagaattactgcaagcttattccggttcttaggtttgctggcttctgggatgatgttgtggatgacccgctgcgtgatattcacgataacctatataaagcgtccgctgtgttccaccagaagtag

SEQ ID NO: 351696 - DNA, 726 bp, Pseudomonas aeruginosa
atgatccattaccacggaaccccggctgggggcggccggcttgacgccgcgaagctcctagccgggcgccacgccctcgtgccctttcttcggcaagatgacataggcgtggttgccgaggtgtgccagtcgttcatcttcgacaacagcgcattcagccattggactaagggcagcacgctggatgtcgacggctacaccgcgctggttgagaagtggcacaggcacccaggcttcgactgggcgctgatccccgacgtgatcgatggtgacgaagccgcaaacgatcacctgctcgacctatggccctcgcaccttcctggcgtcccggtctggcacctgcatgaatcgatcgagcgcctggtcaggctggccagcaactggaagacagtagccttcggcagttctggccagtggcgctctcccggaactgccgcatggtggaagcgcatggcggctgccatggatgctatctgcgacgaccaaggacggccgatgtgccggcttcacggcctccggatgctggaccctgcgatctttacccggctgccattcgccagcgccgacagcactaacgccgcggtcaatggcggcagcatcagccggttcggcatgtatgcccctcctactgcaggccagcgggccagcgtgatcgccgaccgtatcgaagcccacaccagcgcgcctatctggcagcgcgagaaccagatcgagatggcgctgtag

SEQ ID NO: 351697 - DNA, 246 bp, Pseudomonas aeruginosa
atgaacacctaccgccacaccttcgtcgctgagtgctcagcggacggtgagcggatcatctacaggctggagatccgatcgcacgcgatgatccgcgtcgagcacatccttaccgccaccgcgctggttaaacgcggcttccaagaagagatcgcggatcgactgcatgcccaactcggtggcgagcaccgcatcgtcggtgttcaccagggcgtcgaagtcgaaaccctgagggggccggcgtga

SEQ ID NO: 351698 - DNA, 759 bp, Pseudomonas aeruginosa
atgagagggtttatgaaggatgttttttttgaaacggcttttactcaggatgccgttccgagttatagatgccctgtttgcatggaaggtgatctgatcaaggaggagtttgtttcagaaagtactgcggttactaaaaaaaatagtgagaatgactggtgggagcctgattatgatgagtatgtttttcggttgacactaaaatgccctcgctgtaatgagttggtttttgttcatggggatggatacgtagatcaagagataacgatggagagtgaggatgagtggactagggcgtgggtctgctattatcggccaaagaatttctttccccccttaaagttcatcaagtgccccgtggctaccccaagaactgttcaagagagcttaggttcagcggcagccctctattactctcatccatctgcagcttgcaattatttgcgaatggcggctgaagatatattgacatctcttggtgttccctcatctactccggaggaatatgttagtctggcgcagcgcataaaaaagctcgacaataaatctgctgagtatctgcttttagatgccgtgcgttggttgggaaatgtgggtagtcattctggctcaacgattaagcatgaagatgcgaaggacgctttttctcttattgatctattgattgaggagatatatagcgacaggaagaagaaaatccacgaattagctgaagcgatcagaacaaataaagggcctgtgtcctcacgaggattttga

SEQ ID NO: 351699 - DNA, 1161 bp, Pseudomonas aeruginosa
atgcggaagcgcagacttactcatgcttcgttggatgctagtgatgaagggaccgcccggatgcagcagcctgatgttgatcaagttgcagaacccattgatgaattctcggaggtcagggctgctcttcagcgaattgatgctgacttcatcatctacgcaggagagattcagcatgggcatgagattgagatggaagctctgcttgcaaaaatccccgatcccgcttcggaggtgattctctggctttcgactccagggggtaatcccgatgctgcatattctattgctcgcttaatgcagcgaaagtatcggacctttacagtatttgttaatggttggtgcaagagctccgggactttgatttgtctgggggcgagcagggttgtaatggatgatctaggccatctagggccgctggatattcagataattaatagagaggagttcggtgagcgtcactctggtctcaatcctatagaggctctaaagtctattagttaccagtctatcgagttacttcgtcaacagtttttggatatccggtttggcggagggttgagtacgcgccaagccttagaggttgcaactaatctcactgggcaactgatgtctcccattacttctcagttggatatcatgaaatatggtgagttcaccagatccatgaggattgcaactgagtacggaaatcgtctggctaagcaccattcgaatgttcggcctgatgcaatttcgacgctcactacaggctatccttctcatggtttcgttattgatcgggaagaggcatgtgagcggctgtttgtaaacgttgagcctccttccgtagatctgttcatgatttcgactagcttacagacggttgttgacaaacacctttttggcgccaacaatcgcgcgctgctggttgacctacgtcacgcactgaaggtcccattagctcgggcagttgacgaaagccctacttctgggctgaactcacaaggtatcgattcggtcgtacctatggatgagcagcaagcccccacgcctgagcaaacaactgaagcagaggtcattccgatctctggccatgaggaaaatgagcatggaactcacgaccaccaagacccttccgaggaagatgtcagcaggcagtcaggcacagcgactgactag

SEQ ID NO: 351700 - DNA, 408 bp, Pseudomonas aeruginosa
gtgatcggctgggcgttctcggccaagccggatgccgaactggtgatcaaggccctggacatggcctacgaacagcgcggcaagccacagcaggtgctgttccattcagaccagggcagccagtacgccagccgcctgtttcggcaacggctctggcgctatcggatgcagcagagcatgagtcgccgagggaattgctgggataactcgccgatggagcgcctgttccgcagtctgaagtcggagtgggtcccgtcaacgggttacctgacggcgcaggaggcccaacgggacatcagtcattacttgatgcaccgctacaactggatcaggccgcatcaattcaacgacgggttaccacctgcggtggccgaagaaaaactcaacccactgtccgggatgggttga

SEQ ID NO: 351701 - DNA, 657 bp, Pseudomonas aeruginosa
atgccgcacaccctcaaggattttgtagctaggtatggatatgctttcgtccgcgagtactgtccggggacggatacgattgcggtggcccatgcactcggccagccgttggagccctggaaaggcggcactgtacaagatttggtccctcgttctacctcgacaccgaacacgtatagcggcatctacggcctttatcacttcccgttccatacggatctcgcgcactggcgcctgcctccacgatatttattgttacggtgcgtgaccgggtacgcggaaatcccaacgctgctgctcgatggtgaagccatttttggtgccgtaacattggatattctgacgcgagctatcttcaagccacgccgaccaaggtacggaagggttcagttaatgcgcttatacgagtctagggatgagggttattgcttccgatgggatgaggtgttcctccaacccgcaagtagaattggtgatctagctagtcaacgccttagtaagcagcttaagaaatgtgatcctttgtcgatcgccttagtaagaagtggcgacaccttggtaattgataactggcgcatgttgcacgcacgctcatcaattcccgctgggcgtgaagatcgaaaaattcagagagtttatttggagaaccttcattga

SEQ ID NO: 351702 - DNA, 954 bp, Pseudomonas aeruginosa
ttgaagaagacagtcaagcctgcggcaacaccatcgatctgggatccagaagccctttatctcaaggcccaacgctatgttcaacatatgagcgagttggatagcgacgagtgggagtatgctctttggtcgggattttctcttgaatttttagcgcgagcagcgcttgccaatgtcagtcccgcgctattggcggagaccgataagaactgggctagcctatatcacgctttaggcttcaatcctactgaagagcggttctcacctaagtccattgcaattagtgaggttttcaagcgcctcatggcgatcttgccgaacttcacgaaggagcatgaagccttcggcatcttacacaccggcagacgcaactccgaactgcacacgggcgagcccgcttttgatggtattaaaggctcagtttggcagccacgcttttatcagacttgtgagattcttctctcatcagtcggaatgacccttgatgactttttcggcaaagatgaagcaaatgtcgcaatgcaattaatttccgcagcagctgatgatagtgctaaagcagttaaaggcgaagtcgatgcgcataggaaagtctgggaagccaaaagtgaaaaagaacgtaccacgttgctagcgcaggcctcattaagagcgactcgacaagccggccatcgcgtggactgcccagcgtgcgcttcgcctgcattgattttcggcgagcccgtttccgctccggtgcagagtcttcgagatggcgaaataaccgaaaaacaggaatatctaccaaacctatttgaatgtatcgcttgtagtttaaagatttctgggctctcccgccttactgttgtaggtctcggagatagatataagaaaacacaaatttatgacgctgccgaatactacgcgccgcaagacgactattttggttacgatgaggacaataatgagccctga

SEQ ID NO: 351703 - DNA, 1314 bp, Pseudomonas aeruginosa
atgtacgaattttcagtagagcaagccgcaaacaaaattcatgaccacagatcgaaagagtactttggagaggtgctgaataattacttcaatgggaactatcgatcctccgtggtgatgctttggacggtggtaatatgtgatctggtgtacaaacttcagtatttaaaggacattcataacgacgagaaagccaccaccattcttgatgagatggtcgagtttcaggcaaaaaacccggcaaatcctaagtgggaggaaactctactaaaggagatatcctccagaacaaatttgctggaaagtcacgagctagactctttgctggttttacagaagcatcgtcacctttcagctcaccccgtcatcaacaaagcagacattctcttcagacctcatagggaaatggttctctcagatattcgaatcgcacttgattcagttctaacaaagccgccaatcttgacaaagcaagtgcttacagagcttgtcttggatctggagagaattaaagacttatttgccgaggcttcgcagttgagtcgatatcttgagtctaaatacttctcaaatcttaatagggagatatctgctcaactttttaagtccctgtggaggattgcatttaagaccgataacgaaaaatgcaatgaaaatagggagataaatgttcgcgccttacgtattttatttgagagagatcgggaattctttgctgggtgcgtacgagatagctcggcttactatagcgaaattggcgacaactcacctctgcggcacgccatattcttccttggtgactatcctcatctattcaatctccttacagaggcggctagagagttcatcaaggcaaaatcccaaacagacattgacctgctaacagtttcatacttcttaagcagcaatatatccgagcacattgatatgctggtaaagcatatcaatcaatatcacaaacttgcatttggcggcgcccacaacattcatcggaaccacatcaatgatctcaggcagcatgcatcctcagccggaataaagaatgatataaacaagcttcttgtgacaatgtatgtcaactccttgaatttcgatgccgccgacgtacttttcgctcagttcattaagccctttattgaaaacttctcagcagaagacgttgagttgctaataataggaattggcgaaaacaatcagacacattggcgaggtcgcgcgaacgaagaccataaagcagtggtggctaaggccagtgaactaataaaagatttcgatcccagtaaattcagctatctaccgaagattgcgaagtaa

SEQ ID NO: 351704 - DNA, 6309 bp, Pseudomonas aeruginosa
atgcgttttttcagggacctgattgagcaaagccttgagcgtacccgcgaagcgactctgggcgttctgggtattaaccatccgggcctgcgccatcacctaagccagagcatggttaatgatttgggagatgatggttgtttcctggctccgcccgttttcgagcacacctttggctggaaggagtcgaatgtaaaactgcaagatctgcagggtaaattgctttcggcaagtctgctggacacgttggagcggccgcactatcgaccagatccgaaccttcccgccgaaaagcggccttacagattcggtaggcaccaatacccctacacccaccagttgcaggcctggcgtgctcttctcgacgaacagccacgctcggcagtcatcaccaccggcaccggctcgggcaagaccgaatgtttcatggtgccgatcctcgaggatctggttcgcgaacatgagcgcagcgaggctgccctggtgggcgtccgcgcgctgttcctctacccgctcaatgccctgatcaactcccagcaggaacgacttgacgcctggacccacaagtacggcaacaacatccgcttctgcttgtacaacggcaagactgaggagcgcgccgacaaggtccgtaaggagcagcagcagaagcccaaccagatcctgtcgcgggaactgctgcgcagggagcctgccccgatcctgatgaccaacgccaccatgctggagtacatgctggtccgtcaggtcgacaatcccatcttggaaatctcgcgccagcagcaatcgctacgctggatcgtccttgacgaagcacacacctacgtgggctcccaagcggccgagctgtccctgctgctgcggcgggtggtccaggcattcggaaggcagtccgagcagatccgctttgtcgctacctcggccactatcgccggtgcagatgccgaggagcggctgaagcgctacctggcggatcttgcggatgtgccgcttgagcaggtgtatgttatcggaggttcgcgtgtctggccggatcttgccttcgattcgacaggcaaggacatcgctctgcagacaatccgtcatatcgagccggaggtcgaagtatcgccggcgcgcttcgaggtgcttagccaaagcagtatcgcccgacgtttgcggcatgcggttatcagctcagccaagccccttgacctcaacgatctggtagatgaggtcgctgaccaactgcagggatgcagacggctcgaacggcagcaggaggtgctcgactggctcgacaccatgaccggcactcatccagccgagaagcagccgccgtttctcaagctgcgagtccacttgttccagcgcatgctgcatggcctctgggcctgcgtcgatccgaagtgcagtgcaaaatccagtcatctgctggactggccgttcggcaatgtctatgtggcccagcgtgcacgttgcgagtgcaatgccccggtgtacgaactgggcttctgtgaggactgcaagacgccgcatctgctggcagaagatcgtaatggcgaactgcaccaacccagcccttacgccggcgatgagttcgccctcaatcacgaaaacggtggcgaggacgcacgagccgaagtgctagcgtcggcaaatgtcaccagcacacgcttgatcattgccggattgtctgcagcacataatccctacttctcgatgaccctagatcttgagagccaaaagctgggagcagtcaatgccgtcggcaatatcaatctctggctggttacggaaggaaaagaggatgcaggaaaaaaagaaagaaacttcgcctgctgcagcttctgtgatcactcgacgtggggaacgagtgattttctgagaaaggcctacctcggtgcaccgttctacattgccaacgctgttccgaccgttctggagttctgccctgatcctgaaaaggaggattgtgaaggccgctcccccgaggagttgccggggcgcgggcgcaagttgattactttcactgacagtcgccagggcacagcgcgcatggcagtcagaatgcagcaggaggctgagcgctcgcggctgcgcgggcttgtggtcgaagcgttaaggaatgcacaagcaaagcaagataatgagcaacctccagagccacccggctatcagcagctactcgatgccgccaatcttttagagaaactcaaccagtacgatgaagcaaaaaaaatccgcctgcaggcagaatcgctgattccaccatctacaccgccagcacagattccctggcaggatatggtgcagacgctttcatccactaaggatgtagagcaattcattctgcgctacaaccgctatgccaatccggcgctgttcgatggctccgaaggcggtctgaccatggcgcgcctgctgctagctcgcgagttctccaggcgccccaagaaccagaacagcactgaaacgctggggctcatcaaggtcggctaccaggggctggaaaaggttacgacaactccgccgctgtggatcgatacccgcgccattccctcgcggggcgctacaagtgatcccagaagctctctgacgctggacgactggcgcgacttcctcaaggtggtgctcgacttctacgttcgggaaaacaccttcatcccgatggacaacaagatgcgccgctggatgggcagccgcttcagtcccaaggcgctttactcgcccaagagcgacgtgcaggaaagcagcaccatcaggaagtggccgcagatcaagtcgggcacgccccaccgcctgatcaagttactcgagcttgcaaccagtctgagtcgcgccatgaatgcggatgcaaacaagatcaacagctggctcgaggcagcgtggctggcgctggtcaatgctggcattctggagccctccgataccggccaccgtttgcgcctggaatcccttaccttctcgctacctaccgagggttgggtctgcccgttgacccggcgcatcttcgataccactttccgtggtctgacaccctatttgccgcaaaagctgctgagccaggattaccgttgccagaagatccagcttccaaccttgagcgtcctgatgccggacggctctccggtgcccaagcagggtcagatccggcagctggttgcaaaagatcctgtcatagctcagttacgccaagaaagcctgtggacggatatcagcgaccgcacagtcgaaggtggtttctactaccgaactgccgagcactcggcccagcagtcggcaaaacggttggatgactatgtcgaggagttcaagcgcggcgatatcaacgtgctgaactgctccaccaccatggagatgggcgtggatatcggcggcatctctgctgtggtgatgaataatctgccgccacatccggccaactacttgcagcgcgctggtcgagccggacgacgcagcgaagctcgggcaatcgcatatacgctgtgcaaggccgatccgcataaccagcgtgcattcgccaatcctaaatggccgttcgtgaccgccattccagcaccgagcattaccctcagctcagcgcggatcgtacaacggcatgtcaactctctgttgctggcgttattcctgcgaatgcacagcagcaatgatggtgaccgtacaaaactgaccctgcaatggttcttcgctccagacgattcgcccggtcagcagttccaggcctggctcatggcaagccccgcggaatttggtagtgccgtgaagcaactggtacggggcacctctctggaaggtcgctcgctcagctcaatcactggcgaaacccggctggcattgcgtgacctcgaggagcgttggctgggcgagtaccgcaatatcaaccataagctgcaggccgccagcgatggtccgtacaagaaggctctggctctggagaagcagcgccatgagagcgagtacctgctccgttatttggcgtcgtctgcattcttgccgggctatggtttccctaccgatgtggtgagcctcaagacgtacaacgtggaggacttcctgcatcagcaacgaaagggcgatgctagccgcgaggacagcatcttcgacaacaaggaaatgccgtcgcgcagcctgaacatcgccattcgcgaatacgcccccggcgctcaggtggtcatcgatggacgggtctatcgttctgccggggtcagcctgcagtggcatggcgacgggcaggtcaacgaagcacagaagttcgatatcgcctggcgctgcccagagtgcggcagcaccggggtgatcgaaaatgcctatgcgaacaatagcggactgtgctgctcgcattgcacgaccccgattccgcccacagagctctgtacggtgttgcgcccgggtggcttcgtgaccgacttttacgaggaagccaccaacgatgtcacttcgcagaagttcatccgcgtcgagcgcccgcgcattcagctgaatggcgaaagcatcgcgttacccgatcagcgttgcggatttgtgcgcttcggccacgacggaagcgttttccatcattcgtccggcgagtatgaaaagggatatgccgtctgcatgacctgtggacgtgcggagtccatgcttgcctcgggcgaagttcccaaggacttgcagcctgataaaagccaccgtccggttggcggattggccggtagtcgcaaggagcgcgattgctcgggcgaaacggtgaaggccaacctgcatctgggctatcagattcgcactgatgtgctggaggtcttcctcaggaacccccttactggagagtggctgcgcgatactcccgagggtcggctggtcgctacaacgctgggcgttgccatacgcgatgtgatcgccgatcagctcggtatcgccagcagcgagatgggtttcggctatcgtctggaccgcgaccgagaaacccggcagggccgctccgtcatccagttgttcgatgaagtcagcggaggggccggattcgtactggctggtctggctgatatcgctctgctgctgggcaaggctttggatcggttgcagtgcccggccaactgcgagaatgtttgctcgcactgtctggccagccaggacagccgtgtcgagcgtgaagaactggaccgcaatctggcgttgcggtggctgagcgagtgccgactggttgaatatctggggcttcccgatgcatttgctggtctgcatggcgctcgctattgctcggttggtccgctgcgcgaactgagttccgccatcaactcactggatcgtcgtgatcagactgcatcgattctgctatgcctccacggcgactgtgcggattgggatctcgaccatcctcgcttccgggaacaggtactggcctgggccattgcagagagactcaaggtccgccttggtattgctgatcctgctcagttgagcaccgagcaaaaagagaccttggcactgtttgcgcgcttgggcgttgagctaatcgaactgaatactgcagcgctgcaatctccgcatctgattgcccaactcccatcccaggcaggcgtacggagcctgtacagcagcatgagcagcgtcggggtgcctggccccgattggctacagggtcatgctgatgtggtttgggctaccagtaaattgatgccaaccgtcacggggagctccatcgacagcagcggctggcaccaacagctgcagggggcgcgtatcgttgaaatttcttcgcagcttgatgggcctgtcaacaccctgaaaaaacgcctcactgcactggtctatgctcagatgccggagttggccgctttgatcggcaatgatcaggcgatttccgtcagctactcggaccgctacttaaagacgcccctgtcgctgatgttccttacaggcttcctggaactgttccggagtgatgaacttcagtctctatcggtacagacgctggcaccgagcggtaaccaacccagctatctgctcagtcatgattggatgcgggcggatgaccagaagaccattctcaggctttggctcaaggagcaattcgatatcgaaccggacatcaccgtaatgaacaaccctcgcgatttgctgcactgccgggttattacagtgaggtgggcgtcaggtaggaccagcaagatcctgctggaccagggtatgggctactggcgcgggaggatgccatacagggatcaaatgaacttcgacttcaatgcttcgccgcatgatcagaaagagctcatgtgcgataaatatggatacgttcaaatgcagcagggtggggagtggccgacctatgtcagttgcgtcattgattga

SEQ ID NO: 351705 - DNA, 1248 bp, Pseudomonas aeruginosa
atgagccattacaagccctatccggcctataaggactccggagtggagtggctggggcgtgtgccggagcattggaccattggtccctacaaggcaacgattcagatcgagaacggtgcggactacaaagaggttgaagcagatgacggttaccccgtgatcggttccggtggcccgttcgcattctcgtcgaagctgatgtacgacggtgagtcagtcctactcggcaggaagggaactattgataagcccctctacgttaatggggctttctgggcggtcgacaccatgtactggtcgatcataaagcccggagcgcacgggcgattcgcgtactacatcgcgacgaccatccccttcgatatgtactcaacaaacacagcgctacccagcatgacgaaaagtgtgctgggctcgcacgttgttgcatttccaggcttcgaagagcaggaggctatcgctgaccacctcgaccgcgaaaccgcccgcatcgactcgctgattgaaaagaaaacccgctttatcgaactgttgcgtgaaaagcgccaggcgctgatcacccatgccgtcaccaaggggctcaatcccaacgtgaagatgaaagattccggcgtggagtggctgggggaggtgccggaacattgggagatggttccgctcaagtacgttacaccgagcctgacagtaggaattgtcgtgaaccccagcgactatgtggccgatgaaggactgccattcttgtacggtggcgatatcggtgagggcgtgatcttcgccgaatcggcacgacgtatttctccggagcacagtcagcgaaacgtcaaaacaagactgaacgctggcgacttggttactgttcgtgttggcgctcctggggttactgcggttgttccaccagaatgcgaagggggcaactgcgcctcagtgatgctcatccgccgaggagctttcgagtctgattggctgtgctacgtgatgaacagccgcgttgttcgttaccaggttgaagtcgttcagtacggtgcagctcaggaacagttcaatatcagccatgccgttgatttcttgattcctgttcctcctgtcgaagagcaatcccaaattgcgtcggtgctcaatcaggaggggaggcgtgtcgatgcattgctaagcaagactgagtgcagcatcgaactcctaaaagaacgccgctccgccctgatcactgctgccgttaccggccagatcgatctgcgggaggccgtatga

SEQ ID NO: 351706 - DNA, 603 bp, Pseudomonas aeruginosa
atggcattgatcaactgtgaagaatgcgaccgcatggccagcgaccaggctgcagcctgcccgcactgtggggcgcctatcgctaagcagccggcacctgttcaagcccaacccagggtgcaggttatccgcagcgttggcttctggctcggcgtgggtgtttttctgttcccggtcgtttttgtctggttcttgctgcgccaagggcatagcaccacgagccgggtaattggcttttcatggttggcgttggcgctgtttcttatggctgggcacgagcggagcgatacgcggtcagcggcggccaccaccagccggagtcagccagcaaaggtgtcggcgtctgctgaaccactgcgcgaaatcagcgctcagcaactggctcaggcctacgattgcaacaccgtcgctgccgatcagcagtttaagggcaagcgcttcaaggtcaccagcgtggtggattccatcaataccgatctgttcggcaacccctacgttacgctgcgtgggggggtaaacagttcatggagccgcagttcgagctcgatggcgcccatgccaaatacgcagccggtctgcagagaggcatgcgcatcagtctga

SEQ ID NO: 351707 - DNA, 183 bp, Pseudomonas aeruginosa
atggccactcaaccgatgctctacaccctgcatatccagctggagccgctgcagctcgatccgccgatctggcggcgcatccgcgtcagcggcgattgcaccctgcgtaaactctgcaccatttcattcaggcggccatgggctggcacagcagccatctgcatgagttcagtttggggatga

SEQ ID NO: 351708 - DNA, 474 bp, Pseudomonas aeruginosa
atgatcgagttgaccattgtcgatatctactggaccgaacggaccaaactccaatatgacgcggaaaggcaggtatacatacctcccagcgccagcggcatggacggaaatgggttctattgcatctatggccgccatcccgtttatggccctgacgtccttctgtatatcggagaaacgaaagaaacggagagtggccggtccttccgagatcgacttggagaacacctgaaagggcgattttggtaccacgccaacctgtccgtcgcatttggcagtccagacagcaaccagaagctcttgccccaggaagtccgtctcgtagagtcgatcttagtcgctgctcacaagccagccctgaaccgcgtgcacatcgactgcgccatggaaggctccgagcatttcctggtcaggaattgggactttccggacgcacttcagcatgagtgctcagggtattactggcggcagtag

SEQ ID NO: 351709 - DNA, 750 bp, Pseudomonas aeruginosa
atgagttcgcagttgatcggcatgctggcggcttcgacgcagggcgatgcggacgccaagagcttgcagacgggagcctgggtggcggggaatgccacccaacacaactacctcagtcattggcacgaggagaagaagcggcaggaggtcgatggctgcaaggacaaacagctctgcaaaaccggaatagaagccaaatgggcaattatttcggcccagcaggatgtcggtatcgtcgtaggtgttggaggaggcatcggtctttcgacagctgaaaccgcagtgggtgtttatgagctggtcaagaactggagggaaacctatgcagctctggagcagttggccacttcgccagagttccggcagcagtttggcgataactacctgaaggggctggaggagcgcgccgcattcttgacccaggcatacgaggatgccggctggcaaggttcggtcacagctggtgtcgagggcggtaggttcgctgcagaacttgttggcgttctgacggcagtgaaaggtggcgcgcagataaccgccaagttgccaacagcagccaagaacttggtcaacgcgattgcggagtcaccggtttccggtagtatgagttcgcagctcggggcagtgggggatttgggtaagctgggtggggggcaaaaggatcagcaacggctcttcagaattttggtggacgcactgctaatgagcttgttgctgctgcaactgaaccaatcaacaaggaaggtttga

SEQ ID NO: 351710 - DNA, 3606 bp, Pseudomonas aeruginosa
gtgcaggcactgccttcggccgttagggctcagggcagcctgcctcgcctcgaagagcggagcgccgttcttgccgagcctccggttgggcagccagcgttgcaaaccctgccgtcggttgcgcgcgttgagggcgtgcccagcaatgccacaccgagcaacagccacaagtatctgatcgagaccaacccggcgctcaccgagctgaagcagttcctcaactcggactacctgctcggtggcctgggtatcaatccggatgacagcaagaagcgcctgggcgacggtctatacgagcagcgcctgatacgcgaagcgatcgtccagcgtacggggcagcgcttcatcgccggattgaacagcgacgaagcgatgttccgctatctgatggacaacgccatcgccagcaaggacgtattgggactgacccctggcgtcaccctcagcgccgcccaggtggccgcgctgacccacgacatcgtttggctggaagaagtcgaggtgaatggcgaaaaggtcctcgcccccgtggtctacctggcccaggccgaggggcggttgggcccgaacggcgcgctgatccaggggcgcgacgtgaacctgatcaccggtggggacctgaggaacgccggtaccctgcgcgcgcagaacgacctcagcgcgacagccggcaacatcgacaacagcggcctgatcgaggccggcaaccgcctcgacctgctggccagcggctccatccgcaatgaccagggcggcatcattgccgggcgcgaggtaagcctctccgcccttaccggagacgtcatcaatgaacggacggtgacccagcaccagtcttcctacaggggaaccggtaccactgaggcatttgccgatagcgccgcgcgtatcgaggctgcgcagaagctgaccgtttcggcaggacgcgatgtagccaatattggcggtgtcatcgacagcaagggtgacctcgctttgcaaggcggcagggatgtcctggtttcggctgcggtagcggagcggggctggacggcaggaagccaggcataccagacccagacgacccagatgggcgccgaggtcgtggcgggacgcgacatcagcgtcagcgccggacgcgatatcagcgtcgtgggcagccgcatcgacgctcgtcgcgacgtgacattcgaggcgggtcgcgatgtgggcctggtcgcggctgccaacgaagagcatgcctatggcaagaccaagaaggtcactttccaggacgacaagatcacccagcaggccactcgcgtggacgctggcggcgacctggcgatcaatgccggacaggacctgcgcctgatcgcgagccaggccagcgccggcgacgaagcctacctggtggccggcgacaagctggagctgctggccgccaacgacagcagttactacctctacgacaagaagagcaaaggcagcttcggtagcaagaagacccggcgcgacgaaatcaccgatgtgacggcagtgggcagccaaatatccagcggcggcgacctcaccctgctcagtggcggcgaccagacttaccagggcgcgaagctggaatcgggcaacgacctggccatcgtcagcggcggcgcggtgaccttcgaggcggtaaaggacctgcaccaggaaagccacgagaagagcaagggcgacctggcgtggcagtcgtcgaagggcaagggccagaccgacgaaaccgtacgccagagccagctcgtcgcccagggcaacctggcgatcaaggccgtggaaggcctgaagatcgacctcaagcacatcgaccagaagaccgtgagccagaccatcgacgcgatggtgcaggcggatccgcaactggcctggctgaagcagatggagcagcgcggcgatgtggattggcggcgcgtgcaggaactgcatgacagctggaagtacagcaactccgggctgggcgtcggcgcgcagttggcgatagcgatcgtcgtgacttacttcacggcgggcgcagccagcggggcgattgcaacggccggggccggaacctccatggcaggcgcgaccgcagccgctaccgctacgacttcggcgggctggttgaacgcggcaggtaccgcagcgctcagcggcgtggccagcaatggagcgatcagcaccatcaacaaccggggaaacctgggggatgtcgtcaaggacgtgacctccagcgatgcgctgaggggctatgtagtcgctggcacgactgcggggctgactgccggcgtctacgacaaatggacctcgacccagaccggcacctcgaccgctctaccgaacaccggggccgtggcgcccgccgcagggttgggcacctggcaaggcgtgggccagttcacctcgaaccagttgctgcagaatggtacttcggtgctgttggaccgggcgctgggcggcaagggcagcctgggcgatgcgttgcaaaacagcctggcaaatgcctttgcggcctacggcttcaagctgattggcgacaccacccatggtgtgctggacgacggcagcctcggcaagatcggcttgcacgccctgatgggaggtctggccgccgaagcggccggtggcgatttccgtaccggagccttggctgcgggagtcaacgaggcgctggtggatagcctcgccaagcaatacgccagcctgcccatcgatgacaagaagggcctgctgaccatgagttcgcagttgatcggcatgctggcggcttcgacgcagggcgatgcggacgccaagagcttgcagacgggagcctgggtggcggggaatgctactcagaacaactatattgaacactcggatgttctggcttttgccgaagacatgaggtcttgcggcaaagacgaaggttgccaaaaggacaagtgggagaaagaaaggtacagcgacgaaagtaaactcaatgtacaggaggcccaaaatacctatggtccgctgagagcaaaggagaaaaggctccaaatcgtcgagagcatggacacattggtgtccatccagtgcgtgacgtcgcgatgcgagtcgtacaagacggaattgttggagcaatcagtcgatagctatatacacctgagcaaggtcctcgatgaatgggtgccgacgctggaccgattggcgcttatcggaggtgctgctgcaggtaagcagatagactcgaaagtcaaacgtccgggtatgccggagcctgtagagcttgcgcaggttcagaaggctgtggattatcttgcagccctaaaagcgactggggcatcaggaaaaccgctggtttcaaagggctcagaggtgacccctgaagttattcaaaaagcattgcagggtgatcgtgttattactgcgcaaggcgctgtgtcattacctgcggtgcaaagatatgttgatcggcttcttaagggcgatgttgccccggcaataaaaatggatggcaatgtgattgttgatgggaatcatcgttatatcgcagcaaaaatattagggcgaaatctagatgtgacgccggggtctttatctcctaataaagtccatcaaaccaaacctgtgtctgagctgaagatagatcaagtggattgggggaacaaatga

SEQ ID NO: 351711 - DNA, 1443 bp, Pseudomonas aeruginosa
atgtccgctgatgcttatcacccaccgacaacctcgccgcgcctggaaaccctggacgtgctcagcataggcatgagcctggatgtgtttcgccaggggcaagtgtggaaggccttgcaggagcagaatgccgcacaggccgaggcgttgcatgtcggcagcatcctgccgatggacccgaagaagtatccgacgtctgcggatgacaaggatatggcgtatgaaaagcgccaagcggacgccttggaactagggctgaaaaacttcctggagaaatggccgataccgacggtgacggtggtgcgtggttgggatccgagcactcctaacctacgcttcactccggaggagacgcgggaaagcctgtcagtaaaagtcaatgatctccgtgttccggctggactgcattggcatcggattgccaatttgcaggatggcattatctgtaacgatacgcctgaaggagtactggaggcgttgttcagtttattcgaacgcaaccctgacttgccagcagtgttggtgtatgcgaatgaaggcatcagtatggcgggggcgctttccagtagagatgtaacattgaagtcactaggcgctgtgtcaggccctcggatacctggaacgcttacggatgcaatggtcgccctgatcgtcggccgccccgagcgggtcgactggctacgccagttcgccccctacaccaaggtcaacgaaaaccggatcgaccccgagttccgtggctggggctggcgcaagccaccggttgagttccgccccacgccgttcattccccagccctggaccgagcgggctctggagcagtgggatgcgttgccggtgctggccaggctgcatcgaccggtgagtgtgccgctgacccgcccggataccggcgaacggctcaagcgcgaagctctcaccgcacaactggccgctgcctggaagacggccagtgccgggctcaggccggcgcccgcccggctgttctacgacggcgggttgaacgccacgccgctggccgaactcaccccggcgctgggcgccgcgcagagttcgctggacttgctggactcgcgggaaagctacgacctgacccagcgcctgggcgacaccggcgcggcctcgcccttcgttggcatcgccctggcgaccatggccagctacctcaacggcgacagcagcatggtgatgccgttgcggcgcaaggaccaggcgaccctgatcggcatcagctcgccgacgcctgggaagaagcccgctcacgacccgttcggcgtcgacctgctgccgcagaccgccagcggcgacggtccgccgccatcggccgacccggtggcgcccgccagtcggctcacgacccggttgccgcccggcgaagactatgccctggaagagttcctgagcagcctcaaacccagcaccgactggcaggacgatttgtag

SEQ ID NO: 351712 - DNA, 669 bp, Pseudomonas aeruginosa; identical to SEQ ID NO: 327476

SEQ ID NO: 351713 - DNA, 2358 bp, Pseudomonas aeruginosa
gtgattcttctggaaaagggtgaaagcacaccagcgccatggatcaatgtcatcgccaatccccggttcggcttccaggtctcggcggagggcagtggctatacttgggcggagaacagtcgcgaaaatcaactgacgccctggtccaacgatccggtcggcgatccctgcgtagaagcgttctacctccgcgacgaggacagccgggcgctgtggagcgtcactgcgcggccgattcgcgacgatgggctctacagcgcacgccacggattcggctacagccgtttcggccatcgctgccagggcatcgacatggatctggtgcaattcgtcgcgctggcggacccgatcaagatttcccgactggtgctgcgcaacctctccggcaagtcacgacggctgtcgttcaccagctatgcggaaccggtactcggcagcgcccgggcgacatcggcggccttcatcgagacctgccaggatgtcgaaagcggtgcgctgcttgcgcgcaacccctggaacgccgcctttcccgggcgtgtcctgttcgccgacctgtgtggccgccaaagcagctggagcggtgatcgtcgcgaattcctcgggccgctcggtgacccctcggcgcctgcggcgctgctcggcgaggcgggactttccggatgcacgggggccgggctcgacccgtgcatggcgcagcagtgttcgatcgagctggcaccgggggaggtggtggaaatcgtcgcattattcggccaagcggactccctggctcatgcccgtgatctggtcacgcgataccgtcggactgatccggaagagacgctggcgggtgttggtaggcactggcggaccttgcttggagccgttcaggtgagcagtcccgagcgttcgctggatatcctgctcaacggctggctgctgtaccagaccctggcctgtcgcgtctgggcgcgctcggcgttctaccaggccagcggcgcctatggtttccgcgatcaactgcaggatggcatggctctgtccctggccgctccggcgctgacccgcgagcatcttctgcgcgccgccggtcggcagttccgcgagggtgatgtgcagcactggtggctgccgcactcgggacagggggtaaggacgcggatttccgacgaccgggtctggctggcgtatgctgcctcgctgtatctcgaggcgacggccgacatcgggattctcgacgaagtcctgccgttcatcgaagggccgccgttgcaagagggcgagcaggacaccttcttccagccgatgctgtcggagcagtccgcgtcgctattcgagcactgtgcacgaggcctggaccagtgtctgacgctgaccggtaagttgggcttgccgctgattggttccggcgactggaacgacggcatgaatcgcgtcggtgccggcggcacaggagagagcgtctggctcggctggttgctgctggagactctcgcgcgcttcgatggctatgcccgttcgcgtgaccctgagcgagcccgtcactggcgcgaacatgccgggcggttgcgtctggccatggagcgcgaggcctgggacggccactggtatcgccgagcgaccttcgatgacggaacctggctgggttcgaaggatggtgaagcctgccgcatcgattcgatcgcacagtcctgggccgtcctggcgggcgccgacccactgcgggcgggaatggcaatgaccgcactggagaggtacctgctacgtccagtcgatcgattggcgctgctgtttacgccccctttcgacgagaggggcacggatcccggctatatccgcggctacccactgggcctgcgggagaatggcgggcaatacagccacgcggccatgtgggcggtcctggcatttgtccgccaggacaaaggggacaaggcggggacattgctttccttgctcaatccaatcaaccacgcgctcacaccggaacaggtggaacgctatcgagtggaaccctatgtggtggccgccgatatctactccgaggcgccgcatgtcggccgtggtggctggacctggtataccggctctgccgcctggatgtaccgcgccggactcgaaggtttactgggaattcgccggcagggtgcctggttgctgattgatccgtgcattccggtgacatggtcgggcttcgaggtaagcctggaggtggaggggggggcactacgagattcaggtggagtccggagaagggcgaagccacggcgtgcgcgaggctttcctcgacggcgtcgaagtggagtgtatcgatggccaagtgcgggtgcctctcgattgtcagcgacaccgcttgcgactgagcctttagtgcagtaa

SEQ ID NO: 351714 - DNA, 732 bp, Pseudomonas aeruginosa
atgccgaaccatattgcccgctccagcttatttgcccctgtggcccgtgggcccaagcagatgcacaaggcgagcgtgctggtcagtcggaaagatgcagtaatcacgttctggggcgagcagctcgatgaaacccaggccgatgtttggatgcagttgatgcacgaggcgacaaaagctccgctaggagaacctgtgcctatcaaccgtgccaagttgctgaaagccattggcaggaagaccggaaattatgagtaccagtggctgcatcgaacgatgaaggctctgacctttgcgatgcttgttatcgagacgaccaagcaagacaaacctaagcttgaagtcggtaaggccgagaccctgcacatgatcgacaagtttgcatatgacccagcgggtgagtgctacacgatctctatcgatcctaggtggcggctcctctatggcaattgcgagtatgcgttgatcgattgggaaaagcggttgcagattcgcaaggggcaggacatcgccaaggctttgcagcgattggtgtcgacatcagatgagcgtgtgcagcgcttccgtttgagctggctgaaggagcgtctccagtactgcagcccaatgtgcaagttcaggctgtcactcaaggctgccatgctggagctggagcgcgttgagatcatcgcagcggcgcgcatcgagatgagcaccaagggggaagagcaggccgtgtgggtacggttgtag

SEQ ID NO: 351715 - DNA, 714 bp, Pseudomonas aeruginosa
atgcatatattggtctcaagccaatacaacgcgaccaagcagatgccagcgtcaacagacagtaaaaatcagttaaagcttcgaacaacctcacgcatgaacacactacgaattgagactggcactaaaaatccccaccaattcagcttgtggcttcaagagagagcttccagttttagctggccggacttggttgactccaaccggctatataaatatttcaaaggccaagtcagccgacacccttcccagataattaacatgcttggtcaggtcttcagcaatgtcgagaaaaagtactgggaagggccagagggactatggatatctctatggggaagccatcttgagctatctacaagtatcaagaagacatgcaactcttctgagagagactccattgataatgcaataaaaaacttctttatgcgaatactcgtgcatggagaaagcaacctacctgcatcagtttcaatatatagatatttatcaatcaccgatccatactctcgactttcggacggcaatggcttttccatggcctatagcgcgtatcagcaggctcttaaaaatttagacacagcagaagtccagagcactcttactgaactaggggtatacgaaggcgtccggcgagagatcatcgagatagagaggacacggattgcctctaagcccacctgggtcactccgctagagtgtgaacgcttttag

SEQ ID NO: 351716 - DNA, 1191 bp, Pseudomonas aeruginosa
atgagcgataacctggtgtactccctggaggagcttgaggacgcagacctagtaatcgatgcccgctatgcaggaagccgcaatggcaacgccagtgatgaccctctaacccggctgctgagcctgagcaatcaaggtggcttccggattcgcggtactcgcaatgacccgaagctgatagccctgatctccagcatggaagaccaggactggcctgacgatctcgatctatcaaccggtgtcttcacctactacggggacaacaaacagcccggccgcaggctgaacgaaacgaaccgctatggcaataaccttctggagctggtttttagctacctgcatgcaggagagcgccataaaattccgccgatcctggtcttcaccaaagccggtgtgtatcgggatgtggtgttccgcggtcttgctgtaccgggtgcggttggcagcactcataacgatgacttggtagccatctggcacaccaccaaggggcaacgattccagaactaccgggcaacgttcacgatcctggatctgccacgcattccccgcgcttggctcttcgacataattcaggaaggcgtccgcggaagcgtaagcgcccacgccccgctggaatggatgagatggctgaagtcaggccaatacacccctctgattgccaagcgctcacaaccgatacgctcgaagaaagaacagctcccctcctccaagccagacacagaaatgctgacggctttgcaccaacacttccaggcagacccctacagttttgaggcatgcgctgcacatctagtccgtctttgcctgcctgatacggtcgagttggatctgacgcgcccatttcgggacgggggcagggacgggattggtaagctgagaatcggcagggccgaatcatccgtgcttgttgatttcgcaatcgaagccaaatgttacgcaaccagtagctcggtgggagtacgcgaagtatctcgtctgatttctcgcctgcgtcatcgccagttcggtgtgctggtcaccacctcctgggttcacgatcaggcatacaacgaaatcgttgaagacggccacccagtgatgattcttgccggaaaggacatcatcgatctccttaaagaggctggattgaagagcgaggaggccctcaggcaatggcttgaatccagcttcccgctcagcaaaccttga

SEQ ID NO: 351717 - DNA, 981 bp, Pseudomonas aeruginosa
atggatcaaattcgcgcttttgacatgttctgcggggccggtggagccagcttgggggccagggacgggggcgctactattgttggcggggttgatatttggcagccggccattgagtccttcaagataaacttccctaaggctcatgtctttcataaagatcttcgtgatttgacgcctgaagaagttctcggaaaaaccggcccgattgaccttcttatctcatcgcctgagtgcactcaccatacttgtgctcggggtgctaaacctcggtccgaagaaagccgagaaactgcgtttcaggtgattcgctatgcagaagtaatgaaaccgcggtggatcactcttgagaatgttgttcatatgaaaccctggcctcgatatcaggagctgatgtcagagttggagcgccttaaatacaaggttcgtgaacagataattgatgcatcagactttggtgttgctcagcgtcgccgtcgtctttttatgatagcagatcttcaggatgagcctgaattgatcttgccgctcaataatagtcataaaaccgtctgggatattctggatctcagtggtaaatataagatgagtccgcttaggactccccggcgtgcaaaggacactcttgctagagctgatagggctattgaggaactggggccgaatgagtcatttcttatagtttattacggcagtgatgggggaggagggtggcaaagaatggatatgccattgcgaacggtaacgacgatcgatcgatttgcttttgtcactccatccccggaggggcataaaatgcgaatgctgcagcctgatgagttaaggaaagcaatgggttttcctgggaattatcgctttccagaagttacaaggcgtgagcaggttaagctgatgggcaatgcagtttgctcgcctgtgatggaggcaattgttgcatctattcggcggcaggctcttttgaagaataaagaagctgcatga

SEQ ID NO: 351718 - DNA, 2139 bp, Pseudomonas aeruginosa
atgtcgggttcagcctttaggcctagagcaagaattatgaagactctaggggaagaactaatcagtagtgatagtgttgccattattgagttggttaaaaatgcatatgatgccgacgctagtgaggttcttgtaaaatttgttggccctcttaagcagggagagggcagcattcatgtcattgataatggaaagggcatggatagatcaacggtggaaagagcgtggatggagccggcgacaccaagtaaggtaaaaaataaagtatcggaaagtggtcgtagggttcttggtgagaagggtattggaagattcgctgcctctcgtttagctgatgagcttgagcttgttagtaggcggcgcggtggtgctgaggaggttagggctgtatttgactggactcagtttgatgatgaagagaagtatctggatgaagttagggttttgattgaggggcggcccgcaacctctattgcggagcacggcacctctctaagtatgtcgaggttgaagggggactggaaaaatattagcttcgatgaaatacagcgggggctatctagattagtttcgccattttcagaattgcctggttttaagattaaaattgaagctcctgccggctttgagcagtattcttcggagatttcaccgccgcaagttattaaatatccccactatatggtggagggccaagttaatgctgatggcacgtattatttggtgtaccaagtgcttgcatcagggactgaacagccggctcgtggtgctttttttcagcaccctaagtccgggtgggtgatgcgagatgacctctccgtcgagtctatgggggagaattacagtccgccagagtgtggtgcttttaaggttcagctgagagtttgggatcgtgatgaactgggaaatgttctgcaaatgattggtggaacaatttctagtgttcgaaaggatcttgataattttgcaggtataaacatttatagggatgggtttcgtgtcatgccctatggtgagcctaataatgactggctgcgtttggacttgaggcgtgtccagaagccagtttataggctttcaaataaccaaattgttggttacatatctattacggcggatggtaatcctgatctaaaggatcagtctaatcgtgaaggtatgcgtgaaagtcaggcttatacggacttgaaagatttgatgttttgcattctgtctaggatggaggacgtccgctataagtctagaaaaaaacctgcctctcctgcaggtgaagacggagtaaagcagggggggttgtttgatgcgttggatctttcagggattagacagcatctgcaagaaacgcaccctaatgatgctcttgcaagaaatttagttgacagtgtcgaggcggatttttctcggcgaattgaaagcataaagaaggttgttgctagatatagtggtcttgccactttgggaaagttagttgatgcggttttgcatgagggaaggcagcctcttgcaactatttctggtcaggctgggcttgggcaggaggatttggaggactttggctattcgggagagtctaggttagagaccgtatatcagagattgcttaggattaaggagcaatcaaaggttctcagtcttatatttaagcgaatagaaccatttggtgggcgaaaatctgggcgtcccccgcagctttacctggagaaaattatccaagattcttttgatatttttgagggtcagcttaagtcgtcttctataagctatggcgtgtccgatacgcagaccctggttcgtcttgatccgcatgagatgcagcaggtgtttgtcaacttaattgacaatagtatctattggcttcaattcgttcctgtgggtgctcgaaagatatttgtggcagttgagcgtactactgaaggttttgttgatgtgctcttctcggatagcgggccgggggtacctgaagaggatagggattcgatttttgatgcctactactctacgcgtaaagatggtgctggtttagggttatcgatagttggtgaaatggtatccaactattatggtggaagcttggagttgttgagtggcggtgatttgccaggtgctgctttcagaataaggctttgcaagagggtttga

SEQ ID NO: 351719 - DNA, 1098 bp, Pseudomonas aeruginosa
atgaaatggatttttctagttgttgatgatgacgaagctatggcccagcagacggctgaaatattgcaaagtgctaggactttggatggcgccgaaatcacttgtgaagtctgcacgagttttgagttggccaaggagaaggtgctggtttctcgctacgatctcgtcgtcctggatttgagagatgatgcggggaagatagatttaaaggggcaggaagttcttgatcttttgagagaggctcatttcgttcctgtcgtattctatacggggcactctcataaggttgagtctctgaagactccttttgttcaggttgttgctaagggagatgaggatgctgatcgccttcgccaagctgttagagatgttttctcaacgcggcttccggaattgattagatatatccaggaacagcagcgcttatatctatggtcgcatgttgatgagttttggaaaagagatggggcgatctgcgatgttcgggatttggcttatttgctggcgcggcggcttagcagtgcgcttgagggggcgtcaatacgcaagttcttgaaggagggggatgtgcaagatgttgcccatccagcagaggtttatatttggcctgctttaggtgactcaatccaaagcggcgatattctcagggtggaggatcagatttatcttgtgcttaatccggcctgcgactttgttcagggtaaagttgatttgttagttgcggctgagtgcgttcctttggctcagtgtgttgagtattcgggggtcgctgatgctaaaagagatggtgggcagcctagtggtaatcaaataggtgctttgaagaatttaataggtgacaataggcagaagtcccagccggaaagatataagtttcttccaaaaactgtttttctagataatcatgtcgtggattttcagcgggtaaaaacttttcctttggctgatttgggggctgcgaaagttgagagaattgcgacgcttgactcgccttttgcagagtctgtagttagtcgtttttcgagatattatgggcgaattggtgcgccaaatctggagcgtgaaaggattgctggtgaaattatcgctcagatttga

SEQ ID NO: 351720 - DNA, 1170 bp, Pseudomonas aeruginosa
atgattccagacatcgattcccgtctcagccggaacatattgaaatccatctcgtatggcctccccctcgccgaagtggtccccgaccatacctatgcgcaactggaaacgcgcctcggcgaactgaaacgcaggtatctggagctgcgcatctcccacggcgcgcgcgagctgccgttcagcaactacctgttctacctgatcctccagtcgcgccaccaggaattcgacttcaagctgcgccagggcaactcggtggtcaccaacatccaccgcttcaagagcaagggacgcatcccgtccctgaccaccctgctcctggccgatgcggtcaacgccaagagcgagctggaactcaagcatccggacatcccgcagctcgaccgccacgcccgcgacatcgagcgctggctggccgccggcaacgtcatgccgcccagcgagcggggcctgcgcggcctggtggaggcgctggagcgcgccgctggcgaaggccgtccgttgcacctggtgagcgcggtatgcccggactactcgcactccagcgatgccgagggcaagccgcgctacaccttcgagcgagtcggcgaccagcccggcctggccggcaccaagctggtcagcgccggccaggcggtggcggagctggccagggcgcgccaggtggaaatccgccacgcaatcctcggcggcgagttcgagtacctgtcgttcaaccgcaaccccgccaccggcgagacccgcgagggtttcctcggcaaggtcgagcgccagctcgagcggatcgccggggccctgccctgcccggccgcgacctgctcgttcttcgagatgtgcggcggcgaggacggctggcaccgggcccacggcgagatcgtccagcgcctggaacagggcgactacggccagaccgggctggactacccggccctggaatcgatcttcctgtcgcgcctgccgctctacgagaaatggttcgccagccagtcgcgcgagcagatctgggccagcttcgtctcccaggccgccgagtacgcattgatgggaaaactcttcggcgagcgcttcgacaacttcgtcgtgctggccgtcgatcactaccggatggagccgttctactcgttcttcgcgaccgtcccgacgctctacatccgaaccgactacctgtaa

SEQ ID NO: 351721 - DNA, 1206 bp, Pseudomonas aeruginosa
atgaacttcccctggcgcgacggcaaccgcgtagaactgctgatcaacggcgaagagtactttccgcgcctgttccagtgcatcgccgaggcgcgccgggagatcctcctggaaaccttcatcatcttcgaggacgaggtcggccggcagttgcaggaagccctcagcgccgccgccgagcgcggtgtcgaggtgcaggtcacggtggacggctacggcaccgcctcgctcagcccggactacctggccaggctgaccgcctccggggttcgcgtgcacctgttcgacccgcgcccgcgcctgctcggcatgcgcaccaacctgtttcgccggttgcaccgcaagctggtggtgatcgatcgccggcaggccttcgtcggtggcatcaattacggcgaggaccacctggtacgtcgcggcaacatggccaagcaggactacgcggtgcgcgtcgagggcccggtggtgcgcgatatccgccaggcctgcctggcgctgctcgaaccggacgccgactacccgccgttgcggccgtcgggcgccgggcagccggcgcgggtgcgcctggtgatccgcgacaacgaccagtccagcgacgacatcgagcgcgagtacctgcaggcgatccgccaggcgcggcgacgcctgctgatcgccaacgcctatttcttccccggctaccgcctgcttcgcgagctgcgcgatgcggcgcgccgcggcgtgcgcgtcgacctggtactacagggcatgccggacatgccgctggtgcgcctgtgcagccggctgctctacgactacctgctgcgcgagggcgtgcgtatccacgaatactgccagcgtccgctgcacggcaaggtcgcggtgatcgacgacgactggtcgaccatcggctcgagcaatctcgatcccctcagcctgtcgctgaacctggaggccaacctggtgatccgcgacgtcgccttcaacggccagctctaccagcacctgcgcgagctggcgcgccgccactgccggcgcatcagccgccgccacgcgaggcgcggctactggtggcgagcgccgctgatcttcctcggcttccacttttccaggcactttccggctatcgccggttgggtacccgcccatctgccgcgcctgaaatcgctggagccgcgtccgtcgcggcgctggcaggaacgccagggccagcggggcaacccatga

SEQ ID NO: 351722 - DNA, 138 bp, Pseudomonas aeruginosa
atgaagatcagcgacataatgacccgcaacgtccaggtcgccgacccgcagcagagcatccgcgaggcggccgccaccatggcgaggatcgacagcgggccctgctggtcggcgaaggcgaccgcctggtcgggatga

SEQ ID NO: 351723 - DNA, 672 bp, Pseudomonas aeruginosa
ttgtactggttggggccatttcaatactcatcaaaacaagagttactcaatcggctgaaggccttcgtgggcacagcgccgattggcagggtttcccacaaaattgccacccaaaagctccatctactcattgcgctacacccagacgcagaacggaagatcggatcaggcgttgaccacttcaaagtcgaacggaatgcgctaggggcgggaagggggctttggatcgttcgcagcgacggcacagaagcctcgttctcctacaagcgctgcatcaccggagtgcgccaatcatcctatgggaaggtctgcgaggcacttaggttctcggttcgttcacggctgatagagtttcgagaaacactgaagttacccgctaggtgtgcgatcagcggcgaagacatcgtgcatcgtagcaatctgcatatagaccacaaggttccgttctggcggctgctgaaggccttctcagaggtccatagagttgacctatccctgctcgatacgatgggaagcggggaggcattggtcctggttgatcaggagatcagcaaggcctttgaagcattccacttgacccacgctgaactccaaccatccagcaaaaccgcgaatgctctgaaaggaggaaaactctcgtctcttagtggccgcgaagatggcttttgctga

SEQ ID NO: 351724 - DNA, 438 bp, Pseudomonas aeruginosa
atgagtaagcctttcaaagaccgaatttacgctatgaaccaaatgtacaaacttccgatcagcagtacacctacgctaatggccgatccagcggacaagctcaagaaatttaaagcgacgctgatggctgaagtgaatgaaatcgatgaaatcgtcgaaagaatcgagaatggggaaactgaaatcgatgtcaaagttgccatcgccgacttacttggcgacgtgattgtttattgcaggtctgaggctctaaagtacggcttgccgctcgagaaggtgctggacatcatcatggacagcaacgagagcaagctgggggcggacggcaagcccatctacgacgaaaatggcaagttcctcaaaggcccgaattactggaaaccagagcccaagatcaagagcttgcttcttggccatgaggacaaagcggacgcttga

SEQ ID NO: 351725 - DNA, 1041 bp, Pseudomonas aeruginosa
atgctcagtgctcgtcgtggcgccatgcacgatgccgcacgcctgcagcttatcgtcacactggcccggcagcagttgcagaacgattacctcgatttcaacccgcaggccgatgttcaaaagttgctgaacaaccttggcaattgctcgccaggtatcgcggccgtacgtctttccaagggtgtccgactaggcgagcagacattcaatcgccgagcggtctttcaggagtctgtagaacgaatgcaggctatggacgccggaaggtatgaagacgtcgtcagcggccgggtcgtcgatttgatttgtgtagcaggttcgaaggttcagcacctgcgaccgctatttcatggtacaggtcaggtaaagcttccattcgaaatggccgatgagatgcgcaatctcattgacttcgtcaacaagcagacagggcgcaccagcgtaccggaatcattgatcgatagcttgggccttttctgcagtgagctgatctccaacacgcagcagcacgcaacttccgaccatcttggccgcccgtatatagctcatgtggaaggcattatggtcggttggaggcgtttggaggacgacatcttctctgaagattttgatggtagtgaggatctgaggcgctactggcagcgagagtcttcaacaaccgacaataacaagaccagcttgcgcgcgttgcacatcagtatcttcgactcgggccccgggtttgcctccagaatgagcggcaaattagtgcaggatatgtctctccctgaagagcgggggcatctgctcacgtgcttacagcgacgccagtccagcaagccacaggatgctgcgggggtcggtctccctgatattttgaccgagcttcgcaaagtcggcggtttaattcgtatccgatctggccggctgtgcatctacaaccagttcgaagaaaacgatcagcagcgtgaccttctcgactttagggattgggacagcactggcctcgcgcccgttgcaggggccgttgtcaccatcatgattccattgaggggcatgtaa

SEQ ID NO: 351726 - DNA, 2196 bp, Pseudomonas aeruginosa
atggagcgtttttatcattggatgtctgctgtcagcgaccccaatggcagtcacgaggcgttggtcatctgctacaacgattcggagctatcggtacaacacgtgttctcagacatcgaaatggcgctgaaggcccaacgacatttgcctgattgcgtgtacatcctgggcacgtctgagcagttgtcggtattcaacaacggttgggctgacgatcaaggtcgcctcgctaacctactgagtcgtggcgtaaaaaacgcgcgtgtctgtgtccatgaatacgtgttccttgagtggaatggtgagggcttcaacactcacgtgttgggcgggggcgaaatcacctattccaatgatccgagcgtgctcctgaaacacgggttaaagactctgatcgaaaagaacaacgtcattcattcagccccctctgcgcattccttcaagcatccctccggcacgctgaacaatgtattcatccaggccagggagctggcgagcgatgaggccgaagtctgcgtggtggggtatgcgatcgcactggaatacggtgccagactgcgccgggcggacaaggtgttcattgacactatgggcatctacgcattcgtgaagaatgcgctcggtcgcttggacagcaaagccgaagtcatgagcttccattcctacgagcggctcaagacgatgtttcccccagcgcgggattacttctgcgtggtgtcggcctccacatccggcgggatggccaaacagatgggggagcagtccttcagagaggattgcgttgccacgctgatcgatcgcacggctgatgaccgatacggccgtgttctggtggccctggacgacatcgactatccactgcctctcaaggcggaggagggctgcacgctgatcgagatcataggggaaaacttctcggcaaaatcaaagccgcccaagtcgatcacgatctccatgaagcatgggccaaagccgctgggcaaattccacaagtatttcggtatgggtggaatcattggattcaacaggtcgaatcagcctcagaagctgttgacgcttgaccccgagctcctgctagcggacgccgacttccagcgctggcttgccgctgaaatcgactggtctgtttcaatggcgacgaacctcatcgtgtacgctgacgatagcggttcaaaacaacttggcgagctggcccatgagatgctcagccagaaatggggaactaccaagtccatccgttgtgtcgcctacagccaacttgatgaagtcgacttcagtaccgtttccggggtacttgttgccaccgtggtggcgcgcgacggggggattctgagggagatcagccgtgatttgcgggcttacatggaagcgggtgtaccacgacgtttccttgccccgatcgggattccgcagagcggcagagcctggacgctcctcaaaagcttcttggtgagaaatcccacaactcgggagtacggtttctccaactggctgtgtctaccgattggtgatgacgggaaggagaacgcctggaatcgattggtcaagataggctctgccggacaggtcgatgacgttggattcacgcccaaagtcgcggaagcggttcgccacgagtcccttgatctcgctacagagctcctggaggaattcaagcacgacttcctaccaaaacatgatcggagcgcgctcgctttgtccgacgggtttctgttctttgacccaaagagcaatgtaggtcgtgactgtccaaacgtaccgcagagcacggtgttcttcacgattgcagccgttttgcaatttgctcgcgaacacgacgatcatgagctgcgcctccagccgacggggtatgagtcggtggtgttgtcgcctgagtgcttcctccggttcaacgacaacatcctccaggcatcattcctgcgggcctgtctcccctcggagcttgattattctgcgagtccagagctaagcaagttgatgaaggagttcattgccaaggtgtttgcccggtgggagcgaacctacggcgatgctgcccttgagttcgctgcggccctggccaccagttcgctgaagctcacacaggaagacacgcgggctctgctcgaggaggctatcgagaaccgtaaagacgaagcctccggtctacttgggctgctcctgctcactcagcgtgcccagttccccgttctctga

SEQ ID NO: 351727 - DNA, 942 bp, Pseudomonas aeruginosa
atgcgccgcgttgaccgctcttcagtgaaaccgcccccctcgctgctagttggcggtgccggccccgtggagttgagtgatgcccgcagccaccgtgctgctgtgccgccgccgggggaaaaaaagaaagagtttatatacaaggcctacaagtctgccgacgtgcgaagtgccctggaaaaactgttccacggcaaatgtgcctactgcgagacctactatgcggcctctgcaccggtggatatcgagcattaccggcccaaaggtgcggtggcggaagatgccgcgcatggaggttattggtggattgctatgcagtgggaaaacctgctgccgtcatgcattgactgcaaccgcaaacggggtcaggggttggtggatgcgtcgaatagcctcgcggtgctggcgggtacagcaacgctaaggtcgcaacaagcaggcaagaaagacagcttcccgctagcgaacacgggcgtgcgtgctacggcagagacaacagatttttccagggaatggccgctactcatcaacccttgcgaagatgatcctgccacgtatctagcacacagcctcgacccacagcaccccaccggcttgattgtggccgcaggcgatgcgcaacagcaagcgcgcgccaatgcttcgatccacatctatgggttgaaccgcttaaagctgtttcaggatcgcaaccgcgtgctacgcaaattgcagttcctgggtgatttgatcactgacctggctgagtcgataaccgcactggaggagcccgccacacagcgactgttggtgggtacgcctgccgtaagtgtcgccacacgtcttcgccttctccaagatcgcttgctcaccgaactgaaggctgccacagcgccggaagccccctacgcttcgatggccagcgcctggcttgcacagttcacggaagagctgcgcctgtaa

SEQ ID NO: 351728 - DNA, 2034 bp, Pseudomonas aeruginosa
atgtcgcggtccagcgacgctcacctttactacctctggctagcggatgcctggcaaaaccttctgccgatctgccacggctgcgtgccgatcgagccccgatttccggtgagaggacgtcgctgtgagctgcccacgcgggaacaggttgaggcctatgtgaagagcggcgatggcctctggcggtttggcatgcccagtgaaaacgccgagctactcgaccctacggaagtaggccaatttgccagccacctgactccgctcttggacggcatcttactgcctggctcaaaacggggggcattgaccattgcccatttcgacctgaatcggaatgaacgaaggcaccagcgctattttgcttatcagaagagcctggatgaacttcgcagctgcggcatgacctcggacctgtccaggatcgatcaactggtcgactttgcatccctcgaattcggcgggacgtggtacctgctgcttcgccggctcctcaaccatcttcctgtcaacggcatcgggcgtaacctgacgcccaagcagattggccctgcgcttcgccgatgggcaaaggcgaccgacgcggcggcgctcttgtcagaagctcggcagatgctgcaacgcgaggatgcgaaattacacgcaaacggcagccaggcgatcgcgcccgtgccgatcatcgaatctgtcaccgccattcacatccgcaatttcaaagccatcgagcagctagacctcaagctcaaggcgtcaccggcgcggtctctcgcgggcactgagtctctggccgctgccttggtgattctgggcgaaaatgccactggaaagagctctattctcgaggccgtcgctttaaccctggtccccgcggcagttcggaacgcgctaaacctaccgttggctgagctggtgatggatcctgcccaacttggcgttgacggcggtgatcaggcaactcgcgcgcagattcgcatcgagctgaccaaccaacactgggttgagctgaccatcgatcagcatgcccacgtcctcaccagcaacttcgataaccaacacgtccccgtgtttgcctatggcgcctttcgaagattcacccgagcgagcccgcgcacaactctgcatgcccatgtccgcaatctgttcgacggcaacgtgctgtccaatcctgaacgttggctgagtcagctcaggcaggatcgattcgacatggtgattcgaaccttgcgcgaagtactggcaatagacggcgatttcgatgttatccaacgcactcagaatagcgacaccttgtacatggtgacttccgttagcgagccagacggcacgctgcgcttcaatcgcacgccgctgcatgccgtgtcgtccggataccgctccatgctggcaatgatctgtgacatcctcaaaggcctccttaacgtaacaatttaccctggcttcgaaagctttcaggctgcccgcggggttgttctcatcgacgagattgaggcgcacctccacccacgctggaaggtccaggtcatgtctcgtttgcgtgcggccctcccgagcatgacgtttattgtcactacccatgatccgctgtgcctgcggggcacggagcaaggcgaagtggcggtactgcaacgcatcgccagcactgacggccaggcgcagcgccagatgccgattaccattgaaagcatggccgacctgcccccggtggccgatctgaggcttgaacaactgctgacctcagacttctttcagatgctctccaccgatgatgcgcatgctgatcgccgcttggcgagaatcgctgatctgatggcggcacacgcccgtggtgagttgagctccgaggatgagcgggtgttgcaggacttcaatgccgaaatcaccaatgccctccccattggctcgagcgaaatccatcagattgtccaactggcagtgggtgagtatctggcaaagcgtcgtgccgccagtagccagcggttgcgcgacttgcggcgagccgctaaggaccaaattctggccgccctggagagactttga

SEQ ID NO: 351729 - DNA, 3822 bp, Pseudomonas aeruginosa
atgccttcagtaccgctaatccggcatttccgtctgattccagacgcctatcagaaagatgatctacctctaggcgaactgtggctgggatcttcacacagtgaaaataagacgtgggagatgctatttaccgagtaccgagtggtgatcctagccgaggcaggcgcgggaaaaacctacgagctacagtgggccgcaaacctattgcgaaaccaaggcaaagcggcattcttcatccggatcgaagacctaagcgaccgcttcgagacagccttcgagataggcacggcagaagcattctcggcctggctatcaggtacggatgaagcttggttctttctggactctgtggatgagcttcgcctgacagaagcgagagcctttgagcaggccgtgcgacatttcgctgatcaggtggggccagccagccatcgcgctcatgtgtacctgtcaagccggccctatgcctggcggcctcaacgtgaccgtgccctgttggaagagttgctcccctttgccccgcagacgacgtcgctcgaaaccgatggcattgatgatcccgcagaagaaaccgaggttgcggctgaccattacactatccagacaaccgatgaacccctgtccgccctgcgcctttatcaattgaccccgctgcgcattaacgacattaagatttttgcccagcacagcggcgtctccgacgctgccgtgtttctggaagaattggagcgcggtaaccttctcacactcgctggacttccctttgatttgcgcgatttgatcggcacatggaacgccgaacatgcacttgcgaacaggttaacgatcctgcagcagagtattgcccgacagcttgaacaagcagcccgggatctgcccacgctcacgcggtctcgcctggaagagggtgtcgaactcttggccatcggggttgtattaaccggcatttcgagcctgcggctacaggaaagtggctctgaggcagccatcaagccaggcaccttgctccagggttggtcctgcgctgagctcaatgccttgctgacatgcggaatttttggcgagcccgtctatggcgaggttcgattccgccatcgagaaataagagaattgctggcagcgcgctggatcagcaaccgtctgggagtcgaggcgaatcgcagcgaaatcgagtcatggatatttcgtcggcagtacgagcagacggtattgagtgtacgcatgcgtccgctattgccctggttgattctgcttgacgagcgcattcgagacatggtgatccgagactaccctgatgttgtgcttgaaggaggggatgctgcggtgcttcccctcgcagctcgaacaaagacattgaagcgagtgattgatcagatcactgatgcaaattcatctcttcggggattggataatgacgccatcgtacgaatcgctggctcagacttggaagccctggcccttgagctgatcaacaagcacgccgagcatgacgacgcgattttcatcctgggtcgcttggcctggcagggcaagatgcagcgatgcgtagaaccgctggcgagcattgcagcagacccggatcgcggcctatatgctcggatcgtgtcggtgagagcggttgcaacactgagtgatactcagcgcttccttcagttgtggcaagacatcttggcacgcgaaggatcggttccgcgacgcgtcttttcggagctggtttcctatgcacccggccaacaggagtcgatcgagctcattctgcaaacgctaacgcgatcaggaaagcatgaaagatatgaggcgagcggactcacttccagtttggccgaattcgttaaacggctgaccgtacacggacagtccaacgcacttgagctacttcatgagtttgccaaaggcttgctggagcttctgaaaaagacgccgtatatcgaacgcggtgcctgcgcggtatcgaaggtttacgcgtggctgatgcccacggccttgcgctgcgtcgaacacctgattgctgtgcgggctccggctgctttgtcctcgacatcattggccctactctcggcggttcccaccctcctccactggcacgatgccgacctgcaagagacgcagaagacattcggctcgctggttccccaatggcccgaattgaatgacgcgttgttttggtggaccgtcgccgaatgtcggaaacaggccagaaaaaatggccagccgctcagagatgattggctggtgacctggccagggcacttctggtcattcgataaagcgagttttctcaggacattggcctgggttaatgctcgaactcaggaagatgaccagtacgtggccctggccaggacccatcggacctacagggaaaatggccagccggagagctggctggatcagatgcttgtcgctactcacgaccatgcggggctacaggccaccttgcaggcttggcttaaccctcagctaggcccggcaactttgcgtctccatgcgcaagagcgtaagcaccagcagctctatgagcgacgggaaaaaaagcggcgtaaagactgggacgctttcgtcgctcgagtgaaggctaagccggagattgtgcgtcacccaccgggacttaaagcgaacgaattcagtcaaatccagtatcacttgatggaacatatccgagcaggcaaaggcctgtataagcgatccgagggaggtaactggagcgcactgatcccagagttcggcaacgaggtagccgaagcttaccgcgatgcagcgactgcgttttggcgtgcctaccaaccaagtacccgttcagaaggcgccgcgccgaatagcatccccgtggcggtgatgttcggccttgccggccttgaaattgagttagaaagcgagagcgccattgcgcgattgactgatccggaagcgcaagctgcactgcgctacgcactttgggagctgaacgggtttccgcactggtttgtaccactatgccgactacacccccttgcggtgacgaaagttctgcacccggaaattcactgggagttgctgagtagcctgcccgagcaaaactcctactatgtgttgcacgatctagtgtattacgcgctaggactgcatggcgctttagctccggcgctcttcgattggctgtcgaagcatcaggtcgtaaaccgcgattgcttgaactactgccgagtgatcatgaccggtggcgacctatcatcggcccagattgccggattggctgcggctaagattgacgacccttcgacacccgccgaactactgccagtgtggcatgcagtccgcgttcacgcagacccctacctggcgttgccgcacctcaagcgtgcattcagttcgcggtctgcgggtaaggacccgcgcttcggcgaaattttcagcgtggcgttgctgggcggaagacgtgaaacggtaaaaagtgccggccgtttccacacaccgagtcttctcaaggagttgtatgtgctggtgcaccgcagggtgcgcgcgcgcgatgacatcaatcgggctaacacgggcgtgtactccccaacgctgcgtgatgatgcccaggatgccagggagcggttgttcggactgctaagcgaattgccgaaagagacgacctaccgaaccattctcgaccttgccgtggagcaccctgagccccgttttcgcacgtacatgcgctcaactgccctacagcgcgctacggtagacggggatttggcattgtggagcgaagctgatgtcgccacggtagcgcgtcgcctgaccatgattgatgacctcgatactccttcgccggaggccccccttgcagtacattga

SEQ ID NO: 351730 - DNA, 264 bp, Pseudomonas aeruginosa
atgacgactagaaaccaaggcatgagcctcgagatcccatccgccctccttgtggaagttttggccggtcgggaaaaactgcttgagggcgaatcaggtatggatgccgcgcttcagtactttctgtccggagactatcgcgtcgagaattgctcgctcatccctgctgatgttcaggccggtgagggtaccaaggtgaaactcgatttcgtacgcgaccacgatgccatcttcgagcgattgtcgaaaccaaagggctcctga

SEQ ID NO: 351731 - DNA, 993 bp, Pseudomonas aeruginosa
atgtcattgttggatgagattatcgtgtggactagcggccttaggccctggcagcaggaggcgctgcgccggatttttgcgcagccggaactcacccagggtgacatcgaaaccatcttgcaaatggttcgcgagcaagaaagtgaaggcgcgactgcggctggcaccagaacattcacgcaggaagacgtgcccggcgtcggtagtggcgccaccgtgagattggccggcgtttcagggctggatcagatcaacggtttcccttccggtcgtgcctttgacctcgtaccggagggcttgaccatcttcttcggtcataacggcgccggtaaatccggctatgcccgcgtcttcaagaatgcctgcaaagcccggcatcgggtggaggtattgcccaacgcctttgaggcggctggcacgcctaggccgccatctgcagatttcgccatcctcgtggatggcacttcggagaccgcgcgctgggtccagaacgaaccggcccatccgcacttgagttcggtctcggtctttgacgatccgtccacctccctggaccatgtttatcgtcgggccatcgcctggcgattggtcgcgctggccgagtcccgccaggtgctggtattcacgcatgatgcggtgttcctgactgaactcgccatggcacttcagcgcgcagattgccaggccagttacaagaccatcggctgggatgagttgcccggactggtgagcgagggtctgacgtgggccacgatggacaccaaggcgcgcctggctgatctgcgtgatcgcgcgaaagcgctgaacgctccggaaggcacctatccggacgatgaactcgaacgccaaatagctgctggttactcaagcctccggggcaccgtcgaacgccccatccgtgaggtttttctgaacaatacggtccagccgttcagcgacaccagactcccagcaaggggctggccaggaagctattggggagtatctgtatga

SEQ ID NO: 351732 - DNA, 255 bp, Pseudomonas aeruginosa
atgaaagcaatgaatgctgttcgcaaattcggttccaagttcggttctgctccgcgcaatgtggtcctcctgggcatgggtgccctgggttcgcatgctgcgaccgcagctgatctgatcgacgttactgccgccaaggccgatatcgcctccggcaaggctcaggccggcgatatgggttcgaccatcatcggtatcgtggttgtcctggctatcgtcggcaccatcattgcgctgttgcgtaagtcgggctga

SEQ ID NO: 351733 - DNA, 621 bp, Pseudomonas aeruginosa
atggttttacaaggcaaggagccgccacccgaagaaagccgaatatcaaagacattcttaagcgagcttttgaacttttcagaaagctctttaaagtccccctggctttcaataactttcttgctccactcttcaattggtttatcaaacgatccctgtttaggtcgcttcagcccctcccccttgccgccaccatcgccgtcagagccgccaccgctgccgccagagcccgaaccatcaccgccgttgccatcgccaccggttgagccgcaatcgctgcctacatggccttggcaggggttattgccgccaccgccaccgccgcctccaccgtcgcctccaccgtcgccaccagggggattagagccaccatcaccgccaggaggattcgtaccgccatcgccaccaggaggattgccgccaccattgtctccaccgtcgccaccagggggcggaccgtcccccgggcccacgtcgcagccgaaagcacaggagcccttggaggtgaaccagttaccggtgaacgaaccgatgacccggcagaaggttccacccgcttcgccctcaccggggccgatacaaccatcaatcgaactgacggcgatctcacaaccgaggtaa

SEQ ID NO: 351734 - DNA, 351 bp, Pseudomonas aeruginosa
atggatattccttttctttccgacattattcagtggttccaaagtatttgggatttcatgtatcagggggtctatgatttctgtaaggactttcttatcctgctgacaaaaatggcgttcaacggctggcttgagttcaagctgtttacgttcgaagttgcgtacaaggcatttaacgagatagcagggcagctgcgcatatctcagtacctccaggctcaatacggttcgatccctggtgatgtgcgttcggccctggcgttctttggtgtgcctgaggcgttgaataccatattctccgcaatgggttcgcgcttcatgatgaagtttattccgttgataggccgctaa

SEQ ID NO: 351735 - DNA, 1275 bp, Pseudomonas aeruginosa
atgtccatcaagattcatcatggccctaatggtgcttataaaacttccggtgctattcaggatgacgcgataccggctttaaaagcgggtagggtggtaattaccaatgtccgtggatttactcgcgaacgggtgtttagcgttatgccggagcttcctgagtcggtagacgtaataaacttggatatggaatgcctggaggatttggagaaaatcaggacttggtttatgtgggcgcctcggggcgccttcctgatcttcgacgagactcagatattgtttccaaagtcctggcgtgaatcggacttgaaacgatttgattatccgggcggtcctgaaaaggctaaagcggatgatcggcccattggatggctcgatggttggactaggcatcgccattggaactgggatgttgtgttgacgacgccgaacatcggttatatccgtgacgatatccgtatgacctgtgaaaaggcttatctgcacgggaacttggccgctattggtattaagggtcgctacaaggaatcccagcattccgcccaagacaacaaaccgcctgcgcggggatcaatcgtcgaatatcgcaagatcaagccggagactttcaagttctatgactctacagccactggaaaagtacaagacacaactgcgggaaagtccctttttaaatcgcctacgttggtgggccttgtggtacttgctgccgtttttctctggaatggcctatctggctcgacagttggccttatcactggctcgactggtgtggtcactggtgaagcgaccggggcggctgatgctgatcgtcctgcggtggctgtttctgcgggtggtcctgcgcctggtgctgatgctgtcggtgatgctggggttcgcgtatctggtgcgcctggtgctgtagaggaactggatcatccatttgctggccgcaagttcctgatccgcggggcgttgcggtttcagtcgggcaagcttgcgtatctgtttgccattgctgatgaggaaggtcgtgaactccagatcgatgcccagcagcttgcacgcgctggctatgtgttggagcctcatggtgaatgcgtcgttgatctgacctggggaagctggaaaggccgtgcgctttgtccgggagccgctaccggcggcgcagcgagcgcacgttccggagcgagcagcgccgccagttcggtagagcccagttcgccggtaggcaatggcgggactcgggtgacgatcattcctgatagcagccgttcgcctaggacgttgtga

SEQ ID NO: 351736 - DNA, 1323 bp, Pseudomonas aeruginosa
gtgtgcctgcggctggcccatcggctcgaacagcagcaccgtggcgccgccatcctgcacagcatcgccgaccccgcggaggtcggcgtcgaacgctcctacgaatacttcgaggacggcctgttgctggtggaggacggcaaggtcgctcgcctcggtgacgccgaaaccctgctcggcgagatcggcgaggtcgaggtcttcgagtaccgcgacgcgctgatcacccccggcttcatcgatacccacatccatttcccgcagaccgggatgatcgcctcctacggcgaacaactgctggactggctgaacacctataccttccccaccgagcgccaattcggcgaccaggcccatgccgaccaggtcgccgagatcttcctgcaggaactgctgcgcaacggcaccaccaccgcgctggtcttcggcagcgtgcaccggcaatcggtggaatcgctgttcgaggccgcccggcgcctggacctgcgcctgatcgccggcaaggtgatgatggaccgcaacgcgccggactacctgaccgacaccgccgagagcagctaccgcgacagcaaggcgctgatcgagcgctggcacggccagggccgtctgctctacgcggtgaccccgcgcttcgccccgaccagcaccgcggaacagctggacatggcggcgcggctgctgcgcgagcatcccggcgtatacctgcacacccacctgtcggagaacctcaaggaaatcgagtgggtgaaggagctgttccccgagcgcagcggctacctggacgtctacgaccaccacggcctgctcgggccgcgctcggtgttcgcccatggcgtgcacctgtgcgacggcgaatgccagcgcctggcggagactggctcggcagtggcgttctgcccgacctccaacctgttcctcggcagcggtctgttcgacctgccgaagctggagcgctacaaggtcaaggtcggcctcggcaccgatgtcggcgccggcaccagcttctcccagctgcagtccctgaacgaggcgtacaaggtcatgcagttgcagggcgcccgcctcgatccgttcaagtcgctctacctcgccaccctcggcggcgcccgtgcgctggagctggacgaccggatcggcagcttcgccaccggcaacgaggcggacttcgtggtcctcgactaccacgccaccccgctgctctcctaccgcctgagccaggccggcagcctggccgaacggctgttcgcgctgaccatcctcggcgacgaccgcacggtgaaggaaaccttcgccgccggtcgctcggtgcatcgccgcgactga

SEQ ID NO: 351737 - DNA, 186 bp, Pseudomonas aeruginosa; identical to SEQ ID NO: 330356

SEQ ID NO: 351738 - DNA, 354 bp, Pseudomonas aeruginosa
atgaccaccaacactcttcgctacccatccatcgtgccgagcggcgagggaaagtcggtgctcgaagccgtgcttcggctgcaaggggtcgatttcatcactggcccaattcatctagacggctcagcagattttgctgcggctgatgatcaagcacatgaccttgaagcgtgcatggcaaaccttcatgacacagtgttggatgcgaccggcaaatccctgtccgataccgatctccacgaggttctgctcaaccttccacgcgctatccgaaagcaggtgaaaacctggggagtggcagacaccgaagtacgcgagcagatttatcggcacctccagaacacagctctgtga

SEQ ID NO: 351739 - DNA, 948 bp, Pseudomonas aeruginosa
atgacgcgaccattcgacctgatgcgccgcatgcgggccggcgtggcttccttgatgctgctcagcgccacgggtagctacgccttgaacaccaccgccatcgttgcctcggtggcctcgcccgattgcttggagtaccgggtggtgggtatctgctactggctctactgcacctggggaggatgcacggtgcgcacctctgtcaaggtgcgccactacatccccgatgcggtcgtctccagctacagcaacacgggcgagaacccgtgggttgaagtccgggcgatgagtacggccaatccgtccgcccaagcgggcggcgatggaacgacgaacgaggatcacgaaaacaatctcgcgaaattcaagaacgccgaggtgatcggccatcccggcgtcgaggtgttcaaccagtttgtttcgtcctcgggctacttctgcgagggcgcgggaacggcattcatgccgtatctgctcagcaccttggacacgcttgcctggcgctacaacgtgcccgagatggcctacccggaggcattgattcccggcatgcgcgaggtcggcgcacgcaccacgatgagcctttggggcaacgtgtatccccgcggcggcttcctgcaccagaccgacgaccacaaatcgggggccgtggtggcccagcgtgcgggagatatcgtcactcgccgggggcagttgcacgtgtaccagccgctgcttgccaacgcccgcgatggctactggcccgccggcgcgctgatggagggtgatgcctcgactggcaagtggcaggaactcacgcccgtcctgtcctcgtcctgcacggttttcccacgcaccggcttcctgacccaggcccagcaaggcgactacgcctgggcgctgtggcggccgtatgcctgctgcgaacgccgtggacaggtgttccttggcagcgttgatttcctttga

SEQ ID NO: 351740 - DNA, 330 bp, Pseudomonas aeruginosa
atgagcaagcatacgcctggcccatgggagatcgagcggtactctgagggcctgatccaaatagtcgggaacatccgcgcagtttctgagcacgaagagcatgtaacgactgtggtcgaagcggtgactaggggtgatgaggcaaacgccaagctgatcgtcgcagcacctgatcttctggaggcgtgccaagccttctcgcgcctgcacggtcgtttgtgggatgtcgtcgagccgagcgggtcgggcttcctctcacctgaatcggttaaggagtatgacgccattcatgagctgatgactgccgcaatcgccaaggccaccgcctaa

SEQ ID NO: 351741 - DNA, 960 bp, Pseudomonas aeruginosa
atggctactgaaatcggcaccgccacgaaccaccagaacctggtcgagcgcctcgtccagttcctcaccgcgaacccaaacctggtcgcggctgggcaggcctacgagaaggttttcgacgacaccatccccgcgtccggcacggccatcgccgtgcgccaggtgaccctgcgcgccccaggcctgggcggcaccgatagcatctacatggggattcagagctacggcgataccgccctggactactacaaccttcgcgtgatgggcggcacggcgttcaatcctggagcaatcccgcctggcggcgactactggaccgcgtttgctaactacagcccgcgggttcaggcgctgctgtggaatcagcccatgccgtactggttcttcgccaacggccgcaggttctggctggtcgtaaaagtctcgacgatctacgagtcggccggcgccggcttcatcctgccaccctgtccgccgtcgcagtatccgtacccgctggcggtggtgggttcctaccgtggcgacgtcgccacccgctggtccgacgtgagcgaccggcaccgaggcatcagtagcccgcttgagcgcagttgctatgtccgcgacccggcgggccgttggctgggcttcaccgtcgcatcgaacagcaacaacgagtccgactacagcaatcggacccttctgccgctcggttgcggtcgctacaccggcagcggtggcgaaagcgtggtcaaccagctccgagactctttcagcaagttccccctcaaggcgctgtcgttcgtcacccgcgaaaccgagggacgccgctacctgggcgatttcgacggcgccttctacgtgccaacgctcaactccggcgccgaagacgtgatcgtcgaggacggtgtggaccacgtcgttttccaaacggcttggcgtagcggtaacccttggctctacgcgatcaggaaggactga

SEQ ID NO: 351742 - DNA, 351 bp, Pseudomonas aeruginosa
atgcaacagaaaactcaaagcgcgcaagtcccctgcgccgttaccactgaccaccaggtttgcttcgatcctctcaacggggatgagttcttgttctccgttgttgccgaccggccggttgacgcggctctggccgccgccgaggacatcagcgaggcggttcacctgattcttttgagaatgacccgggcgatggacgatgccggcgagccgctgctctctcaggaactcaatactctcgccctgctggggagcatggctggcgcattgctcagagcttgccgggccggtgtcgcgacccaatccggaaatgctgaaaacgtgtcgcgacacgaaggcggtgcggcatga

SEQ ID NO: 351743 - DNA, 867 bp, Pseudomonas aeruginosa; identical to SEQ ID NO: 345942

SEQ ID NO: 351744 - DNA, 303 bp, Pseudomonas aeruginosa
atgagccagttcaaggttggggattcggctttgatcatcggcgccaatgtgctcacacagaacatcggcaaggtggtcgagctgagtgcgttcgtagaggacggcgacttgtatgtcggtcctgacgcagtgctataccgccactccgatatcggctgctggattgttcgcggggagggggtgttcttccgcacggacaaggaggtccgcgaaggattcggcatctgcgaagagcgccacctcatgccgttgcccaaggaccaggcgcccgagcagcagaaggcgaaggaggtggaggcatga

SEQ ID NO: 351745 - DNA, 207 bp, Pseudomonas aeruginosa
atgagcgatcgagtctgcgagtgtcatcgctgcatttgtgagcacaatcacggcaaggaaagccctttcggctggctgccgctttccagcatcaagatgattctctgtccgacctgcgggaacaaacgttgcccgcacgccagtgatcatgacttggcctgcactggcagcaacgagcgtggccagcctgggagcgtctaccaatga

SEQ ID NO: 351746 - DNA, 498 bp, Pseudomonas aeruginosa
gtgacgctccaggcccggctgctgacgaacaccagcgagggccagctggccccggcgctggccgccactgacagcctcacgctgacggggcgccagggtaagccgtatccgcccggccagttccgcatcaacggcagcgcgtacccaacgaaagtctacgggacgctgtcggtgagctgggcgaagcgcgaccgcatcggccaagccgaccagttgatcgataccacggtcggcaacatcggcccggaagctggggcgacggtgacgctccaggtctacagcggcacgacgctgaagcgcacctacgccggtctcacatccagtagctggtcctatccgctggccgaggacatggcggatggtccgctccaggacgtgcgccttgtcctgcgcagtgtccgcgacggcatcaactcttggcagcagcacgacatcacgattgaacgccacggcctcggtttccggcttggcgaagaactaggaggcgtttccgcatga

SEQ ID NO: 351747 - DNA, 207 bp, Pseudomonas aeruginosa
atgctgatctgtcctgtctggcggtttgggtatacctcggcaccgatgtgcgatttcaccgtctcgcagaagttcttgaagctgtccgacctggtccattcaaagcacagcccgaaaccctcggcatacagcttgtcggcagcggcccgccagctcgcctcgtccatccgcgtgcgggccagcccccggaagtcccgaccggtgtag

SEQ ID NO: 351748 - DNA, 201 bp, Pseudomonas aeruginosa
gtggcagagcaggtccggcaggttgccgcgctgcgcatggccggcgagcagcgcgcccgggatgccgcgcaggctgtggagcgggggcggcagcaggccgcggagcagtatgccggagcccaacgcctgctgagtcagcgaaccgccggtgagcagtgtgcggccgccgaggcggtcatcgatcaggagctgggtctatga

SEQ ID NO: 351749 - DNA, 240 bp, Pseudomonas aeruginosa
atggacccgatcacaatcaatctcgtcattctggcggcgtcgttcgtcctgtctagggtcttggcgccgaagccgcaaaagcccaagccaacagcctttgaagatatcgatttcccgcgctgcgacgagggcgacgagctggccgccgtgttcggtcagtgctggaggaaatcctggatggtgctgaccgtaggcaactaccgaacgaaggcgatcaagaccaaagggagcaagaaatga

SEQ ID NO: 351750 - DNA, 402 bp, Pseudomonas aeruginosa
atggctgagaccgctctcgacctccaggcgcagtcgcggacgctcttcggtgaagcgcgtcagcaccggcatcagcacttcgccggcgaggtcttccggcacgccgaggcgcagcacgccgtcgccatgggccgggctgagggcctcgctggcctcgtccgagagccgcagcaggcgccgcgcgtagccaagcagacgctcgccttcctcggtcggcaaaacctgccgctggctgcggtcgagcaggcggcaaccgaggttctgttcgaggcggatgacctgctggctgacggtggactgggtcagatgcaggtgttcgccggcgcgggtgaagttgccggtgtcgacaacgctgacgaaagtacggagcaggaccagatcgagcatgcacactcccactga

SEQ ID NO: 351751 - DNA, 267 bp, Pseudomonas aeruginosa; identical to SEQ ID NO: 330012

SEQ ID NO: 351752 - DNA, 1143 bp, Pseudomonas aeruginosa
atggcgctctatgaactggccgtgttagggcatccaagcgaactgcagattcaagagctgcagcgtttggttgccgaagtgcaggaacagtttgggctcggcgcagtcgaaatcgaattgcatgtttgccccgacagctttcggcctgacctccgatcgtgtgcagcagccctcttcgtcggcggcgcagacggggctagtttcgatatcgcggcagtggttgatcccaagacagttcccgtcttgccagttgccagtactgctcttcaggtgcccgcagaagtgccaccgatgctacgcgtactcaattgtgtctttctggatcaacaccccatggagcgagtgttttcagctctactggaatgcgttggcttattgccccgccagcgtagggtctttcttagctaccggcgcagcgagtcgaccgcggtagctgttcagttatttgccgaattgtctgctcggcagttcgacgtctttctcgacacccacagcattggcgcaggagtcgatttccaggagcagctatggcatcagctttctgacgtcgacgtcctactgatgctggatacacccgagtatttctcaagccgctggaccgatgccgaatatggacgtgcattagctaagggaattggtgtgctgcgggttcagtggcctgactccaccccctccccagtgacaggaacagctagtcgggccgaactactggccgaagagttcttggccgacggccaaatttcagctgaagcagtgcaacggatctgccgacagctcgaagcagtgcgtagccagagtcacgcgttgcgaacaatgagtctcatagagtccgtgcgcaatgcgatcgaacaaatcgaaggccaggtcaccggtgtcggtcctggtcgacttatgcaggtcaccctgcgcaatgggcgccagttgtccgtgcaaccgacactgggggtacccacggctgtgacgcttcaggaaacgctgctccgtgcggggcacgataattgcgcagtggtatacaaccactacggaatgatgaagagctggcaggagcatctcgagtggcttgcccagagggtgagcggatctcgctggatacgccaaagtgacgcggcttgggattttgcgggttgggatgccacgcgatga

SEQ ID NO: 351753 - DNA, 570 bp, Pseudomonas aeruginosa
atggctcgacgctgcttcttcagtttccactaccaagatgtgatcgatttccgcgccaacgtcgtgcgcaaccacaacattacgaaggacgacaacggcggcttcttcgacgcctcaatctgggaaaccgcaaagaagcagggcgacgttgctctgaaacggcttattaacagtggcctcggtaacacgagcgccacagttgtgttgattggatccaacaccttcagtaggcgatgggtccagtatgagatcatgaagagcattgagcgcgggaatatcgttatcgggattcatatcaacggcatccgtgatcggcatggcaccgtccgcccgcaggggccaaatccgtttgactacttaggcctgcatatcagtgcagacggcaacaccggcaccccgtacatctggagggggaatgcttgggaagcttacggtgacctcgctgcgttcgagatttcacagcagcccatggacaagcgagggaagttcttccagctctcccattggctcccaacctacgattgggttaccgacaagggcttcgacaattttgcgacctggattgcttaa

SEQ ID NO: 351754 - DNA, 444 bp, Pseudomonas aeruginosa
atggcgagaaaggtcttcttcagcttccagtacgaagatgtgcaccgtgcgatgaacgtgcgaaacagcggtgtcatcgcttctgacaccaaggtgggtttcatcgacaaagcagaattcgaagaggttgagcgcaagggcgatgctgctatcaagaaatggatcaatgatcagttgcatggcacgagcgtcacagttgttctggtaggtgccacaaccaacaaaagcaggtgggtgaagtacgagattgagcaaagcatcgagcgaggaaatggaatcctgagcatcgatatcagcaaaattgccgacctcaaaggaagtacaaccgactgctgttcgcttcgggttcctggcgccccccactacctgtggaacaagcagaacggccgtgacaatttgggcaagtgggttgaggccgctgcgaaagcagcaggcaggttgtaa

SEQ ID NO: 351755 - DNA, 759 bp, Pseudomonas aeruginosa
atggatcgcggcttcaaccttagcatcaataccggcccttacccagtcgacttttcgaaagtcaatgcctacaaggcagcgaaccagaaacgcgtcgaagacctagcccagctaatgatcgataaagatacatttgatgcgtcgctcattttggacttactatttccagctgttaacgctgacgtcttcctctctcattcctcccaagacgcgaacgaggcgatccaaattgctctggagcttcaggaaaattgcgacctaagtgtatttgtcgactcttgtatctggggttcgatctacgatttgctgaaggctattgataataagtactgccgtcgtgaaggtaatatcaactacgattacgatgaacgaaatcgctccaccgcccatgtgcatatgatcctcaccaccgcgctgcaacgtatgattgatcagactgacacgattattttcatgaacacagaccaatcaatttcgcttaagcactcggtaaatggagagaaaaagacgttgtccccatggatacacatggaactcaatttcagtaatctggtgcggcgccgctcccgctacaaaatggtggtggagagcaagcgtgcgctcgacggggtcgtttcgaacgaacagtttaaagttgcgcatgacgctcctaccaaccaccttacccctattgccgagagccagttccggaagtggatgctgcaggcgtcaaacctaaaaggctcgaaagctatcgatcacttataccgcaatttttaa

SEQ ID NO: 351756 - DNA, 417 bp, Pseudomonas aeruginosa
atggacgcaaagctcaaacacctcgagttcgttcaaggtgtggtcaatcgcctgtctaccaactcgtttctgcttaagggctggtcgatcatcctgatctcagcgctatttgcgctgtctgcaaaggatgctgataaaggtttcgcgcttctggcgtacattcctggtattgccttctggggcttggacggttatttcttggcgctcgaacgctgctaccggaagctctatgacaaggtccgaacaactgacaaagacagcatcgactttctgatggtgattgataaaggtcagggttggaaaaactggctcaaggcgaccctatccaagacgttgatcgtctttcacggagcggttttggtagccatcaccgcagtagtagtggtttacgtggtgaaggctcacaccgccacgtaa

SEQ ID NO: 351757 - DNA, 846 bp, Pseudomonas aeruginosa
atggagacctgcgacgaaacaatggacatcaagttcgatatcgcagacgtgcgccgtgacgtcgtcaaccaattgcgcgccgcccactatccggcagtgaaggagttctgcagggggaaacgcttccggcccaacaaccttccgtatttcaaattgctgagggcgatcgctcagagtgggtcatccaatgtcgaactaactgaattggcaaatagcgatcaaggagtacgcggcagcatcaacaatatcaaagaccgccgcctgccgattctgctggagtccaagccgctcgcagccagaagtttttactacaacaaagagacgacatatttctcaattgatgatccggcacttttctatttcttgcgtcatcttgactgggaagcgttgcgccgcgattgcggttttcgggagctggcggggaattatgaatatgatgtcgcgctttctttcgctggagagaatcgcgagcttgccaagcatatcgcgaatcagctgctggactttgacgttcctgttttctacgacgaatctttcgaggcgaattttctcggaaaggcgtggacaaaaaaatttaaagagattttcgcggatgaaagccgctatgtcgtggtgctactcgacaagcaccatgccgaaaaaatctggccaacgttcgagcgcgaacactttgcacctcgcgtcgctgatgagcacgttatccccatttacttggacgacaccaagtttgtaggaattcccgcggacatcattggcgtccgttttaaattcgaccaggatgaccccgaatggcgcgagaaagccgaccgagaaattgttgagaaattgattgataagctgacctga

SEQ ID NO: 351758 - DNA, 273 bp, Pseudomonas aeruginosa; identical to SEQ ID NO: 326662

SEQ ID NO: 351759 - DNA, 156 bp, Pseudomonas aeruginosa
atgcgaaacaagcgcaacaataaactgaacctattccacctagcagtgaccctcgcgatgaagcccctcgccatcaacagtctggcgctattgatcacgcaacggtacgtggacgatagaaagctaaaagagctgatatccagcaatggaggatga

SEQ ID NO: 351760 - DNA, 546 bp, Pseudomonas aeruginosa
atgaaaaagccactcgctgcgacgctgagcctacttctcggcgtcaccaccatttctgcacacgccgcagatgggatgatcaagattaccggttctgtcgtcggtagcacctgcaatgtagggggggttaaaaccgacaccggcggtcctggtggcacattgagcgcaatcaatgtggacctagaccctgtgtcggtatccgctctggacagcgagggcaagagagccagtagcaaacccttcaagatcagcctcaccggctgtaaagcggtaaaaaaggctcagatgaagttcgagacttatggagttgtcgacacccagacaggccacctcaagaactctggcagcgccaaaaacgtccaggtcgccctgacaactgatgacgatcaggaaatcaatcttgctcaggaggggggaagccaggttgtcaacctcaccgagggcgcggcagatatcaatctcagagcatcctacatcgctattgggggacccgccgagcccggcagcgtgaatactaccgcgatattctccatgaaatacgagtga

SEQ ID NO: 351761 - DNA, 2430 bp, Pseudomonas aeruginosa
atgaaatcctttccgctgttcaaaacagtcgactccctgtcgcttactcccgcaactgcccgcaggttgcttcatctgttggtggggctcttcgtcttgggcctgttctgcacctgcgcgctctatttctggtcgaagatcaacaacggcgtttcatgccagcgccgtctgatgaacgacgccgccggcgagatgctcctttattttggtcggcgccagatgctactcgagcgcctgggggcgctcgtggttcgcgactcgactctgccgaagcggacattggacccgcatcgtcaactgcctcgctaccagcaccaatgggtggccctgggggaggcaaggagtgcttggggagtcttgctttcggggcgggatatggccgacttggaccagatgggcgccggtttgttgtatgtcaggggcgacaaacgcccggtggttagctacctgcatggacgtttcgaacgtcgttcgatgttgcctgaaacggtactggatgctttggtattagaaaaaaacggtgccgacgaggaagcgctttgggtggctgcgccgcatgatccactacagcgaatctacctattcctcgccgtgcgccgggacgatgaagcgatctggctgggactcgagttgcgcggtagcgacctttcgcacgcgctggcttcgcgtttcggtggagcttatgcattgcaggatgccgtgcgccacgtggtccttagtagtgaaggtgcgagcgtcgaaggatttgacggttgcatccgtagcgaggatgcattcggcttctgtggcaacggtctgctgccgcagtttctgatactgactaaaggcatggggccttcggggtggcgcctaagctactaccttccagtggagaggctgttgtctccctattggtcaatatttgtcggttgcttgcttttctggggcagtgtggctcttgtcgtgcttgggctggcctggcgtgtcgacaaacgcctgatcaaaccggcccgaatgcagttgcgagatctgttgcaacatgatgagtttctccgcactacgcttgaagtcgctcccatcgctctttgcctgttgcgttgctcggatgctgccgtggtattggaaaatcgcctagccagacaatggcttggtcagggggacgggcgatatagcgagagtctcagatgggtcgaactggcccatagagcctcgaccgagtcgaattcgatggaggtgcagagtgccaacgggtgcatgatgcaactgaatttcgtgttcacccgttacaaaggcgaggaagtgctgttttgcgcctgcagcgacatcagtgcgaggaaacagaccgagcgggctttgagggaagccagggaggtcctgacttccactcgtgaatccaagcgtctgttcttgagcgcaatgaaccgggaggtacaggcaccgctgtacagaatgctggacttcttgacgtgtcttcgcaccgctgggctggatcggcagcaacggagcagcctggagtcgatgcagcgttcggtgctcaacctccagcatcttctgaacgacattcacaatgtttcgcaactcgaagaggggcgcattgtcctcgaaccgcgggagttctcgccctcgatgctgttgcgtgacgttgccctggcccatgctcctgatgctcactgcaaaggcgttgatctttatgtctgctgtgctcccaacatgccagagaagctctacggtgatgtggccctgatacgccaggtactggataacctcctggataacgccgtgaagttcacggatgacggcttcatcgccttgcgtgcccgggtgctggagatgagtcgcgggtgccaggtcatctggcaggtcagcgataccggatgtggcattcctgcggaacaacaaccggaattgttccagcctttcttccaggtcagcggcaagggaatagcggcgacggatggctccgggctgggactgaccatctgccactacctcgtccagcttcttggggggacattggaagttgtcagcgagagaggcctgggcagcagtttcgcgatgtgtctacccatgcaatgccccgccgaaaaaaccgttgttgcgttggccgcgagccagccagtgccggtgtatatccgctgccgccccagcgacctgagcgatgccttggcgggctggctgcaacgccagggaatgcagcctcgatcgtggcaagccggacacaattccggagcggtattgcttgagtgcctgttgctcagagaccggcctttgactgagcgggactggcatggcccacgggttatcgccagtgtccaagagccggacaaggcgagcatgaggggacgcgcccggcaggtcagcctgtatgacttggatgccatcggaaaggccgtcaggtcggcccaagagctggtcgtgcacagcgacctttccaactgctatctatcctga

SEQ ID NO: 351762 - DNA, 1026 bp, Pseudomonas aeruginosa
gtgaagatcattagtgtttttaataacaagggtggtgttggtaagacaacgtatatttatcatattgctcacttgttagagcgtggtgggaaaaccgttctattagttgatcttgatagtcagtgtaatttgtcggcttactgcctgagtgatgcggatcttgagcggagttggcgatctgagcgaggaaatagtatttggaatgctattgaaagagtctatagcggattgggtgatataaggactaggcaaccgactcggcttcagaagccacaccgctatggtgaataccaaaatatgtatcttgtgccaggcgatgtcatgttaagctcgtatgaagaccgcctcggtgacacttggagtagtgcacgtggtggcgatccactggcgttgcgggttcagtctgctatctatcgctatattctatggtgcgccggtaatgttaatgcagatgttgtcttgcttgaccttggtccaaatctcggctcgcttaatagggctgttcttggtgctagcgactattttgttgttcctgtctctcctgatcttttttcaattcgcggcactgagaaccttgggagcaagctacaaacttggagatctggctgggatcagtgcaatgaaaatggtggggggcatggcattgaactgccccgcgggcgaccgtcattcttgggatatgtaaagcagcaacacaatattcgtgccaacgccagcggtatgacgcgaggttggaatatatttggagagcgcactgaagatgccgttcaagagaacatagtcgcacgacttgatccgattggtcaggtctaccattggcctgatgggctttttgatttgggcagtatcccgaatctacacagtctaattccgtactcccaagaggccagaaaacctattttcgattgcacgggggctgatgggctgactggcgcacatatttctcgtgctagggattccgtcgataattttcaaccaatagttacgaccctcattaacgtcctcgacgccgaaagcaattcataa

SEQ ID NO: 351763 - DNA, 1017 bp, Pseudomonas aeruginosa
atgaccgaatcaaagatttgcacctgcccttccggggacgggtctctgcgctggccgtgcccgaaacatcctgcggtagagcaggcaggcggggatgagcgcgcggcgttcgaggtgtggatacacacctttgacctcccgcctcagttggatggcgaaatcttcgccgacgagcgttatcccgaagccgactgcttcggtcagttcgtctacgatgaccactctacgcaacgctgctgggccgcatggcaagcccgcgccgccctggcgcaaccctccccggcgctaccgcccttcgcggagaaggtgctggccaaactgcgccgcttttatgactgcgccagcgacttcgaatcgggcggcgtcgatatcggccggcgctggttggacctgctgactcagctcgggctgctcaatcgcgttcagcgcagcccggcactctgggagatcagccagcagggagaggatttactcggtatgccgcaaccctccccggcgcaggccgagcaggccaccgccgacgactacgaggaagtcctggccgatcaccgtcgtctggtgcgcgagttggacgtgctgctgaacggagaggaaggcgccgccaagcaggcaagcctctgcgatctggtcgctcaggttcgcactctccggctggttcacgacaataacgtgcccaccgacaacctgggtcagtccttgctgatgctcgaattcgccctgatgttcgccctctgcaacttccagcacgccggcagccggaacgacgtgaaaaaggcgcagacccggctgcaggaagtcctgcgcttcctctccggtaaagccaagggcttccacctgaacactaccgagctgggctattgcgccgaaaacccggacgtgctgcgcgccctggcctatgaacacgacgcccgcgctgcagcggccgaggctatcgatctgtcgggcgccgtcaacacccacgaagcccgtgccgccgtgctccgcgccgaggccaagcggatcgaggatgaactgtga

SEQ ID NO: 351764 - DNA, 2031 bp, Pseudomonas aeruginosa
atgattgaatcgatcactctttccggcatagcaacctatagccccgtaacccccgaaacgattcaaaacctgaaggccgtgaactacttctacggtgcaaacgggacaggcaagacaacaatcagcaggctgatagctaacccagccctatcaactgcctctagggtctcgtgggctaagggcaatcagattccggcaatggtctacaacaacgatttcatcgctgcgaatttcactgattcgaagcagttcaaaggcgtgtttacgctggggcaggctgagcaggcgcaacttgatcgcttggaagagctcaagaaggaaagagaacgccacctgcagctcaaaactagagcacaagaaaatctgaatggcccggatggtaagagcgggaaggtcgccgaaaaaaatgccttagaagcaaagctagtagcacggtgttgggaacaaaagcagaagtatgatgacgagtttcaggaggcttttagaggtctgagaaacaaccgggaggccttcaagaatagggtcttacaggagagcaaaattaacacatcccatctggatgatatcgaagatctacgcaagcgcgcagaggtactttatggtggcacatcctctcccatgaatgttgtccccaaacttgacttgtctcgcttggtcgatcttgaacagaaccctgtcttaagcaagaaagtggtcggcaaagaagatgtcaatgtatccgcgatgatccagtaccttgggaatagtgactggattagacaaggtatgaattacttggatcataccgaaggtaactgccctttttgtcaacagaggctaccgcatgagttcaaaaaagaccttgaggaatatttcgacgagacatttgaagctgatactaaagctttatcggagtttcgggatgattataacttgactgcagatagtctattggctcaggctcaagtgatcatggccacagattgttctcacctagataaagataagctcgatcttgaattgcaggctctgagcgcaatcatacaggtaaacagacagcgaattgatcaaaaggtggctagtcctagcatcaatgtggcgttggatcgtcttgaaaaaattccgcttagaatatctgacctgatcaattcagccaacctcaaagtctctgagcataatcgtcttatttcggaggctgccgctgagcaggatagattaacagatgcggtgtggcggtatcttcttgatgttgaacttaaaggggttcttactgattatgcgcaagatattcatcgtatcgacaaagcaattgctggtatcactgcaagtataggtagagcggtcgcggatatatcggcgatagatgaacaaattgtagaaattgaaaattcgctgacaagtgtaaggcctactgtcattgctattaataaaattctgaaagacttcgggtttcgaagtttctctctggatcccgcatgtgctgataactcatatcgtctgattagaagtgatggggctgatgctaaagcaacacttagtgagggcgaaaagactttcgttacctttctgtatttctatcatttgctcagagggagtgtcacgacttcgggtatcagtactgatcgaatagttgttatcgacgacccggtttcaagcttagatagcgatgttctgtttatcgtaagtagcttgatcaaaaaactttttcacgaagttcgccagaaggggagtaacataaaacagatatttgtcctgacccataatgtgcactttcataaagaaataacttttaacccgctgcgatctggtgatagcgctattaaggacgagacgttttgggtagtacgtaagcccgaccattgctcaagagttgaagggtttgagaataaccctatcaagacatcctatcaactattatggacggagttgtcgaaaaaaccattgccggtgcttaccattcaaaatactatgcgcaggattatagagaactactttaagatcctagctgtctcttatacacatctgacgctgccgacgatatgcagtgtgtag

SEQ ID NO: 351765 - DNA, 633 bp, Pseudomonas aeruginosa
atgagaaggtctcggccgggcgttgtgcgttttcacagcggcctaggtgtttcggcccgaaacactcagtcaggtcctgacctcggcgccggcggcgaactgggtgattcggcccgaatcacttcgccaggtcctggcctcggcgccggcggcgaactaggtgattcggcccgaatcacttcgccaggtcctggcctcggcgccggcggcgaactgggtgattcggcccgaatcacttcgccaggaactgacttcggcgccggcggcgaactgggtgattcggcccgaatcacttcgccaggtcctggcctcggcgccggcggcgaactaggtgattcggcccgaatcacttcgccaggtcctggcctcggcgccggcggcgaactgggtgattcggcccgaatcacttcgccaggaactgacttcggcgccggcggcgagctgggtggttccactggaaccacttcaccaggtcctggcctcggcgccggcggcgagctgggtgccttgctccgagtcgccatgggaaattccccagcgacgaaccatgtatttcctactgcgcgctcctaccccgatcagcacgatgtggccgaaccccttccctatataggaacactgcaccatggctga

SEQ ID NO: 351766 - DNA, 894 bp, Pseudomonas aeruginosa
atgaatgaactacaagtaataaccgatgcatggggttactggtttgcaaaaagaaacggactttctctacactttaccgcgagcaccaagtattcaggaaactggcatcttgacccttaccaccgctatgaggttgaggtcactccattaactagcactctgaggttcggaagccccacactagtcaactcgaatgtcggatataaagataaaaaaacaatcaaaaacgatagcagcactgatcagaccactgaaatagacttctcctacgatagaacggacacattcaagtggtcagttaccgaagcattaaaagtcggtgtatctgtaaagggaggtgttgaggttccactacttgccaaggccgaggcatctgccagcactgaaatatccctttcttccacacaggaaacgactaaggccgtcaagcatacagtaacaactaaactaccccttaaagttgcaccatacaaaaaaattgtagcaaacgctaaagctctcgttctagagtacaactccgactggcaaatgtcagccttccttcaaggaagtgttgcagtaagatttaatgaatggtttaagtggaacacccccgaaaaacatgccttatggttcattccaattgaaaccatcttcagcgacgtcatttatcataacattattgatgcaagtggataccaggtagtaaacggtggagtacatgctattgctcgcggcacatgctcctcgctattcagcaacagcattgacatagacatcaaggaaggaaatctagatgacgacttggaaagtatgaccaccaaacatatttatgcctacatcgaggatgacaaacagatcgacgaaacattcttatatagtttcaatggaactccaggccaagagactccataa

SEQ ID NO: 351767 - DNA, 843 bp, Pseudomonas aeruginosa
atgccatacttcaccctagaagaaaaagtagatatcaaaacttacccgtttgactatcacaaccacttttccggagtgttaccactggagagcgatatactctggcaaagagagaaaagcacatttaattatgaaagctcagcaatagaaataaataaaaaccaagagctttcgcttattggactaatcctagcatcctatgaaagtagcatcaagacatctgaaaaaaacgcgcccaagccaaaagataaagcccatatcgagctattcaagctagccttagacctaatgatagaaagcaacccctttaaaggtctcagaacggaagattacattagaggagaatgtgtagcagaaaacatatatttggcatgttcaataattcaacatcgactcacaaaggaacgcacggaattccacatcgaaactccacacatctaccaaaccacaaaagaaaaacttgtcccgccttactcctcagaactcattgagattatcaagtattttaatagaaaaatctggagcggcaacaagtacactccttttgatgatgcatattgggccagaggcgtaatccgcaaaaaattccccctaatctacaactctctaacgctgtgttttctactggagacaggaacatttttcactcaaacagcaatgggagcaagtgattttaaaaagctaaatagcacaattaatgaattcaacaaaaatgaaaaaaccgcttacagaattctagcacatactgcacagcataaccgacttattctcttcgacagaagaaccaaatttactagcaggcatagatctacttggagcagagactcaaacaggattctatga

SEQ ID NO: 351768 - DNA, 1071 bp, Pseudomonas aeruginosa
atggacgctccatattatccttgtaaaccaatttattctttaagggccctctccttatttttgggggagcctgctgaaactcttttgcgtctctcaaaaaatgcggatcatatgtatcgacttgtgccgcagaaaaaaaaggacggcagtcttagggaaacctttgatgcttacgagtcactaaagagggttcaaaagaaactagtttcaaggatgtttgggaaggttagatttccagcgtatttacatggtggaattagggattttaattcgccaagaagcatatttagtaacgccggtgttcacgctggcgctaaaactgttgttttgcaagatatagaggatttttttccttctattagatttgagtatgtttatagtatgtatcaaggtttttttggatttgagcattctgttgctgaggttcttgctagattaactacaaggcatggatgtgtccctcaaggagcatgcaccagtagctatatcgcgaatttggtgttttgggatgttgaacctattgtttacagagcgctcgcagaaaagggggtgagatatacaagatttgctgatgatatgacgatttcttctgcgattgaactatctaatgatgatattggtgatgttatctctcgaatcgtatcgatgttgagaagtaaggggtgtaggcagaagaggagtaagttaaatgtccgtagaagagggcaaggtttgaaaaaggctgaggggtttgagtctttaactgtcacggggcttactgttagtaactttcacggcgtggggattacacagaaggaaagaaataagatacggtcctctgttaaggaaatagagattaaggcgcatatggatatgccttggtcggatttggaggttctttatcagcgagcgatgggaagagtcggaaggcttttggcttgcaaacatccagaaggggaacgtttgaaaaatagactaaatacggttaagtcattttatgatgtctctaatgcgagggaaacaaaggttgtaatgggtgataaatttgttgttttagatgcttcgggtgatgtgcctccttgggaggggtaa

SEQ ID NO: 351769 - DNA, 273 bp, Pseudomonas aeruginosa
atggaagagtctggaatagtggggttcaccgtcacaggtgcggtggagaaggtcacggacttccgcaccgcgccgttctgctcgcaggcggtcttcgcgcagatgctgggcctggaagacatcacggaagacgtggtgcggggctgggtggaaaccaagacgattccgactgccaagattggccgtcgccgggtggtgaacctgcatcgcatccgccgtgacctcgaccggggcaagtcgatcttctgccagggggattacgacggtgactaa

SEQ ID NO: 351770 - DNA, 288 bp, Pseudomonas aeruginosa
atgaccgccagtccctactacctgcgccagacccacgccccggactgcgcctgctctgtgtgctggtccgcaaggcaggtcatcccattgcacagcccgtcgccgtgtccggactgccggccccctgggctgccttatctggaagatggccgctggctctgccgtccccgttccttctgcgtgaaacacgacccgtcccggcgtccgccgaagtactggcacgttgtgtacgacagcgggaaacccacgcccggcgttcgactgcacaaacctttcgtcctggagtga

SEQ ID NO: 351771 - DNA, 645 bp, Pseudomonas aeruginosa
atgagacagccaaccgcactgattgcctgcgagttctccgggcgtgtccgcgatgcactggcccgggttggtttttacgccgtgagctgcgatctgctgccttcggaaaccgaaggggaacacgtccagggggatgtcctggaaatgctggactgggggtgggatctgctgattgcccacccgccctgcactgacctggctacctcgggtgcccgctggtttcccgagaagattgctgacggtcgtcaggcacgtgccctggagttcgttcgtaccctgctgtcggcgcctattcgattcaaggcactggagaaccccaagtctgtgatctccagccatattcgcaagccggaccagatcatccagccctggatgttcggacatggcgagcgcaaggaaacgcacctctggttgcagaacctgccgcttctggagccgacccgtatcgtcgatggacgttctccggtcgtgcattacatggcgccaggccctgaccgctggaaggaccgtagccggacctatatcggtatcgccgaggcgatggccgagcagtggggccgttatgtgatgcgggccttggcggaaccagaatctgtgagttttcacccccagcagcaggacctgctgcgtgtcctggagggctga

SEQ ID NO: 351772 - DNA, 273 bp, Pseudomonas aeruginosa; identical to SEQ ID NO: 351769

SEQ ID NO: 351773 - DNA, 288 bp, Pseudomonas aeruginosa; identical to SEQ ID NO: 351770

SEQ ID NO: 351774 - DNA, 645 bp, Pseudomonas aeruginosa; identical to SEQ ID NO: 351771

SEQ ID NO: 351775 - DNA, 645 bp, Pseudomonas aeruginosa; identical to SEQ ID NO: 351771

SEQ ID NO: 351776 - DNA, 288 bp, Pseudomonas aeruginosa; identical to SEQ ID NO: 351770

SEQ ID NO: 351777 - DNA, 171 bp, Pseudomonas aeruginosa
atgctgggcctggaagacatcacggaagacgtggtgcggggctgggtggaaaccaagacgattccgactgccaagattggccgtcgccgggtggtgaacctgcatcgcatccgccgtgacctcgaccggggcaagtcgatcttctgccagggggattacgacggtgactaa

SEQ ID NO: 351778 - DNA, 645 bp, Pseudomonas aeruginosa; identical to SEQ ID NO: 351771

SEQ ID NO: 351779 - DNA, 288 bp, Pseudomonas aeruginosa; identical to SEQ ID NO: 351770

SEQ ID NO: 351780 - DNA, 171 bp, Pseudomonas aeruginosa; identical to SEQ ID NO: 351777

SEQ ID NO: 351781 - DNA, 645 bp, Pseudomonas aeruginosa; identical to SEQ ID NO: 351771

SEQ ID NO: 351782 - DNA, 171 bp, Pseudomonas aeruginosa; identical to SEQ ID NO: 351777

SEQ ID NO: 351783 - DNA, 171 bp, Pseudomonas aeruginosa; identical to SEQ ID NO: 351777

SEQ ID NO: 351784 - DNA, 288 bp, Pseudomonas aeruginosa; identical to SEQ ID NO: 351770

SEQ ID NO: 351785 - DNA, 171 bp, Pseudomonas aeruginosa; identical to SEQ ID NO: 351777

SEQ ID NO: 351786 - DNA, 171 bp, Pseudomonas aeruginosa
  misc_feature (31)..(31): n is a, c, g, or t
atgctgggcctggaagacatcacggaagacntggtgcggggctgggtggaaaccaagacgattccgactgccaagattggccgtcgccgggtggtgaacctgcatcgcatccgccgtgacctcgaccggggcaagtcgatcttctgccagggggattacgacggtgactaa

SEQ ID NO: 351787 - DNA, 171 bp, Pseudomonas aeruginosa; identical to SEQ ID NO: 351777

SEQ ID NO: 351788 - DNA, 378 bp, Pseudomonas aeruginosa
atggcaaagaagtcagccgacgacaccaaacgtaaggaaaagggcatccattgggtgtcgcaaacaaaaaaagaaatggggaaagtgcctcaagctaaatcgagtaccttcctcacagacttgattatgctctcgaaatcaatgagtccgttttcgaacaccaaaaacctgaaagggtttgatggcggtgtagtagagcttattcaaaatggtagtccggcctaccggtgcgtgatttacaccaaagatcccggaaagatctgggtgttgcacgtaaaagcgaagtccgctcaaggcacagatcggcagctgattgagacagtcaagcagcgcctgacagccttgaaggacgagctaaggaagaataggcggaagtag

SEQ ID NO: 351789 - DNA, 141 bp, Pseudomonas aeruginosa
atgtgtgagcggaagaatgaggagctgtgtctgacacaggaggagcatctgttcctggctctgttcaggctgttgaacgagagggagcaggactttgtcttacgagcgatgcaggcgctgtcgcaggtgttgccgcagtga

SEQ ID NO: 351790 - DNA, 999 bp, Pseudomonas aeruginosa
atgccaacagcagtttcacttttctctggatgtggaggatccgacgcaggcgtcatcgcggcgggtttcgacgtcataatggcaaacgacatcctcccttacgctcgcgacgtctatctagcgaactttcccgaaaccgactaccggctaggggacatccgccaaattaacgacctaccagaggctgacttacttgttggctgctacccctgccagggttttagtcaaggcggtgcacgggaggccaaccgaacaattaacaccctctatttagagtttgctagggcgctgggtatcatccaacccaaggcattcatagcagaaaacgtatcgggattacgccgtagcacgtacagacacttacttgaggaccaactgactaaatttgcggaagcaggccaccatggctacagagtctattggcaacaaataaatgcacatgactttggtgttgcccaagaacgcaaacgggtagtaatagttggcatccgtaaagatatagatgcagagtttaagttccccacaccgactcatggtcctgatgcggatcaaccctacttcagcattgcccaagcattggagggactaccgagttggcctgagggagaattctgcgaggaccctttccactggtactatttatctcgaaatcgccgtagggactggaacgaaattagcaaaacggtggtaagccacatgaggcatatgccgctgcacccgataagccctccgctacgccgtatacatactgataaatgggagtttgaaactgaggaacgagcacgtcgcttttctttccgtgaagctgcccgtctacagggcttcatgcctcgctatacgatgcatggcggcgatatgattttccccgaaactatagagagcagtgtcagggacgtgacctacaatatgttaaggcagcgttaccgtgtaatagggaatgccgtgccaccgcctatgtttgatgcagtggcatcggcacttcctgacatatggaactaa

SEQ ID NO: 351791 - DNA, 969 bp, Pseudomonas aeruginosa
atgtatattccagataattccaattggtttgatcgtggagctctattgcaggcagcaagaaatgctgatgaaacagagtttgctgcaatgatggagggaggggcagtacctctagagagggggattcgcgatgatattgtggcagaggaacatcatgctgatattccagagcacgactatacttggcgtgacgaggaggccgcaattgattttattgcagggcctttaatagccgagatagatcgtcgatcagaacttttgggaggttactacccttttgaagtggttaactcctctttgcgttataaggctagtgcttctttagtttatgagttttgcttggcggtttctttgcagagaaatctctcgaggaagccgtttaataaatatcctcttctttttgagtttatagctgctgaagccgctagatgttatctcggagatgaagcgtccacctataggactggttggcctcctcataatcgcactgagcgcccttctaagtttaacttattgatggaagagttatgttcgcggactggcggtgagtttccttggcgtcccacttcgccactacctaaacggtggcatgttgaggccccaaaagatgaaggtatggactttgttgcctggaagcctttctttgatcagcgtctagggcagctattcatacttgggcaatgtgcttgtggtgatgactgggagaataagctcgaggagcttcaagagaatcgactaagacggtgggtcaaccctgtaactcatgctcagttcatcagagcatttgctgtgccgtaccatattcctggacactatattttctcagagctgaatgtcagggctgggttgacctttgataggattagaatcgctctgctggcggggaaaaatgagaacgtttttgttggcaagttcagggagagtattgagagggtgctctacgaaacactcatccctgagaagcattag

SEQ ID NO: 351792 - DNA, 1140 bp, Pseudomonas aeruginosa
atgtcaagccagtcggcgaaaacagcttacgtgaagctgaaagacctaaatcttgattctcgcaatcctaggtttgggatcgagaaagggcagcgaggaaatcaagctgatattcttgactttatagttgagaattttggtgttgaagatgtgattagttcgcttgcatataatgggtactttgcagcggaaccgctaattgctcgtagggaaagtgacgatacattaacagttgttgaaggtaatcgacggctctctgcttgtctgatgctagcgaactccgatcgggcaaaaaatcagaggcgaagagcacaagagtacgtagatacaaaaaaaattaattggacggaagagactgaggtccctgttcatattgttgatcataaagacaaagaagcattgcgccttcatgcctaccttggtgttaggcacatcatgtctgctaaagcgtgggactcttacgcaaaagcagcctggattgatgaagtcgttagtagcggggagatgacgctcgctgaaatagggcaagtaacaggcgacaaaaatagaacgattcagcgtctgcttgagggctaccacttcgtcaatcagttgattgccgaaggactgttcttgccaggtaatagtctaaagaaaggtcgaggaagcaatcctgacttccctttttcatgggtgtacacccttctagattattcgcctgttcgcgaatggcttgatctagagggtaatgatccaaccaataaaaaaccaatcaaacctggcaagactgctgactcggcctctcttgttagttatatgtttggggataagaatagaaatcgaattgcagccattaaggactctaggcagttaggccttcttgcaaacgcaatctcagaccctgttaaacgtgagtacttggagcaaggggcaactattgagcagatcgaggagatgtcccgcgcacctgctgataagcttgctagagctcttacagccgctcaggcaagcctctctgctgcgctttctattgcatctagcgggggagggatatcggggggtgaactaacttcgttggtagcgaaaagcaaggaagttgcaagccttagtgccagtcttttcaaaaaactaagagacatggatgagccagagtcgttctaa

SEQ ID NO: 351793 - DNA, 1050 bp, Pseudomonas aeruginosa
gtggccatcctcgatcgccagctcgttcaggctgcgccagtcgctgccggcgcgtaccagggcgagccgcacccaggtccgccactgcaacgatggcacgcggtgcatcgggcccgcggcctcgatgtcgccgggcagcggcatacggccgaggatgtcgccgacggcgcgcaggctcttcttctccggctcgtacaggaaggctgggaccttttcgatgttccgtgccaccagcaggaagcgcttgcggctctgcgccagccctcccaactcgccgcagtcgtgggtggtttcggcgttggcgaagccgtagtggccaagcaactggccgatctggtcgagcaggtgccggccacgggttgccaggcgtgggacattctcgaaggcgatcagcggcaccgggtcatccgcccaggcctcgcccatcagccagatgcagcgcagggtcagttcgttgagggcctggtagcggggagttttcgccttttcctcggacagcaggccgctcgcgcccttgcaggggctggaaatgaacacgcaatccggtcttttgccgccggcggcgcgacggatgtcctccggggttgcctcccgccaatcggcgggcggctcctttccatggaagcggatgtattggtcgcgggtgaacaggtccaactgggtgcctggtacgccagccagtttggcgaaatcgcgcaagacgcccgcatcgacgtcgatgccaccgagacattcccagtgcgcttcgacattgccgacgcgcgggcgcgagcggttgaagcccttggcgccgccgcccaggccgcagcagaagtggaagtggtagagggtacgcttaagcatgccgccgccctccctgcgttttcctggccgccaggttggccatgtagctggcccactcgacagccttggcctgttggcgaattcggctgcagcgttggtgtttgccggtggaacgtgcgttgccgcagatatcacagatgctcggaaggtccagccgcttgctggccatcgctgggcgagtgcgagccgccgacgtggttgtgctag

SEQ ID NO: 351794 - DNA, 510 bp, Pseudomonas aeruginosa
atgtcctctacccaacaccaactgatcgagcaatgcgccacccgcctacgcggcatcgccgaagccctggacaacatccacgacagcaccccgcaccgctggtcggcggacctcgacgatgttcactcttgcgccgagagcctgctggccatgatcaaggaccaggcgccggcgctagatgcccagggcctggccggcgccgccctggagcaaccatccccgacgccagtgtgcacaacgccgacaggcgagaactatccaggcgatggcgtgaaaagctgcaagaagtgcccagagcaggcagaggcagaggcggagcagcctgaagtcgtggccttcatccacgaacgaaccggtgccgtagcgaatgcagaaatggtgcgggccatggaggaaggctcagtgctgtccggctactccatcggcctggtcacgctcgcccagcacgaccgcgacgttggagcgctgcgggcggagaacgcgaagctgagcgaagccctggaccgctga

SEQ ID NO: 351795 - DNA, 900 bp, Pseudomonas aeruginosa
atgaaagcagtgcagtggacagtgtttattgacatgctgggcttcaagaagctgaactcctcggttaccactgatgaccaggctcaagatctcatcaaattcatgacctcgaacagggatgaattggtacaacttgagacgcatgttcagcaaggctacaagaaatacacggtttttaacttttacgaatggtacgaggtgaaaagcgcgttcatctccgactctatcgtcgtcacgttcaaacccaaggacgtggtttgggagaaaaatgctgacagggtattgatgcattcagccaatgctttgatgatcatcgctatgcgcctgggtgctctgatgcacaagtgcctggtggagaaaaaaatcaccttccggggtggcatctccacagaatattgcgacattagtgaaaactttgcggtcggtgcaggcctcagctcggccgccgaagcggaaggtagggctacctttgcccggctggctctggcagaggatgtcatacgcaacgcgaagttggtgaagcagatctgcacgctgttcaaactgatgtacggtgactcggagtttctggtcacagaggccggggtcacgtatgtcaatactctagacctcatgcttgcagcagccgatacgcgttccccgtcagtagcaaaggcaatatttactcgccctggaagggacgcagttataggagcgcgcgaacagatcgaggtcttcctgacggctcagaaagccttggtgatcaagtcgatccgagagatgtatgcggcttaccgtaaggactatgcggatgctgaccgccgaaaaagccaccgtcgagttcttaaaaaatatttttggttacgtcggtatcacaatgctgccgctgaaaagcgcaagtttcagacattcaagatctga

SEQ ID NO: 351796 - DNA, 1794 bp, Pseudomonas aeruginosa
ttgactgttcgtcaagtgataacgccccacattctgttgtcggttgttgatgccatcaacagcggtgcacgcacccacacagacagtagctgggtgctgcatccggaaggagaatggtcgctccggttcgtagcgcgtctttccgtaccgccgactgactttgtgccaagcgaatcgatctggcagctggtggtctggacaacccctaacggggaaacagctcacgtttatccagacgctactcacggcatcaccgctacattccctcaccaggattacaacggcgaagcgtatccaccgcgtcattggaggctcggcaaaccttgtttggaaaaacctatcggagttttcaatcgcactagctggtcgaacgaacctcgcaacttggccgaacgcttgtcctggttgctgcagcgcttattgaactggattgacgcggcggcaagcgactcccttcgcgttgagggagacccacttgagcttccgcccctacccggacaaaccctctttccactgttggggtttcgagaaattgccggcggccttccgcagtggatgcctcgccaagggagttgggggtacgcaagcacaagccagttgagaggggctgatggcactcgggtcataacgtcatatcaactggccgacggcgagatcttcaggaccattgaatggtcgccttcgatgctgcgcaaagaacgtacatcagatgccctgtggcttgtcttgcctgagatgccagtagcgcctccctggcaagcgcctaagtcttggatggaactaaacgaacgcctagcagctaaccacgtcgatcttgaaaaaatactcgttgacatggggcgcgcggttcggcgaagtcctcggagagctccgccctgggtactacttctgggattcccgatcgcggagcgagttgggttagcaccatcccgatttcactggcttgcgattaaatcccccccacttgccaacaagacagcgcggcgaaatggattcagatcctgtgagcgcaaccatcgtcaatgggatgctgaaattgctatatccaaggaacccctgaagtggcagcgcacagccaactgggcctcggaccaactgagaacgaggggagcggccgagagtgagatgtgcgggcgtcgaattgtattgataggcgcaggttccctcggaagctcagtcgcagagaacctcctccgtatgggcgtttgcgaactgggtattctggattacgactgggtgatgatgggcaatctcagtcgccatacgctctccatgcaggcggtggggcacaagaaagccaaggctcttgctgcacacctcaacggatgcatgcccgatgcaaaggtcagggcgtttgataccgtgtttccgccccatagcgagcagatcaaacaagcagtcagaagctatgacgtgattgtcgactgcacgggcgacgatgaagtattggatgctctggcttcattcgattggcagagtgaaaagctctttgtgagcctagctatgacgtggcgagcggaaggccttttcgcgtatgccgcttccgaatcgagctttccagccatagatgccaaggcccaattctccgcctctcccaccccgtccttcgacgacttagacgcaaagatcgaaggtatcggatgctggcatgccgtattccctgcgaccgccgatgatgttcagctatggggagcgattggtagcaaattcatccgtagggccgtattgagtccacgaaggcactacgagtatttccggcaaatgccggacggcacagtcgagcatgcaaaatga

SEQ ID NO: 351797 - DNA, 1143 bp, Pseudomonas aeruginosa
atggaacttaaacctcaattcgcggagttcctagcgggaattcggccaacgccttcacagcaggaagattggaaagtcgggtcgaagaccttgcgaaaccggctcgagtccgatgagaaactcaagggcatcgtcgtagccaccttcctgcaaggcagcgttcgcaggtcaacagccgtccgccccctgggtgagaaacgtccagacgtcgatgtcgtggtggtgacgaatctggattacaaccgacttacgccgaaggaggctatggatctcttcgagccatttctggagcgttactacaaggggaaatggcgaccccaggggcgctcgttcgggattgagctttcctatgtggatctcgacctggtaattacggctctgcccaccgacggcccgagtcgcagtcttctagaacagctctaccggtcgcagtccgtgttgaccactaactcgctcgaagaagagaccagctggcgattgaaccgcagttggacaccacctagcggtctgctcggcaatgcgacacctcttcaggacgcgcctcaggaagagtggaagcctcatccattgtttcttccggatcgggatgccggcaattgggggcgcactcacccactcgcgcagattcaatggacggcggcaaagaatcgagcgtgcaatggccactacgtgaacctggtgcgagcaatgaagtggtggcgccaggagaatgcagaaagtcttcctaagtacccgaaaggctacccactggagcacatgatcgggcatgtcctggccgacggtaccacctccatggcgacgggcctggttcaggccttggagagtttcagggatacctggtcctattatgacctgctcaatacagtcccaacacttgccgaccacggtgtcccagagcacaacgttctcgcacgcttgccggtagaagacttcaaggccttttacgcggcagtatgcgaagcggccaagctggccaggaaagcgctcgatagcaccgacgcccaggagagcggtcagttgtggcaagacttgttggggcgcaagttcccactgcccggcccgcaaggtggtgacaggtcgaatggcggctttaccgcaccgaaccactctgcccagcctgacaagactgagcggttcgcttga

SEQ ID NO: 351798 - DNA, 1500 bp, Pseudomonas aeruginosa
atggcaaacgcggtttcggccggatggcacgggcatgattatcaagcccgatttttctggattcatgcatccgcattaagggaccctgatcagtcacatgtcattgaggtctcctacgaggctgacggtcctaaagcgttcgacgacgtgattattcgctatgacccgccgcgggcgagcacggggccggtgcgcatctcggttgactatcaccagatcaagtttcatgtcactggcgcaggtcgattcggctacgcagatctcatcgatccggccttcatcggcgccgaatcggtgtctctcctagaaagattgaagcaggcaaaaaagagcgcacctcagaactctgcttatcaccttgttacgatcgacagcgttaaagatggcgatccactgggtgagatcatttcagccgtggactattccctgcgccttgacaagctatcggttggaaaaacggacaccagtaaaatgggcaaggttcgcaagctgtggcgcgaacatctcaagctcgaatcggacgacgaactgaagaaggtgctggagggacttcatattgcaaccgcccaacggtctctgactcagctgcgcgaagaagtgaaccttcgcttccgagtagttggcctgatcagttgtcatgacagttccgaattccgcttcgacgctgctgcaaggtccctcaagagcaaaggcctgtaccagtttacgcgtcagcagttcgaaaccctctgccaagaggaaggttgggttcgttccgatcctcctgagaatctcctcaacgtagcccttcgctcgtttgcagatggtccaaccgaccgtatagacgcgttaccggaaaacactctttcactattgcagcactttgacggccgtcacctcagaccaggcgagggttgggcatctgtagttcaacccgcggttgagtcgttcctggcccgaataaagcaatcggaacgccgtattcgactgtttctggacgttcatacctcaatcgcattcctggcaggacgatgcctcgggctgaaatccggcatggaggttgagctcgttcagaaggggcgctcagggacatctgtttggcgggcagatgacggcaaagataagagcgcaaccgatgtcactgttgaacaactccatgctggtccagacattgcgcttgtgttgagcatatctcgagatgctgtggacgatgtgagggactacgtcgccaagcagccgacgataggcaagattttgcacatcacgcctatagaggggccaggccaaaacgctgtagcgggaggagcccatgccgcccgcctggcggacgacgttgccaaggcagtcgccaaggctagggttccattcggcgctcaaatccacgtatttagcgcggcgccgaatgcggtcaatttctttgtgggtcaacacgtcgaagctatgggcccatgtgttttctacgagttcgatttcaaccgtcgcgtcgacggtagctatcaacccaccttcaaggttcaatga

SEQ ID NO: 351799 - DNA, 291 bp, Pseudomonas aeruginosa
atggagcaagcaatgagagacgagtttgaagcgtggtggaatttgccggcgcaatcggaacttcgcaaatcctgcgcaaggggatgggccgaggtcatctggcaagccagccgcgcggctctgagggtggtgttgccggaggttggcagcgcacctgacggggcgaagtatgaccttgggttcggcgacccaaagttcgctcatgactatcgcgagcatcaagtctcggcggccatgcggcaactctgccgagaagccctccagcaagccggaatagaggtggcgccatga

SEQ ID NO: 351800 - DNA, 165 bp, Pseudomonas aeruginosa
atgaaccaccacctcaagcgcgtcctgttctacaccaggcgcaccctcctcggcgcggtggttgcgattctgatcgtgttcaaggctattgacctcggcggggcgatcaccggcgaggtctcggcagaacagcccattacgcacctgtccgcagcaggccggtaa

SEQ ID NO: 351801 - DNA, 513 bp, Pseudomonas aeruginosa
atgagcattgactggaacacggcaccggagggtgcgactcattgggagccgagaggacctgatttcggcgaaggatggatgaagaaagaagggaatgaatggttttattggggcgaaggaaccaacaaatggttcaaagggaatctttcctgcaatgtatccgcagagcgtgaggcgacattcgaggctagaccgcaagagccatgggacggccagggccttccgccggtgggcgttcgcgtatccatctttgatgatggagacttagtttacggacacggtgagtcaggcgaggtgattgcgcacgttgaagattgcgcggttattcgcatgagctatggattaggctgctttaccgctaagaatctccgcacccccgagcagatcgccgccgaggagcgggagaaggcagtcggtgatatggctatgtcaattcaaggagttccatatcagtaccctacgctttacgcactctatgacgccggctaccgccgccaggaggaagggaaatga

SEQ ID NO: 351802 - DNA, 252 bp, Pseudomonas aeruginosa
atgagcaagcaggagtgggaaattgttaagagtgactttgacacctactacgtccgagagagtgaaggtagccacatggtcgagagagtgatcgcagaaggaatctgcagcttggacaaagcgcgcctgatcgttgcggcgcctgagcttctggatgccctggtaaatcttctgccgctgattagtccgctgaaagcggaaagccagcaggttgcggatgcatccgccgcaatcgccaaggccaccgcctaa

SEQ ID NO: 351803 - DNA, 2145 bp, Pseudomonas aeruginosa
atggatatcgaaaaaatcacaaaggacatcctcgcatttagcgacccttttacggacagtaaaataaaaaacccagcaggaaaacgtagagtagaactaacaagaaacgcaagagaattagccttcgatatcgacaaaacttcaggaagaatctcctctaggcaccgaaaagcagactatcaaaatctaaaatcccttctagcttctccagaattttgcgatataagaaggcttgcagacactcagcatcggtactattcacggcaagaacacagtcccgagataccagccgaaataaccataaacaataagaaaattccagcagaaaatctagctgaaaaaatatcttctatcgatgggaaaatttcgttaacgctgctcgatggacctgccggtgtcggaaaaacacatcaaatcaaacaactagccaagaaacaagcagcaaattttttaagcgacaaccaatcaccacctgttttacacatcagcagcggaggaagaagactttcaaacttccccgacgtactggctgcaaccacacaagagatcggagcatgctttaatggaaagcaagtaccaatattagttcgtcacggattaataattgctgcaattgatggtttcgacgaactggttgatgctgacggctatgaagactcatggagggcccttcaacattttctcaatgatgtaggagactcaggacagataatacttgcggcaagagatacattcatcgaccaacaggaattactagaaagaataaacaaagaaaatttcgaaaacataaagcttgaacttggccatatcaatctagtatcaccagacagcgcgatagaatatctatccaagtctccacactggaaacctgacgatattaactcagaaatcactcgagatatcttatcagaaggtagctacgcacttcgaccattttttcttaatgtattgagagacgcaggtggctgggagaaagtaaaagacgagggcttcagatcctatctcgtcaatagcctaatcctgagggaggcaaaaataatttcttctacactaaaaggattagacgctcaagaagttatacctccactacaccatttattctctgaaatatcacttgaaatggcaattagagaaaacaacttaattgatctagagcacctttcatttattatgtcatatgtatttgagggggtcacagatgatgcttccatacgcaaactctctcataaatctggaagtacctctttacttgaaataacaaacgaaaaagacaagagaaaattcccccactcagaaattcaatactatttctttgcccatgccatacttgaagcactagcaggaaaatcaaccccttctgttcttcgaagaacaatactaggaaatgagcaacttgaagtattcgcagaagtatttgcatctaaagaaaaacaggcgaaagacgctacaacctacttgtactctgaactcaataaagatttgactgccgacagcctttcgaacaatggagccgcaataaccctactagcattctcgctaggtctgctcaacaggcttgactacctaacagttaatgaggccacttttgcagccggctcaccatcgggcgtcttaaacgacttttctgcgagtcgaatagatgcatgcggcgctgatctgacagacgtaacattcgagaaaactaggattaccacactagtaatcgatgaatacacaaaattcggaaaaagttatccacaaatagactcattagaaattcgtggtcctaactctcgcatagagcgctcaccagaaataattagcagcgaactctcaaaacacagcatagccacctcagaaaaaaattactcagagaatccagctataaaactattggaaaagctagcacggcgctcaaatcgttattgctacataagagaagagggcgatgacgagggttcattcttattaaaagatgacagatggccaatactcaaaaatattcttaaaaagcacaacagaattgatatcaaagtaaagaaacctatgcatggaagacctgctcctttattcagaatcaaaaaccccatggaactccttaatcactcactaccagaaacaataaaaatacttgatgatatattaaaaaacacccagcaatattaa

SEQ ID NO: 351804 - DNA, 660 bp, Pseudomonas aeruginosa
atgtacagagtaagtgttttcatcgactgggacagtgccgccagaatctcacccaacgggctcgcaattcgaaaccccgacgccccgctaaaaactaaagaaactgctataagcagcatatttgaagagctgcaaaagaaaacactaaaaaaactcaatgaaataacaaacaacaaaagagccaccattgagaaagcacgcatttaccatggatggcatcaaggaacaacagcaacaaaagacagagtagcttgggaaaacataaggaataaaattcgttctctacgagagggaaactcgatatttacccctgaaattcaatttggaaatgagttaatttgcaacggcataagagtccctttatatgacactttaagacaagatcaaggtggaaaaagaaaatctacaaaaaaattccaacaaaaaatggtagatacatcacttatatcagatctgctttgccactgccggaccgaaagtaaaaatttcaaaagagactcagagcccaactcagctgcgataatcattggggatgacgacgatcttctaccgggagcatttgtcgctgaagcctggggtatgccgacatatgtattcagagtatcaagagaacatgaaagtcggcacatttcatcatctggaattattcataggatttaa

SEQ ID NO: 351805 - DNA, 189 bp, Pseudomonas aeruginosa
atgcgcaaccacaagggtcagttcgcaagcaccaagcaagcagcaatagccgatcttgagggcttcatcgctgattggaagcactgggcgcttgccgcatttcgcagtggcgaccgtggcgaaggtatgcgctgcaagcgcgaactcgacgcatgccgtaaacaacttgccgaactcatcgcctgctaa

SEQ ID NO: 351806 - DNA, 807 bp, Pseudomonas aeruginosa
atgagcaatatcgtttctttacgcaacaccggggggtttacccggatggataacgacctgtacgaggcgctcattggcgctgatttgtctggcagggagctgcgggtagccctggctatccatcgtctcactgccggcttcaaccgtgattctgtgaaggttgcggctctctacatcgccaagatgatgtatggcgagaaagagtctgcgaaggagcgggccaatgtatctcgcgcaattaacgcgctgatccgtcagcgggtgctgtatcgcgaaggtggtagccgtgatccactgacattcctaccagtttctgagtggaagatagaggctaaatccactgtgttgaaatctacacactgtgtagaaatggcacctgccagtgtgtcgaaagttacacacattaaagacaggaaagaaaatctagttccttcggaacttgtcgacgccgagcgtcaacctgagcagggcgagttgatcgccgagactgttcgcaaaactaaccgggtcgaggcctgccctcatcaggcaattgttgacctgtaccacgaaatcctgtccgaactcccatctgttgccctgatcaacaagggtcggcgtcagcatctccaaggccggtggcgtgagcatgcagctcaccgtgaccttgggttctggcgtgagtacttcgagagcgtgaaggcctccccgttcctgatgggcaaggttccaggccgcaatggcggtaagccattccgggccaccttcgactggctgattgctccttcgaacttcgtcaaggttgtggagggaaattaccatgcgtga

SEQ ID NO: 351807 - DNA, 384 bp, Pseudomonas aeruginosa
atgaagctgaccaagaagcagcgtgccgagcttcgcatgaagttcgacggaaagtgcgcctactgcggctgtgatcttcctgagcgctggcatgcggatcactttgagccagtgaaacgcggagtgagcagctacgtcactggtagagatgctctacatcctgagcggcattgctttgagaacatgatgccggcctgtgcgccctgcaacatcagcaagggctctcagtctctagagggctggagaggctggctggctgggcatgtggatagcctgaactcctatcaccccatctaccggatctccaaagcattcggcctgatagaggaaaccggcaagccagtcgttttttacttcgagcgcttcgcgaaggaggtcgcatga

SEQ ID NO: 351808 - DNA, 273 bp, Pseudomonas aeruginosa
atgagcaacatccgcaacgtccagtggaacgaaggggcgcctgagaaggttcttccggggatgctggtgaagatcaagggcaagcgaggcgtattccttgttgggcatgcggacccagatggaaatacctcgctcgtcattccaggtgctggagtggtcatttccggtgagcgtcgcaagaaatttgctcgctgggcatggctcatccagccccacgaactcgcctggctcgaagacatggcaaacaagcacaaagcgagggcgcggggatga

SEQ ID NO: 351809 - DNA, 150 bp, Pseudomonas aeruginosa
atgaaaactcaagataagaacggtaacgtgcaggccagccagcaaagcagccaagaacagaagaccgatccggtacaaactcaggttcccggcaaagaccagaaaccggccaacgaagaaaagaaggatgggcgggtctggaaaggatga

SEQ ID NO: 351810 - DNA, 771 bp, Pseudomonas aeruginosa
atgccggccagaccgtgctcacgcttgacacgccgcgcgatgctgcggatctggctggctgtcacgttgggatcgtcgcagatgaacaggggcgcccccttggccttggccaccgccgacgtgatgcgcggccagtcgtcgtcacccaactgctgcggatcgtccaggcgcttcaggtccactccgcccagcgaggcgatggcgcgcacccccaactcctcctcgggcatttccagggagaacaccagccatggctcccctgcctcgcaggcgttgtgctgggcaatctgcagggcaagtgtggtcttgccactaccgggaaggccggcgataacggtgatcttgcgagggcggatgccgcgtaccagcttgtcgagatcgaccaggccagtacctggccactgcggcgcgcggccgttgaacttgtcgtcgatgacgtcgacaaccttgagcatcacctcgtcgagccgcttgtacttcggcgcctcgtcctcaaggtcgcgcaggtccgccatcgcctgctgcgcgccggcgatgatctccggcagcggtcggtcatcagtggccgaggccttcaccgactccgcagcagcgatcaggcggcgcaggatggcgcgctcccggacgtgccgggcgtactccttccagttcgcgatcgagggaactgtgcgggcgatctcgccggcgtatggaatgatcttcgcgccgccgggaagcgtgtcacggatgatgccgacggtgagcggatcaaccggcaccccctcctcgtaa

SEQ ID NO: 351811 - DNA, 222 bp, Pseudomonas aeruginosa
atggtccaccgggacatggacagcgaggccggccagaacggcatcaccgagattctgatgaccaagtgccggcacgcgccgccaggcaagtgccacctgcagcaggagggtcagttcggcaggttcggcaccctgaccggctaccgcgaggtcagcgaggaagaggtggagatgggccgcccgttcaagggccgccgctacggcaaggagagcgcggcatga

SEQ ID NO: 351812 - DNA, 192 bp, Pseudomonas aeruginosa
atggatgacgccgccgagccctgggcgctggcgatcgaggtcgatagcgagccgcttgtgctcagcgagatgcaggaatacgcggtcacagtgacgccgccggcagatgtgcttgtggttgttgcgggtgaccaagggcctcccgggagggatggcgtagacggtgcccaatggggcgcgactgattggtga

SEQ ID NO: 351813 - DNA, 414 bp, Pseudomonas aeruginosa
atggcgagagcatggatcaacaactggaagacgacgctgagcgtagggctgtcgcctggcgcgttgagcctgacggtgccggatgccgccgccgcgttgctgcctctctccggcggtagctgggtgctgttgacgctggcggatgacgctggcgcgcagcatgaaatcgtgaaggcaaccgcccgggcaggcggtgtgctgacgattgagcgccgacaggaaggaacaactgacggcaactggccggtgggaacggtgatctacgccgcagtcaccgccggagacctaatgacgctccaagcgcgtatccaggcgctggagtccgacgcatctgaaggcaccttggtcgacgaagccggagcaacgctggtcgacgccgccggcaacaacctgatgatcatggagaacaactga

SEQ ID NO: 351814 - DNA, 411 bp, Pseudomonas aeruginosa
atggcgagagcctggatcaacaactggaagacgacgctgagcgccggcctttcgcctggcgcgttaagcctgacggtgcctgatgctgccgccgcgctgctgccgttatccggaggaagctgggtgctgttgacgctcgcagatgacgccggtgtgcagcatgaaatcgtgaaagcaaccgccagcgccggtggggtggtgacgatcgagcgcgcccaggaaggaacctccgacggcaactggccggcgggaacggcgatctatgcagccgtcacggccggcgacctcatgacgctccaggcgcgcatccaggctcttgagtccggggcgtctggcggcacccttgtcgacgaaaccggcgcaacgctggtcgacgacgccggcaacaacctgatcatggagaacatttga

SEQ ID NO: 351815 - DNA, 228 bp, Pseudomonas aeruginosa
atggtccaccgggacatggacagcgaggccggccagaacggcatcaccgagatcctgatgaccaagtgccgacacgcgccgccgggcatgtgcctgctccagcagcagggcatgtacggacgattcgtcaacttcgccggctcacgcgagatgagccaagaggagatcgagatggggcgtagctacttcgccaacaagcacggcaagaaaaaggggaaggccgcatga

SEQ ID NO: 351816 - DNA, 624 bp, Pseudomonas aeruginosa; identical to SEQ ID NO: 328212

SEQ ID NO: 351817 - DNA, 927 bp, Pseudomonas aeruginosa
atgcaccgtctcgtcgtggtcgatagtcttggtccggtcgtggccgacccagtgggtctcgtcgttctcgacctcgatgtcctggttcttctcggcatggatgaacaactgctcggcgcccttcttgtcctccatgcggatctcgttgaagttggccggcgttccgcccttgctcgaacggctcttggtgccgctctgggtggcgttcgccggcagctcgtagggcaccgtctgctcggcgttgtagacccgcccggtgatgatcggccggtccgggtcgccttcgaggaagctgacgatcacttcctggccgattcgcgggatctgcaccgagccccagttcttcccggcccaggcctgcgagacgcgcatccagcaggagctgttctcgttggactggtcgtggcggtcccagtggaaatgcaccttgacccggccatactggtcggtccagatctcctcgcccttgggcccgaccaccaccgcggtctgcgggccacggacgatcggcagcggagtggtcggcaaggggcggtaggcctggccggcatcgatgcagtccagctcgctttcgaactgcgcgcccaccccgccgccgccggtctcgtagagttcctggaccacccggtactcggcgccgaccaccaggtactcgcggttctggtcctcgcgcgggtagccgctgagcttgaacaggtggcccgaacccaggccgcgggcgcggccgcgcaggcgcacccgttcgtagcgcgcctgcaaggcttcgatacgggtccgcgcgtactgctcgccgtcctggctctgcacgtattcgccggggtagtcgtacagcgggtagtcggccgccgcgtgcgagcgggcgatgttcgaacgcacctccaggcgcgcgccgggacgctggaagtcgtagtcgttgaggctcagtga

SEQ ID NO: 351818 - DNA, 993 bp, Pseudomonas aeruginosa; identical to SEQ ID NO: 96021

SEQ ID NO: 351819 - DNA, 1017 bp, Pseudomonas aeruginosa
atgggcaaaaacagcgggcatgaaaaagccccagtgctggcgggcgctgaggctttgggtaacgagatcaacttcggagaagaaatcgtcatgggcgataatagcacagctgcatccagtgtcatcccgttccgctcggcaaagcttctgctcgttgagcgcgacggccagccgttcgttccaatgaagccagtggttgaaggcatgggtcttgactggaagagccagcacgcaaagcttcaaggtggtcgattcaattcagttatggtgatgatcaccacaactggcgccgatggtaagcagtacgaaatggcatgccttccactgcggaaactcgccggctggctgatgtcgattcacgcgagtaaggttcgcccggagctgcgccagggtgtgatcgactaccagaacgagtgcgacgatgttctctgggcctactggaacgagggcgccgctgttcggcgcgatgaccggactgcggccagcgtactcgccaccacgatcggaaccgatggcttccactgcctggctgccgtcgtcgatggcaaggtgcggcacctgccgtcggcgattcgccgaggcgccaagaaccacatctggagccaggtgcacaaggcgttcagcgtcgtgaccgccgaggatattcctgccgaccagctcgacagcgcacggaacttcatcgcctcctacgccttggaaggcgagtggcttccgaaggaagagaagaagaccggcaccttcgtgctggacgagtaccaggctcagttcgtgcacagtctcatccactacacccactgggtgtgctgccgctgggatcagggtatcggagcggcagtgaaggcgttgaatccgaaattccacacgaagacatgggagttcttccgagacttgagggtgtgcgcggaggtgctcgaaagagcggcgcccgagctggtcgcacacttccgcagtcgcggcgctctccgcccgcatgactgcattgcggcaggtcatcccgtaggccatccggcagactga

SEQ ID NO: 351820 - DNA, 1116 bp, Pseudomonas aeruginosa
gtgcacatcgccgatatgaccatgttctacgcgcctgccagcgggggggtacgcacctatctcgaagccaagcatcgccatctctggcactatcccggcattcgccacagcgtgctggttcccggcgccagctaccgccaggcgaacggcatccacgaggtgccggcgccgccgctgccattcggcaatggctaccgcttccctctccgtcgcggcccctggcgcaaggtgctgcgcaatctgcaaccggacctgatcgaggtcggcgacccgtacctcaccgcctgggcggcgctcgacgcgcgacgtcggctggacgtgccggtgatcggcttctaccactccgacctgccgctgctggtgagcaatcgcatgggcgcctggctcggcaccaacgcggacaactacgtcagcaagctgtacggccacttcgaccgggtcctggcccccagccgggtaatggcggaaaagctgatgcgcctgggcgtcgccgacgtgcatgtacaaccgctgggcgtcgacctggtcaccttccatccgagcaaccgcgatccggggctgcgccaggaactcggcctggacgaggaaacccgcctgctggtgttcgccgggcgcggttcgcgggaaaagaacctgccggtactgctcgacgccatccagcgcctcggcgacggctatcacctgttgctggtgggttccaacatgccgacccgggttccgcgcaacaccagcgtggtcgaccatttctgcgacagccgcgaagtcgcccgcctgctggcgagcagcgacgcgctgctgcacgccggtgaccaggagaccttcggcctggtcgcactcgaagcgatggccagcggcattccggtggtggcggtgcgcgccggggcactggcggaaatagtcccggagcgttgcggcgtgctctgcgcaccgaacaacggcgacgccatggcctgcgcggtgcgcgaactgttcagccacgacgtcgagctgcgcggccagcgcgcccgccgtcacgtcgagcgccagcatgcctgggacgcggtggtcgccggtctgctcctgcactaccacgcggtactcggcgacagcgaggcgaggttcccgcgctatggctga

SEQ ID NO: 351821 - DNA, 513 bp, Pseudomonas aeruginosa
atgaggcaggtgctcgacacggtgtggcaacggcgcggcaccagctggctctgggatgaggaagcacgcaacacagtctgtgcggccggcgaggtgtggagtctacgtcagttcttgcttgccgccgttccgaatgggagtgggtggcccgaggagctacctagcaatcaaggtagaactctggtggttgctggcctcgagggtagtcttgatttgctggcgcctgaccagggggaagtgtggttgggggatacaataaagcgcgcgattctctcgtttcaggacgaatggggaggcgatggtgcgttgatcttctggatgccgcagggagataaacgccttagtgtgcaaactactaccgatgcagtgtcgtggttgtgcgaagcgccgcaccgtggaaagcagctcgactttggccgcttactctggggcgaggccaacgagtatccgcaggaaatcctgctacgcgagggcgcgaaagctgcgggtcttttccatttgcgaattacctga

SEQ ID NO: 351822 - DNA, 297 bp, Pseudomonas aeruginosa
atgggcctcgtaggagagccaggcctttcgggctcgctccgcgctgccatcaaccgttcgcaggatgcgttcagtgcgcgagacttggcggtgcacggcaccgaccggtacacgacgctcacctacgccgaagaaggcacgaacgtatccatcatgcgcgaggtcaagaacgacgccttgaccgaattcatggtgggagatccgttcgccaggttgaaactgcgtttctatttccacgcgtcaatctcaggtaattcgcaaatggaaaagacccgcagctttcgcgccctcgcgtag

SEQ ID NO: 351823 - DNA, 765 bp, Pseudomonas aeruginosa
gtggtggggctgagtaacgaggagaagcaagagctgttgagggccttggataggctgaccaactcgcagcagcgacgaatccaagaaaccatcctggcctatgctcgcccacgtcggttttggcgaatccctgattctgatcttgtcaccgaaggggttctggccgatctgggtgacaggctactcacccaccatgctagtagccgacaggctctcagcaaggacaggtttgagtacgccttagaggcctctctcatagccgcaggcatcgaggcggcgctggagaagaacccgaccaaccgtgggcatgacatcaccataggtggagtaccagtcaacctaaagacccaggcgaacacagccatccgagaggatcgcatccacgtcagcaaatggatggagcttggtcgtggcgcttgggacatcgacttccagcgccagcagtttttgacacacctcaacggctacgaccgcatctttaccatgcgctgcttgcataaagagatggagcacgtgaagtacgagctcgtcgagattccgaagagcttgctgctggaaagcgcaacggcccctattgagcacatggcgaattccaagcagtcactcataccggcttacgtcaaggtgagagacgcagcggggcgtatcaagttcgagctctacttcgatgctggtggggagcggaagctgcaggtgaaaaacatccgcaaagacctttgtcgggttcatgccacgtgggagtttggtcgagacatcggtgcctga

SEQ ID NO: 351824 - DNA, 1086 bp, Pseudomonas aeruginosa
atgagttgcggcttcaagcgtcacggcgcctttcagattatcggggcagctgatctggaggtcgcgaagcccagctatggcgttggtgcgaccaattgcaatgccacctatgagcacaatcacggcttgcggcctgccaacgtgaatctcgctactacagcgccggaaacgctggccgagcattttggattcacaccagatgatgtggatgttctcatctcgtgcgcgccctgcacggggtttagccagaagcaggcgaagaatcacgtcaatgatgatgcgagaaatcagctcgtgcggcgtacagctttgttcgccgccgcctggaggccccgctacatcctcatggagaatgtcaaggagttgctgagtggccgacatcgccaccactttgaggggctgtacaaggatctcactgcactgggctacgaggtctcagcggaggtgcacgacctctcagagttcgggctgccgcagcggcggttgagagcgttagttgtcgctaagctcggaggccgcctcgctcctgttcttcctcctgttgccaaggttcgcactgtcagagatgcaatcgcccaccttcctcgccttgaggcgggcgagactcatcccgacgatcccatgcacgtctgcccgacgatgaacgatgtcactcgcgcccggatgcaggcaatccccaaagacgggggtagctggatcgacatacctgaggacaaagcccatctccgaattcccagcatgaacgtggacaagcccggttcatacccagacgtgtacggccgtcttgcttgggacaagcccgctccgacggttacgcgagagtgcagttcgccagggaacggccgctacacccatcctgagcaagaccggttgttgtcagtccgagagatgtcgttactccaaggctatcctgaggactacgtgttcctcggttcgctttcatcgaagtatcgccagattggtgatgctgttccgccgctgatcagcgcaatgctagccgaggctgtcgcatcagacgcattaggtcaggcgccagaaggagtgcaaccgaccaaagtacgtggtcagttggctctaggtgtctga

SEQ ID NO: 351825 - DNA, 297 bp, Pseudomonas aeruginosa
atgacatacgaaccgaagaaactcacccccgcggagctggccgagctccacgccctccccgacgaggcgctgctcaccgcacaggaggcttccgccttcctgcgcctcaagtacaacaccctgtcttggtatcgctgcaacggcggtggcccctcgttcgtccgcgtcggaccgaagcttattcgctaccgcctgggcgacctgcgcgactacatgaagggccagccgatgggcgaaggcgtccagcgtgcggccatggcgatgctcgcagcccgcaccgccaaggcggagggctga

SEQ ID NO: 351826 - DNA, 2367 bp, Pseudomonas aeruginosa
atggacgcgacaaaagaaaacgcccgcgggcaaggcgggcgcaaggagaccttcgagacggaggtggagcatgcagaagctcacgggaacaatcatgccgccgcctcgccccgccttacgccatcgttcgacgtcgagggccttatccgcgcgggcctcacgctgatcccgctgcaccgctggaacgccatcgatgcgagggggcgccagcgcggcaagtcgccgctcgacccggcgtggcaggcgaaggactacgacagccgcgaggtgctggagcgtgcgaagcgcgctggcctgaacgtgggcgtgcgcctgccgccgaattgggtcgtgctcgacgtcgatccccgcaacttccctgagggccgcgacccgctggccgagctcgtccgcgacgcgggcttggacctctcgcaggcgccgcacgtccgcacgggctcgtgcgggcaccactactacttccgcaagcccgccgacgtgcagctcctcgacagcctggaggactaccccggcctggagtttaagagctacgggcggcaggtcgtcgcgccggggtcgatccacccgtgcggcaggccctacgagtgggacgacctcgcgccgttccccgaggaggcgcccccgatgccggacaggctgttggcgatggcgcgccgcccggttcgtgcacacggcgaggccgcggggttcggcgagctgacgcccgagaagctggccgagaccctggagcagatcgacccgaccgacttcagcgcgcacgaagactggctggcgctcatgatggcctgccaccacgctacggccggcgaggggcggcaggagttcatcgactggagcacgcaggacccggactacctggacgacgcctggatcatcgggcgtcggtgggactcgctgcacgccagcccctcgggcggccggcgcggtcgccccgtcaccatcaagttcctgcataaggtcgtgcaggaggcaggcggcgaggtggcgcgcactgaccccgaggacgacttcgacgcctgggacgagcccgatgacctcggccaaggcgtagacgacgcagccctgcgcgagccgccgaaggtctctggcctcgacgcgatcatcgaggagatgaacgcccggcactacgtcgtgctggacagcggcttccaggtcatcaccgaggagcacgacccgatcttcgacggtcgcgtccgctaccagcgcctgtccaagagcgacttccgctcggcctacgagaaccagctcgtcgagaagggcgacaagctggtgactaggggcgacctgtggctcaggagcccgcaccgccgcacatacaagggcatcatcttcgacccggcgcgcgagcacgagggctggctcaacatgtggaagggctgggcagtcgagcccaagccgggcgactggtcgctgctgcgcgagctcatccgcgacgtgctgacggacggggacgccgagtccttcgagtacgtcctcaactggatggccttcatgttccagcaccccgagaaggtcgccgaggtagcgatcgcgttcaagggcgcgaagggcaccggcaagggcacgctcggccgcgcactgttcaagctggccggcgcgagcgggctgcacatcagctcgccggggcacctcgtcggccggttcaactcgcacctgcagaactgcgtgtgcctgttcgccgacgaggcgttctgggctggcgacaaggcgggcgaggcggtgcttaagcagctcgtgaccgagccgacgctcacctacgagggcaaggggcgcgacgccgtgacgggccgcaaccatgtgcacatcatcatggcgtccaacaacgactgggttgtcccggccggcatggacggggagcgcaggttcgcggtgttcaacgtcaacgagcgccgccgcggggaccgcgagttcttcctcgccctgaatcgccagctcgacgagggcgggcttgccggcctgctgcacgagatgctgacgcgggacatccacgactggcacccgcgcgacagcgtgccgcagaccgaggcgctggccgagcagatcgagatgagccagggggccgaggagtcctggtgggacggcctgcttgagaccgggcgcttgccccacttcatgggcgacctgccctggcacgagcaggccgtcgaggtggataccgacgagctccacgcggactacgtggcgcacgcgaagatgctcggcgtgaggcccagggacaagaagggtctcgccatgaggatcaagcgcaaggccggcatcggccagcgccaggtctcactcgacggcgggcgcagggtctggcggtgggtgctaccccgcctcgacgacgcacgcgccacctgggcccaggccatcgggcgcgagtga

SEQ ID NO: 351827 - DNA, 507 bp, Pseudomonas aeruginosa
gtggccgccaagaagttcacccccgaggtgcaggagctgttcctccagatactggaggacaccgcgtcgcctaaacaggcggcccaggtgtgcggcatctcccgccgcctcgcattcgagtacaagcagaacgacctagagtttcgccgtcgctgggagcaggcgatcgaggtggcgatggacgctctgctggacgaggcgtaccgccgcgcctgcatcggcgtggaggagcccgtgatttaccagggccagctcgccatgaccaaggacgcggcgaccggcgaggatcgcccgctcaccgtccgcaagcacagcgaccgcctcctggaggtcatgctcaagttccgatacggcgaccagatggctgacaggctcaaggtcaaggtcgaggacacgggcctcgacgccgacgcgctgctcaggatgccgagcgaggagcgcaaggccctgaccgagctcctggcgaagtacaagagcaaccgccgcgaggaggacgacgatgagtga

SEQ ID NO: 351828 - DNA, 249 bp, Pseudomonas aeruginosa
atgagtgagaagctgaccgtggccgaggccctggcccgcgccgagatgatcgaccgcagcctggacgcctggcaggggaccgccccgcagggcatcgcagagatgggagggcgtgacgccttcgccgaccgctgcgagatggcctgcttcggtcccgtgcctcgcctggaccacgacgagtgggagcgcctcagcctggagtacgaggacaggcgcgagcacggaagcctgaaccgtggcgaggggtaa

SEQ ID NO: 351829 - DNA, 435 bp, Pseudomonas aeruginosa
gtggcgaggggtaacgggtacgcggtcggcgtcgaggtggatggggtgcgataccccagcgcccgcgccgccgacctcgccctgggtctcccgcccaacacgacgcgccaccgcgcgcactcggagcactacccgacctgtcgctggctgggcgagacgcccggcaggcgcccggtcaggaggcccgaggactgcaccgtcggcaggccgctggccgagcccgagcgctggccctacgacggaggcgcgcgacgcgcccccatgatggacccgaacttcgacccgccccgcctggtgcggcgcgtcggctggctccgctgtatgacctgcggtcgcccgcacttctccgaggacgtgacccgcgcccgcttgtgctgctcctgcggtggcctgggcggacagcccatcggcgccgacccagacggggacctctga

SEQ ID NO: 351830 - DNA, 720 bp, Pseudomonas aeruginosa
atgaccatcctcgcagacgcacccctcctcacgcccgcccagatcggcgagctcgcatcctccctcgacggcctgcacggccgcgtcctcaaggtcatcgaccgcctgcagaaggacgtcgaggcccgcaagaaggacatcgccagccgctggaagagcgcccccggcgtctcggccggcgacctcgcccgcttcgcgcagaacgagaccgtggccgcagtccgccagatcaaggacaacagcaaggccgagctcgacaagatgctcaaggaggcgggccccgcgcacgcccgcctgatcgcccagcgtccgttctacgacagccccgtcaaggtgctgagccgcgcggccctcggcgatgcccgccgcaccgagtacctgaaccagctcgcctacgccggccccgcggagctcggccacatggcccaggtcgccgtcgccacccagaacgtgccgctggccgccgcagtgctctccctgctcgaccgcatgcccagcaaggaccgcccggtcggtcccgccgagctggcccacgccatgcgcctggacgacttcctcaaggtgcaggagtacatcaagctgggcgacgtgcgcctccagggcatcctggtcgccatccgcacctggagcgccggcaagtccaacccgctcgacaccgtgcagctcgctatgcgggagcgcggcatcgaccgcgacctgatcgggggcggcgatgaataa

SEQ ID NO: 351831 - DNA, 261 bp, Pseudomonas aeruginosa
atgaataagcagcccgcctacgaggccagccacccggtagccgtcgccctcggcggcatggtccgcgccctgcgcagcggcgcagacctactcgacgccctggccgagcaggcccgccgcgtcggcgtggccccgtactcgcccgagttcgacaaggccgccgcgctggcgggcatgccgtacagccgcgcttgggacgcctacctcgaccgcgagacctgggcgcaggccgagcgccagcccctcgcgcacgtccactga

SEQ ID NO: 351832 - DNA, 549 bp, Pseudomonas aeruginosa
atgaactcacacaccaacaacctggagcgtgagatgaaccttcaagagatgagcaccaagtccctgctggccctgcacaacgcgatttccgacgagccagccggacccaagaccttcgcgaccaagaccaagctgatcgcgcggatcgagcagatcgcggcagccggaagcatcgacctggcgtcattcaggcaaggcaccgagcccgaggtggccgagcagcgtgcacagccgcaggccgacgctgccgagacgaccgaaaccgaaaagaagcccagcggcaagggcatcggtcgcctcgcccgcgagttcctgatgaacccggcaggctacccccacgcgctgatcgcggagatggtcaatgcgcagatcgagggcgcgcaggccacagcaaagtctgtcaggtggtacgcccacgacatgcgcaagaagggcatcgaggtcccaccccggcagaaggtgcacgccgcagagatgaacgagggggagtcggccgagtggctggcgaccgtgatggtggtcgagcctgcgcccaccgacgagggctga

SEQ ID NO: 351833 - DNA, 519 bp, Pseudomonas aeruginosa
atgaacgccatcaacactatcgaagccatccgtgagcatctggtcctgctgggtaaggagcttgaattcgcgtctggcatccgcgccctggcggcagagaagatcatgagcgagcagggcatcaccgatcccgacgatcttttccaggcgtgcgaggacctgatcggctctgctgccgtattcgagtcctacgacgacccgctcaacaccaagcccagcgatttggtgctcggccggggttgccccttcccgtcgcttgaggcttacgtcgcgctgcggaaccattacgggaacgattggctcctgcacgcttcgactgactacgcaaccgatttcggcagcgtgtctctgcgctgcgaccctgcacagcaggccgagaagttgatcggaagtgcacgggacaatctccacgacgccctgttgttcaagctcggtcaggacttcggaaagtccatcgagcaactgtccagccgcttccagtctgccttgtcgcttttcaagcggccgagcgctgcctga

SEQ ID NO: 351834 - DNA, 1245 bp, Pseudomonas aeruginosa
atgaagtcgaagataacccagtccctcgtcgagagggccccagcccccgaacggggtaagtcctcgctgtacgccgacagcgagatgcgcggattttacctgatagtcacgcccacgaagcgcagcttctacgtccagtccctcgtcaacggcaagcaggtccgcacgaagctgggcgaccacccggcgatggacgccaagcaggcgcgtgacgctgcccgcaagactctcgtcgagatgcgaggcggcgccaacccgaacgaggagcggcgtaaggcgagggcgcggggcatcaccctccgcggcgcgcttgacctacatcttgcggcgaagcccctatcgcagaggaccaaggacgactaccgctataactgcgagcagtacctagctgactggctcgacaagccgctggccgaactcggcgcggaccgtgcggccgtgcgtgagcgtcaccgcaagatcaccgaaaagcacggtgctccatcggccgatagcgtttttcgcgttctgcgtgctgtctacaatcgtggcctgcgagagcaccccgacctgccgccgaacccgacaacaaacgtggattatcacgggttgcgtcggcgtaaggtggacgtcgacgccgaacgcttgttggcgtggggcaaggcggttcttggtctcaaccctgtgcggcgcgacctgcacttgttcatgatcctgacggggatgcggcgcacctcggtttgtgaggctcgggcgtccgagctggacctaggcgcgcggcgcctgcatgtacccaagcccaagggtggtgcggcccgcgcgttcgacctccccctgtcgggaccgctcgccgacctgctcggccacaggctggccgagaacccgaagctccaccgcaagagtccgtggctgttccccgccgactcgaagtcgggccatgttgccgaggtggcgcagcacgagctggacggcctcacggggcacgccctgcggcacacctacgccacgctggcattgcaggcaggcgtccccatcgccgaactgaaattcctgctgaaccacgctgccagcagcgtgaccatgggctacctgaacccgacactggaccacctgcgcggctaccaggagaaggctagcgcctacgtgctcggagccatcggcctcgagtggaccgaagggcagtggcccccacgtctcaagcagagcgagtcggccgataacagcgccgaggaggcgccgtcaatcaacgaattggcgccagcgtag

SEQ ID NO: 351835 - DNA, 915 bp, Pseudomonas aeruginosa
atgaatgcagcagtacccagcccaagcccacgcacggcgattgaaaccacaagcagatttctaattcgcttttatgaagcgaaactattccaagcctccaaagaaataaagttctcaaaactccttgaggcgataataaaaaagggggtgccgccatcggctcgtcacctaattgaaaacaactcggactatcaagttagaggactctccgcgcatgataacaaccgtgaaatccgtggctgtttcgtaagattcagaccggacattcccgtgtcgggatcgaaagcgagcctggatgaaaaagaaataatacttgaagacggtcacaacattattgagaaaagttatttttctcttttcatacatccaaactacgaagttcttgcattccaacaatctttagaaggcggcagcatttcagctctcgcacgatacctgtccgcagttgccggccacgaccgaatagtcgcgttcaatgacatattaaccgaggaatctttagatgacttgctgaacgggaagctgataaaacaggttgaattcagggtagcgaaacctcgctcagccaaatatataccggatccagaggacgcatggacacagcaggcgatggagttcatggctaatactggagcgacctcttttcaggcaaagataggaattagagctcaaagtagaggtatcttttcaaatgtaaaaaatcccataaaaaagttactcaactctcctcagacaagaaagttaaagatcaaactctccgacatagccgatcctgtcgatcttttcgcagaccgcgtcaaagctcggatcactgtgaaaagtatcaacggtcagccaaaggcggatgaaatttacaaagccatttgggccgaaaaaatcaaacttgagtcatctctagacgcctacttccggtag

SEQ ID NO: 351836 - DNA, 774 bp, Pseudomonas aeruginosa
atgttctgcaaggaactactgggggccggagcaacgcaaattcgcaaagcgaattacgctaatcaggggatgtattttcaagcgttcagcaatttaagtataggcctggaacgtatcggaaaactatgcctcacgcttgaccactttataagtactaatggtgaatttccaactgaagaacatctaaaaaataagattggccacgatctcataaagttatacaagagctcgaagaaacttattgcagcaagaaacctaaccgtagagcagccactattactagacggtccgatacataaaaacatcatgtcgattctgtctaaatttgccaagggagatcgctattcaaacttcgacttcttagtaggaggtcgacaatcaaatcctgccggagactggtaccttaaagttgacatggagttacacaaaaaacataccaccaaaagaaaaaagcacgccataaaagaaaattcaaaaaccactggcgagataatgagcaaactaggcatggtttggcacacgtcggaacagggagccgagataagctcctatgcagatgctagccatcgcacaggagtttttgaagctgttgcaccaaaaaggcaactctacgtactacagattattcgatattgggttgatattcttttcaagctgcaatatttaagcatgcacattgatcacgaagccacaccctactttaacgagatccttggtggctttggtaatagtgactcatacttccgcagccgcaaaacatgggataccatttaa

SEQ ID NO: 351837 - DNA, 1023 bp, Pseudomonas aeruginosa
ttgaacgccccccaggaacttcatcgctttatcctcgagccgttcgacgcccgcagcttcgcgacactttgcgggcagttcgacgagcatctccaccagatcgagaaacgcctcgacatcgagatccgcaaccgcggcaaccagttcgaactggccggcgaaccgcgccggaccaaggttgccgaacgcctgctgcagcgtctctaccgcgaggcgcagagcggcaccgatctcactcccgacaccgtgcacctgtacctgcaggagtccggcctggaagacctcgaggaattgcagagcgcgccgcaggtcaccctgaagtcgcgcaaggcgcacatccgcccgcgcggcgccaaccagcagcgctacgtcaaggcgatcctcgaccacgacatcaacttcggcatcggcccggccggcaccggcaagacctatctcgccgtggcctgcgccgtcgacgccctggagcgcgagcagatccgccgcatcctgctggtgcgcccggcggtcgaggccggcgagaagctcggtttccttcccggcgatctgtcgcagaagatcgacccctacctgcgcccgctctacgacgcgctctacgagatgctcggcttcgaacacgtggccaagctgatcgagcgcaacgtcatcgaggtcgcgccgctggcctacatgcgcgggcgcacgctgaacaacagcttcatcatcctcgacgagagccagaacaccacagtcgagcagatgaagatgttcctcacccggatcggcttcggctccaccgcggtgatcaccggcgacgtcacccaggtcgacctgccccgcggcacccgctccggcctcaagcacgtgatcgaggtcctgcaggacgtccccggcatcagcttcacccacttcaagcccaaggatgtggtccgccacccgctggtgcagcgtatcgtcgaagcctacgagcgtcacgagagccgccagcaaggccaggtgcggccggtcgagggaacgggcaagggcggtcacgatgccgcttga

SEQ ID NO: 351838 - DNA, 204 bp, Pseudomonas aeruginosa
atgcccgagctcacccccgtccgcgatctggcggacctcgacacccttgacccggaccagtgcgcgctgggctacgctgcagcgctgcgcggcgagccggcggaggaatgcccagacgggccgcgctacaaggccatcgggaacagcaaagctattcccgtggtgcggtggattgggcggaggctgatggtgcagttgggatga

SEQ ID NO: 351839 - DNA, 249 bp, Pseudomonas aeruginosa
gtgagcgactacgaatacatcaaggcagaactgttctttgatcggcgccgcggtagcgtgagggtccggccattgcccgggggtaagtatcctgtcgacttggtgatcgagtgcgacaagagctttagggaaaagtacccgattggctctagattcctgctgccggtgaaggagaagcagaagaagtcagatgattgccggcctcatctctactcccggtatagctggggtgccacgccgattgactga

SEQ ID NO: 351840 - DNA, 468 bp, Pseudomonas aeruginosa
gtgacccagcgcatctacctcgccggtcccatgaccggcctgccggagttcaactacccggccttccacgccgaagccgcgcgcctgcgcgacctcgggtaccacgtcgagaacccggctgaaaacccggcgccagcctgcggcacctgggccggctacatgcgcaaggccctggtgcagctggttacctgcgacgccatcgcgctgttgccgggctggccaagttcacgcggcgccaatatcgagcgcagcctggcctttgagatggggatgaaggtcttcatggccgcggacatcgccgcacctatagggcgggagtcagccgccaccctcgcctgtgcttccaccgctaactccggacttaaccaagcaaacgagctttcgcattctgacgtgggtacaaggtcttccgggcgccaccccctcgatcattcggttgaggtcggctcgttcgagcccgtcagctag

SEQ ID NO: 351841 - DNA, 3588 bp, Pseudomonas aeruginosa
gtgaccctggcggcggcggcgaacgaggagcacagcttcgccaccggcaagaaggtgacggcgaagaacgatcgggtggaacaccaatcgaccgtggtcagcgccggcggcgatctcagcgtgcaaggcggcaatgacgtgaccttcgttgccagtcaggcgaaggccagcaacgaggcctatctgtacgccggcaacgacctcaatctgctggcggctcacgacgaaagctattcctactactcgaagaagaaaaaaggctcgttcgggcgcagcagtagccggatgagcgagagcgaagccagtaccgtggtgtcgtcgtcgatccaggcgggacaaggggcggaactggtcgccaagcgtgacgtcaacgtcgaggcctcttccgcctccagcacgaagggcgagctggcggtcgtggcggggcgcgatgtgaacctcacggcagctgagaacagctactccagcgtgtccgcgaaatccaagtccggaggcttggggctgtcatccaccagcaaggccaacgcccagtcctcttcctacaccagcgttcagggcgccacgttgagtggcgataccaccgtggtgcaggcgggaagggacatctcggtggccgccagcaatgtggtttctaccgggaagactgcgctgcgtgccggcaacgacatcatcatcgacagcgtggcggagacgtcggagtcgcatcgcagcgagtcgaagaagaagtccggcctgatgagttccggagggatcggcatcacgctcggcacggcgaagaatgcctcgacacaggacacccgtaccgtcgtcaaccagggcagcaccatcggcagtgtgctcggcgatgtcgacatgcgggcgggcaagaacctgtctatcacggcttcggatgtggtggccggcaaggacatcaacctcgtcgggcagaacgtgagcattctcgctgccgacaaccagaacgtcagcgagcagacccgcaagaccagcaagagcggcttgacgctggccttgtcgggaacggtcggtagcgcaatcgacgccacctaccagaatgccaagcaggccaggaacgaagacgacagtcgcctttccgcgttgcaggggatcaaggccggcttgagcggcgtccaggcctggcaggcagctcagcagagcggcggcatgacgggcgagaacagcgcgcagttcgtcggcatcagcgcttcgctgggctcgcagaagtccagctctcggcagcgccaggagcagcagatcagccagggaagcacgctcaccgccggtggcaacctgaacattatcgccacgggttccggggctgtcggcgaagacggcgacttgcgcgtgcaaggcagcaagctgcaggctggcaaggacctccaactgatcgccaaccgcgacgtcgtgctggaagccgcggccaatacgcagaagctcgatggcaagaacaagagcagcggcggcgctgtcggggtaagcgtcggcgttggttcgggcgaggctggcatcagcattttcgccaacgccaacaagggcgccggcaaggaaatcggcaacggcaccacctggaccgaaaccaccctggacgcgggccagaaggccagcttggtcagcgggcgcgacaccacgctgaaaggggcgcaggtcaatggtgaaagcatcctggcgaaagtgggtcgtgaccttaccctgcaaagcctgcaggatcgcgattactacgattccaagcagaagaacgtcggtggtggggcgagtttggctatcgttggccagggtggcggcgccaacttgagtctcagccagagcaagctgcattcgaagtacgacagcgtgcaggagcagaccgggctgttcgccggcaagggcggcttccaggtggaggtgggcaagcacacgcagctggatggcagcgtgatcgccagcaccgccgaagccgagaagaatcgcctgagcacaggctccttgggctggagcgagatccgtaacaaggccgagtacaagagccaacttcagagtgtcagtgtcagcagcgccaacgatggcgccggtgcgttcgtcagcaacatgcctagcggcatgctcattgcctacaaccacggcgatagtgccagcggtaccacgggttcggcgatatccgaaggcaccctggaggttcgcgatccggcgcgccagcaacaggatgtggcgacgctcagccgtgacccgagccgcgccaacgatagcgtcagtccgatcttcgacaaggagaaagagcagaagcgtctgcagcaggtccaactgatcggcgagatcggcacccaggccatggatatcctgcggacgcagggccaactcgacgccgacaaggcggcgcgggccgaactggaagcgcggggtatctccgcgccggacgccggcgccagcaagcggcaagtcgaggactaccgcaaagcgcttctgggcacgaatgcctaccaggacatcatgggcaagtacggcaccggaggcgactaccagaaggccgcccaggcggtgaccgcagccttgcaagggctggccggcggcgacattggctcggcgttggcgggagcttcctcgccctatgtggcgggcgtgatcaagcaggtggcaggcgacaatgacacggcgcggatcatggcccatgcggttcttggcgcggtggttgcgcaggcccagggcaattcggctgctgcggggggcgcaggagcggcggggagcgaactggcggcgcaggtgatcagcgagcgactgtacggaacccgggacagctcgacgctgaacgaagcgcagaagcagactatcaccgcgctggccagcctggccggcggattggccggctccgttgtcgatgggagcagcggaggagccattgccggggccgcaggcgggaagaacgcaacggaaaacaacttccttggcggcggaaccccgccgggcttgatcagctatggtcaggcagcgagctccttgaccgagtacatgcgcaagaacggggcgacagccgaggagatcacccaggcgcaacgtgatctggcccagggacagggcttcgatggcgtacagccagcgaatgagttcatcaaggcctggggcgaggccatggttgcggaagctgccggccttgggattgttgcggggttgggtagatttgggttgtggggtgcaaagggagcgactcctgttgtaactgctgaggggcgaatcggtaactcagtatttacggatgttaaccagacggctagaccagcagcccaggcgaatcccaaccaaccgaccttgattgccgatcgagtggacgcaaagatagcggctaaggggacgcctcacccgaatgggaatatggcggatgctcatgcagagattggcgttattcagaaggcatttaatgaaggtaaaacggtaggctccgatatgaccatgaacgtagtaggtaaggatgtttgtggatactgcagaggtgatattgctgcggcagctagcaagtctggtttgaaatctttaactattcaagccaaggatgatattacaggtttgccgaagacgtattactgggaggtaggaatgaagtcaattagagagaaaaaaatatga

SEQ ID NO: 351842 - DNA, 1155 bp, Pseudomonas aeruginosa
atggccactattcgcgctcggcgcaacgccgatggaacggtgatgtacaccgcgcagattcgtatcaagcgcggaggcgcgcaagtctatcaggagagcgcaagtttcagccggaaaaaggccgctgaagcatgggcgctccgtcgggaggctgaattggccgagcccggtggcttggagcgggcgacgaaaaagggggtactgcttcggaacatcatcgcccagtacctggccgaccgggataagactcgcccgctgggtaagaccaagatcgccacgctgaccgccatcgccgcttcccacctgggcgataccatcgaccgggatatcaccagtcaggtgctcgttgactatgcgctgtggcgtatggggccggacgggggaggggtaaaggcgcagacagttgccaatgacctggcacatcttgggtcggtgttaggagtggcggaggcagcctgggggtatcaagtcgacccggacgttatggcgaaagcccgcagggttctcaagaacctgggttacaagttgcgcagcagggagcgtgatcggcgcccgacacttgatgagttggatcggttgttccaggcgttcgagcgctcatggcgatcgcgaccgacctcgatgtgcatggcgaaggtcgctgcctttgcattgttctccagccgaaggcaggaggagatcatccgtatccggtgggcagacctggacgaggcccggggcgccgtcctagtccgggatatgaagaacccaggtgacaagtggggtaacgacgtgtggtgtcagctacccgaggaggcaatggcggtcatcaagagtatgccgcgggcctttgacgagatatttccatacaccaccgatgcgattcagggggcatggagtcgcgcgatcactgccgcaggtatagaggatctgacgtttcacgatctgcgccacgaagcgatcagtcggctgtttgagctggagtgggacattcccaaggtggcttcggtcagcgggcaccgagattggaactctcttcggcgatatacccatctgcgtgggtctggcgataaatatgctggctgggaatggttcccgaaggtcttggcgatgccggtgtccttcggggaatgggtttccaagaagaagtcaggccgccggccgggctcggtttag

SEQ ID NO: 351843 - DNA, 213 bp, Pseudomonas aeruginosa
atgagccatgccgtttcccgcttgcgccaggagcgcctggcgcgcagcctgaaacccttcgtcgcgcgcggttcgcgcatgccgcgctgcgaaggctgtcggctgctgcccagctattgcatgtgcgcctggcggccgcgggtcgaggcgcgcgccggcatgtgcctggtcatgcacgacatcgaggcgctgaaaccgaccaacaccggctga

SEQ ID NO: 351844 - DNA, 639 bp, Pseudomonas aeruginosa
atgatcgtcgccctgctcaaccagaaaggcggggtaggaaaaaccacccttgccacccatatcgccggtgaactggccctgcgtggaaagaacgtcatcctgctcgatgccgacccacagggctcggcgctggactgggcgcagcggcgcagccagcagggcttgcccaggctgttcagcgccgtcggcctggcgcgcgagacgctgcaccaggaagccccggagctcgctcgtcgcgccgatcacgtgatcatcgacgggccaccgcgcatcgccgccctcgcccgctcggcgttgctggcagcggatcgcgtgttgatcccggtgcagcccagcccctacgacctgtgggccagcgcggagatggtcaacctgatccgcgaggcgcaggtgttcaggcccacgctgcgcgcggcgttcgccatcaaccgccgcgtcagtaccacggtaatcggccgtgaagcgcgcggcgcgttggccgatcaaccgctgccggcactgcaggcggaagtacgccagcgtatcgtcttcgccgagagcgtggcggccggtcgccttgcccgcgaactggcaccggacagcgccgccgcgcgcgaggtcagcagcctggtcgacgagttgctgaggtggtcgtcatga

SEQ ID NO: 351845 - DNA, 810 bp, Pseudomonas aeruginosa
atgcgtaaggccatgctcggattgttcctggtcgttcccctggcctgggctggcgccgcgttttcggccgaggcgccgtcggcacgccagcagggtatcggcggaaccgtgaaggttcaggcgaactcggtgatgcgcctgcccaagcgggctcaggagctgcgcctgcgcagagtggagatcggcgaggatgccgccctgctgattccgctggaggtcagcgtcctgcgcatcgaggaactgcacatggcgaagaacgcccggatcggcgtggcgccgggcgaggagcgaatcagcatcgaagtcgtcagcggccgcctggccgatggcagcatcatttccgcgcccggcgcgaccggcaccttccggcaaagcgccggtaacggccgcgacctgaccttgcgcctgcaggcggtggaggtggaaagcctgctgctggatgcccgcggcggcgtcggcgcgccgggttacgatggcctggacggggcttccggcaaggcctccggctgcctctggggcagcgcgctgaaaggtggcgacggccaatccggaagcgacggcggtccgggcggggcgggtggtcggattcgtctggaagtgccgggcgattttcctctggagcgcttgcaaacccgtctgcaaggcggcgtcggcggcgccggaggcaaggccggcaaaccgggtgcggcggataacgccaccggttgctggatctactcggtggatgccggtcgtgcggggcgcagcggagaggacggcgcgaacggcaccaacggcagtgatggcagcctggacgtcgtgcgcttctga

SEQ ID NO: 351846 - DNA, 339 bp, Pseudomonas aeruginosa; identical to SEQ ID NO: 332086

SEQ ID NO: 351847 - DNA, 372 bp, Pseudomonas aeruginosa; identical to SEQ ID NO: 324747

SEQ ID NO: 351848 - DNA, 1020 bp, Pseudomonas aeruginosa; identical to SEQ ID NO: 332088

SEQ ID NO: 351849 - DNA, 237 bp, Pseudomonas aeruginosa
atgaagtctggcttcgatttttacttcggcggtcgagttagctcccgccaggagatgcaacagcgtctgcgcaatctcagaaccgagggtagcgttatgaatgatctggagaaagttctttcgtccagaactccggttgaacaagtccaggccgctgaggatttcaataaggcgaatcgttctaagttgattagcaacaagaaaggcactctttatttgggggatgtattcgaatga

SEQ ID NO: 351850 - DNA, 309 bp, Pseudomonas aeruginosa
atgcgttcactcttctggcgaatcctcgccgccttctggctggccctgctgctggtagccgggctttccatcctgctgggtcgcgcgctgaaccaggacacctggatcatcgcccgccatcccggcctgaaggatctcgccgagcagtggaccgccctctacgaagaacagggcagctacgcggcccagggcttgctggagcaacgccgccgcgactacgggatttccatccaggtgctcgacgaaagcggccagcgcctggtcgacggcacctacctgccgcgcccccgccaccgggtcctccggtag

SEQ ID NO: 351851 - DNA, 3012 bp, Pseudomonas aeruginosa
gtgactatcttggaatatctggattttactgaagaaaagctaagaaagtgtcagttagaagcagtgcgcagcttcgtaaggtatgccgaagagaatgatactgagagaggctttctgatcaacctgccgacaggtgcggggaaaacaggagttatctctcttatatcacatctgtcagatgccttgaaggttcttgtgatatgtcacagaaaggccgtgaaagatcagttatttaaagagatttcgaaaaaattcttccgtaatataattggtgatcaagagtttgagttaaagaaaacctatagggactctaattttgatcagggtgacggagtttatatcacaagctttcaaaagctgacgatgctgagtgacgaaaaattaaagaatgtccaaagcgattttgatctaattattgtagatgaagggcactctgagccctctccagtttggcgtgagataatacgtcagtccgcagctatgaaagtagtggttacggcaactccttatcgtaatgatttgtttgagctgaacgtaagtaccgatcatttttatgtttttacatttaaagaggcgatcgatgatggggttattatggaacccctgtatgagcaagttgatagggaggaagatttgcttgcaggcattgtaggctacctaggtgcaaatgaagatgtgaaatgtatcgtgaaatgcaagagtctggaagagatattaaaataccatgaactcctgtctcaatcatttatcacggcaagcgtgcacgagcgactagaaatcgacgaggcgcaaaataaatttaagcgagttggtccagctcttaaagttgagggggtgcgggtgataattcaccagcacaagcttgatgaaggagttgacatccctgaggctaagttactgatacttacctatgaactgggtagtggtcgtgagctagttcaggcagtaggtcggattgtacgccggtatggagcaacccaaccgctggtgatcgacctgagccgcggggcaaatgagggcatgtgggatggatatcaaaaatttgatagctatctcgccaatggtggtgcaggcgaatttgttagctcgttaagcacaagttacttgattgaatctttcttagagagctttccaagatatagttattttgatgggaagttcaaagaaagagttgacctcaatagtgttgatccagaagacgatctcaagatccctcatgcgtcagtctgctttgtacaaaaagaggttgatttctctctgccgctactgatggatcgattgtattgggaattgcatggttctggatcgctagtcaaatcttatgaggaagttcttgatttgcaggtcatgatttatgttgagttcaaaagttcaaagttttttgcaaataagcttttctttgagcctaggctgcatgtagttgtggtaaaagaaattgattctggtgtcgctatcttcgatagcggcggtggccgttattataatcaggagcagtataggcttggtaatgcaattcatattgacaagctgactgctttggctgctaaaacagcaattaatcagattaaggaaactcacgctcgtgctattggccgggctttgcgccgtccagagtccgtagcattgaaagggcagaatcttgatggcgggcgcggcagtcaaagtaactcccgttacgcgttaactatggtgaaggtcgataatattggcctggacggcaaaagagacagtagtttttacattggcgctaggtccgggcgggttgtcgatcaaaaagaatccaacttcactcttcaagacatttctgaatgggtcgatacgataagccaatgtatcaatgctggagggaatgctgggcgacttatcaagtcctatgctcagccggtcagcgaaaaacccacgtcagaaattttgtcagtgctgctagattttaccgatcttgagggccctgaagctacgaatcacggagtgatttatcctgaatttgtttatgttgactatcagcaggggattactttcgacgctcaaggtgatcttatagagctttcgttaggttactcggatgatgatggggtttttgaagttgctctaagtggagcgtcagaaggaagagctgatatcgagtggatagtggagtatttgaattccggacatagattgaaagtgctgtacgaggacggtgtaacgtatctggcaggagctttttacaagctagccttaccctacgaacgcggaattcctgctgaagaaagctttgcaggcaatgccatttttccgcttgacgcacttagagctccagctctcagggagaaggggcacactctcgaccataagtatcatcggactactagagctgattttgatacggattcgatattttatttgatcgacttgctgaaaggctatggggaccaaacaaccccaattggagcactgggtcctttcgcaacatatatccctgcttgtgatattgttctttgttgtgatatgggtgttgagcctgctgatttcattttgtcttcgccggaaaaattgtgctttgttcatgttaagtgtggtgattcattaaaccctcaatctccagccggtgctattgcggaagttggaagtcaggcaataaaaaacgttcacatgttgatttcagggcttaaaagggtgaagcctgggaacttctctacatggaagcaagcttggcccgctgctggtgctgagtttccgctagacacacgttacaggttagtggaaggttctattaatcatcctgcaccacttgatgattcactctctgagagagtttgggatgttatctgtgagcggagagtatcgatgaaatgtaagaaggagatttggattgttgccggaaactctttctcagctagtcatttcacaagaagtatgcagagcccgctagcgtgttcgcccacaagtattcaggcgtatcaactaattgaagattggctgagcactgcagatgagcttgatgtggatctcaagatttttacatccccgtaa

SEQ ID NO: 351852 - DNA, 873 bp, Pseudomonas aeruginosa
atgagcaaaaaagaagataagccatctcaaattttttttgattacaagaacttgattgaaacgctctcgcgggtggaggaagcattcgctgcgcgccgattaaagtgccactccggtagcgcgcttggctcgttgttttcctcaatacgccggatagctaaaaaatcagagaatttgaatgaaagacagtggcataaatcttttattaagtccactgaggccatacgtatactcaacgctgtcgaggccgtgctagatgacattggagcgcaggaggcgattcatcgtattacgacgagtgacatgaatcttggtacccgacaagagtctaatggaaaggatgcattatgggagcttgatttgtatagacgcttcaaactaggaggcgtacccgtttgtttcgaagagccggatttagtagtgtctcttggcgagagccacggggagtacgctatagcatgtaagaaaatatattccagagccggtgctcaagaatccttcaaggtggggtgtaatcaacttaaaactcatgaaaagccaggagtggttgccttcaatctagatgatattctccccaagggccctttgtttggattttcttcagagactgaactcaaggagcgcattgataagtttaatacaaaatttatacgggaaaatgagcgttactttgcacacatagcaagtcgaggggcgtgtgatggcgtgctggtctccacgtcgttcattgctcacgtgccagatatggatccgccaattaatatgattcggacatctgcatcatggactagtcgaaaggaaccgcatgtacagaatcgcttcaaagccttcattgagtgtcacgacagaatctatgagaatgctcgcgtgtga

SEQ ID NO: 351853 - DNA, 276 bp, Pseudomonas aeruginosa
atgagcaagccattcgatatggatttgttcttggctggcgttctgaccggctcgcacgcaacccggcaacgccatgtgcgacaggcaaaaatcatccaggccgaaattgcgaagcgctggcaactagaaacgccttgggcttggcagaaaaagcatctgacctggtttctcaagcaccaccttagccaccgcagtgaggcgacaagttactactacttgctgacggtccgtctgctcgctcgacgtctagggacgtcatggcttttccatctttaa

SEQ ID NO: 351854 - DNA, 696 bp, Pseudomonas aeruginosa
atgagcatgctatcgctttccctatatggaagtagagcaagagaggaccactcgcaggactccgacactgatctgttcgccattacagatgacgactcctacaaaatgcttgtaaacggaaaaacaaacattgcttgctatccagtagatttagccctatcaagaacagctagcggcgatctattctttatgcacatcgtaatggaagcagtaccactgtacgaccctcaagaagaatttcaacgggtaaaacgcgagttcaaatttaaagaaaattatcaagaagaaatatctaacgcatcggagctaggccatgcactccttcttaatgaggagtcaactagcgacttctccttatacaacaaaagaatcatctggtgcattagaacaatactaatcgcgcgaagcgctgaagaaaagagaccaaaattctctgcctcggatctatcccatcacttctccgatcagaatattggaaaactaatatcaataaaggattccgaccagtatgagagagagtcatacagcctagccaaacaaataataaatagattcggaaagcctttaaacaaagatatgccaaaagagtatacagacctcgccttttactttaaagataccggtaattttatgggcgaaagaacagctcgcttgctttctcacgacatagagtctgatcagtatggctggttctga

SEQ ID NO: 351855 - DNA, 1071 bp, Pseudomonas aeruginosa
gtggcgaagttcaacaagagaaagagcgcctactgggatgcaatttatacaaactctagccctcagctaactatacacgattggaatttcaccaacaacaaagggccagcaagcttagtgtttgaggcaggtcggctcatagacctaattagaaaaaacaatataaaaaactatacatgccgcgatatctcgttctccacatgcgactttgaaggtcgctttgaaggtgaagaaataagttttcgaaaatgcaaattcaccatgtgtgactttggcggcagcttctggaaaagtgtgaaatttagcgagtgtgagtttgaaggctgttcattcacgatggtcgagtttgactcgtgccagttctatcagtgccattggtccaagatctctatttcaggcacagagacaaagcttataaacacattaatcaccaatccctctgaatttaatgaagccgcatttacctgccaagatcccgtaatcctaagcggaaaatccaagaccgccgaataccagctaatgcgcctagaaaacacaaaagcaaagattgccagaagtgtatggaagaatagcgaaggctatggtgatgagagcgcgtactattcggcacttaaaaccacaacaaatcaatcaattaaatcaaagaaagttgaggcaacttacaactttcaaaagaaaaagaacaaaatcagaaacactatagttatcctctcctgcattatcgagtacggaatcctaaatgcatccggctttataaacaaatggggacagagcatagttaggcccgccatgcttggactattcatcatgattggatttggaattctatatgccatattccctggctgtggaaaccctagagcgagcgcaggagataatgtctcaagatttatatcaggcatcgtacagggattcgatatcaccttcttagtcggctatacaaagtatgccactttcaaactccctttaaccgagcaggcgctatatgctttaaatgcattcatgggcctgtggtggtatgcgatacttgtaccaactgtaataaacaaactgagcaggccaaacacatga

SEQ ID NO: 351856 - DNA, 639 bp, Pseudomonas aeruginosa
atgcctctaattgatcatccatacatcctaaccgatgaagacctagatctcatcgaaaagtggaaggcaagtggaaagacccaccgagactggggctgcaaagagcttgaaccattaagagttaggattagagcctactatagattaaaacaaaaaggaatttgcgcttactgcgcgaatgaagtctctgtaatcgccgcgaacaatgcaaatattgagcacatacttccaaagtctcactaccaaaaatttatctttgaaactaaaaacatgtgcatcatttgcgctgactgcaaccaagcaaaaggaaatagtctcgttgaaaatgaacaagaagaaataattgaaggagaagctatacgatacccttcagcatctgcaagattcaaaataattcacccattatatgacgagtacaatgaccacataaaaaaacgaaaactcgcctacataggaataacaaagaaaggcttaaaaacaatagccatctgcgaccttaacaggttcgcaagaaactatggttatgaaagtgtcttcttagaagatatagatataatgcagttactacaaaaattctccacaggcgatagacaagagcaaatagaagtatttaataaattccgcgaaatactaccttaa

SEQ ID NO: 351857 - DNA, 1401 bp, Pseudomonas aeruginosa
atggataagctcaccgaaatactatttgaggacagacctgtcccccttacaaaaacaatatcaaacgcgaacgaaaacaccttttcaatattaatcggaaaaaatggcgtcggaaaaagccggttactaactgaaatcataaaccattacagcaaaatttactccgaagaaaaaaacagttttcgtcagctctacagcaagacgccctcaacaataatatctgtttctacaagcccatttgacaagttccctctgccaatcacaatgaagcaccgccaagtgcgaaactaccattatgtcggcatgagaggacaaccagtttatgcaaataatgccatggcactaatctcttcggcagccatgaggctactcacaaaatacaggcaaaactcccgacacgagaacttctatgaagttttctccttgctcggcctttcaccaagcctgtcttttgtattcaaaataaacataaaaaaatcgctagaaattaaaataagaaatacaacccaagatcatttatttgagttggactacgaggacacaggggtaatatggtttgacatgttaggtgaacctgatgatgtcaccatggaagaattactagaccccaaaatctacgaggaatacacacttcaaagcccagaaagaaaacgttcaatagcaaaatccctaaactacatatgggaaaggctagacagaaaaaaagacgccttattcaaatacgatttcaagtatagaaaaaacacaaaacaaggcgccgaagacatttacatgattgagagcctgatcaccctacttgaacttggagccttaaagcttatagatttaaaactaacaaaaaatataaaaggcaactctcaagagctatctctaagacgcgcaagctctggcgaacagtgcctattagtaatcatattaggcattgctggcagcattgaaaacaatacgttgatattaatagatgagccagaaataagcctacatccctcatggcaagaaaaatttatggatctactcataaaagtttttgccgattacgaaaaatgccatttcataattgcaacgcactctcctcagattgtttcccgcctatcgtcagaaaactgctttataaccataatgggcgaaaacaaaatatatgaagccaaagagtactacaatagatcagccgacttccaactgacagaactcttcgatgcccccggcatcatgaatgaatatataacccgccttggattccagcttctaacaaaagtaaaaaacaaaaagtttatggaaagcgaggactgggacaacctagaaaaactaaaagaattcctaaaaaaactagactcgaccgacccaaactccaaacttatagaaactgtaattgaagtttgtgaactctatgcctctaattga

SEQ ID NO: 351858 - DNA, 2112 bp, Pseudomonas aeruginosa
atgactccgtctagagcgcagcagaacctgtacgcattcgtaagccaggagcgagccgtttttcaggcgttgtctattgaaacaccgtgggaatcaactcaatggtcagtaagaagttggcttccccaacgaaataaagcaaaaacgataacttttgaaacacaccggcagtcgctcgagaagaccggatattccgctccaccaaaggcccctctcccaccagcctttcaggacttctgcaaggccatcattgtgcacctgcagcgcacccggggattaaagttctcgatggtcgcggcatacagcatcgccactaggcgactgtacaactcactatacgagcgtggggaagcagaccctctccgattgatgcgctctgactttgatcgcgtagtaggctttcttcgagcgagcagttacaagaatttatacgatgcgatttcgcacctaaaggtgatcgccgatacaattgataagtttcaaataactgagatcgccattcattttgagcatgatgttcgtcccgagaaaactcgccatgattacatttccttgcatgatcctgatcgcgcagtgaagcaacgtaagtctgacgagaagttaccctctcgcgaggccatggaagcttatgcgcaatgcacaaaccagcctttaagttcaggcgaggaaattttgctccgagtgatagatttgttgattgcgaccggccagcggggtaacgaagttgcggtaattccctatgactgctgggttgagcgacctattaaagatgagcagagtgaggtggtgctggacgctcatggaaaggcgctcgtcgaatgcggaatccgatactttgcggagaagcagtttcagtcacgtgttcattggctcgctgaaagtgatatccctctggctaagcgtgcagttgagcgattgaaggatttaaccactgaacaacgggaaattgctgtatggcaagagcagcatcccggacgaatttggcagttttcacccgaagaggtgatatctgagcgagaagtgatgaagtggcttggatttagtaatgtgtcagggtacggaagaaacctctacctatatttgtctagaaatggcattcatccgtacgaagaatcggtggggcggaaaaagaaaaacgtcggcaggagatatgtggcgggtgaaattgagcgcctgatttccccaaaacttggtggccatgccgcactcacggaaaatactcaaggcaaagcgaaagtcgtacttaagactagtgaggtacttgccatcgcttttgatggtcagttccgtttcggagggcgcggggcgaatgtgttccgtgcgatcccgcggcgggtaagcctggaggaaataaaccgagcactaggcgctgaccccaaatatccctctattttttctcgtcgctcattggttgaagccgatggggctccgattcgcctaacgagtcaccagccccgacattggcgcaacaccatctatcacctaaccggtatgagtgatgtccaacaagcgttggccttgggccgaaaacgcatcgatcagaacaagttttatcagcacaccagtatcgaagaagccaccgctacccatcaagagtttctggcgttcaacagctaccaagaacgcatcgattttctacatgcgggcattagaaaggggcaaatccagggctcgttgaccgatagctaccacgcgctgctacaagacaaaggtacgaccacggcagatgccttcctcgctgtacatgccacggcgctgcatgtcaccccgtttggaggctgtgtccatgatttctcacaagccccctgcccgaagcatctgcaatgttggaacaactgctcacatcttcatctactgggtactccgtcggagaagaaaaatcttcaagagctagccaagcgtttgaccgactccatcgttattatgcgtgacgcgagtgctggcgaagccggcggtgacgtgtggctggcagatcaggagcacaaacttgagagtttacgatctgctctttctcggaccaaggacataggtccacaacaggtctttccggccggccagccggtaacccttgctaaaacgagcaaacgacgcagttcggttttggatgagtag

SEQ ID NO: 351859 - DNA, 621 bp, Pseudomonas aeruginosa
atgaaggataaagcccatcctttcccgtttgatgcgcaggccgagctcgtcatgaacgcgttcatgaacgctacgggggagaggctcgatcaagcgcgcagacaagtgggtggcagcgatgaggtccagcgcttcagccacgggggatcgtggcagtcacatcacagctacgcccctgaccgcgtcgaccagatgcaggcgatcaagcacgaaacaaggttgcgcttcgaggaaataatggaaggtcggctcgacgtcattgagcgcacagtcgatgagatttccaacagcatggcggacagctttgccaaagcgttttaccaaatgatctcagatacgtgcgaagagagcggcaacgtcattgatggctccacagggagtttgggcgagcagatgctcaaggctatcgagcaagtcgaatactcggtgaatcgggatggtcaagtatcgcttccagagtttcgcatacaccccagcgttgccaaacgcctccactctgactcttcgctccaagaacccgcactgctggctagggtagaagagattaagaagctcaaaaccgcccaggcgttggtagaggaagccgagcgcaaatccaaatttcgtagcagggagcagtaa

SEQ ID NO: 351860 - DNA, 3933 bp, Pseudomonas aeruginosa
gtgcaggcactgccttcggccgttagggctcagggcagcctgcctcgcctcgaagagcggagcgccgttcttgccgagcctccggttgggcagccagcgttgcaaaccctgccgtcggttgcgcgcgttgagggcgtgcccagcaatgccacaccgagcaacagccacaagtatctgatcgagaccaacccggcgctcaccgagctgaagcagttcctcaactcggactacctgctcggtggcctgggtatcaatccggatgacagcaagaagcgcctgggcgacggtctatacgagcagcgcctggtacgcgaagcgatcgtccagcgtacggggcagcgcttcatcgccggattgaacagcgacgaagcgatgttccgctatctgatggacaacgccatcgccagcaaggacgtattgggactgacccctggcgtcaccctcagcgccgcccaggtggccgcgctgacccacgacatcgtttggctggaagaagtcgaggtgaatggcgagaaggtcctcgcccccgtggtctacctggcccaggccgaggggcggttgggcccgaacggcgcgctgatccaggggcgcgacgtgaacctgatcaccggcggggacctgaggaacgccggtaccctgcgcgcgcagaacgacctcagcgcgacagccggcaacatcgacaacagcggcctgatcgaggccggcaaccgcctcgacctgctggccagcggctccatccgcaatgaccagggcggcatcattgccgggcgcgaggtaagcctctccgcccttaccggagacgtcatcaatgaacggacggtgacccagcaccagtcctcctacaggggaaccggtaccactgaggcatttgccgatagcgccgcgcgtatcgaggctgcgcagaagctgaccgtttcggcaggtcgcgatgtagccaatattggcggtgtcatcgacagcaagggcgacctcgccttgcaaggcggcagggatgtcctggtttcggctgcggtagcggagcggggctggacggcaggaagccaggcataccagacccagacgacccagatgggcgccgaagtcgtggcggggcgcgatatcagcgtcagcgccggacgcgatatcagcgtcgtgggcagccgcatcgacgctcgtcgcgacgtgacattcgaggcgggtcgcgatgtgggcctggtcgcggctgccaacgaagagcatgcctatggcaagaccaagaaggtcactttccaggacgacaagatcacccagcaggccactcgcgtggacgctggcggcgacctggcgatcaatgccggacaggacctgcggctggtcgcgagccaggccagcgccggcgacgaagcctacctggtggccggcgacaagctggagctgctggccgccaacgacagcagttactacctctacgacaagaagagcaaaggcagcttcggtagcaagaagacccggcgcgacgaaatcaccgatgtgacggcagtgggcagccaaatatccagcggcggcgacctcaccctgctcagtggcggcgaccagacttaccagggcgcgaagctggaatcgggcaacgacctggccatcgtcagcggcggcgcggtgaccttcgacgcggtgaaggacctgcaccaggagagccacgagaagagcaagggcgacctggcgtggcagtcgtcgaagggcaagggccagaccgacgaaaccgtacgccagagccagctcgtcgcccagggcaacctggcgatcaaggccgtggaaggcctgaagatcgacctcaagcacatcgaccagaagaccgtgagccagaccatcgacgcgatggtgcaggcggatccgcaactggcgtggctgaagcagatggagcagcgcggcgatgtggattggcggcgcgtgcaggaactgcatgacagctggaagtacagcaactccgggctgggcgtcggcgcgcagttggcgatagcgatcgtcgtgacttacttcacggcgggcgcagccagcggggcgattgcaacggccggggccggaacctccatggcaggcgcgaccgcagccgctaccgctacgacttcggcgggctggttgaacgcggcaggtaccgcagcgctcagcggcgtggccagcaatggagcgatcagcaccatcaacaaccggggaaacctgggggatgtcgtcaaggacgtgacctccagcgatgcgctgaggggctatgtagtcgctggcacgactgcggggctgactgccggcgtctacgacaaatggacctcgacccagaccggcacctcgaccgctctaccgaacaccggggccgtggcgcccgccgcagggttgggcacctggcaaggcgtgggccagttcacctcgaaccagttgctgcagaatggtacttcggtgctgttggaccgggcgctgggcggcaagggcagcctgggcgatgcgttgcaaaacagcctggcaaatgcctttgcggcctacggcttcaagctgattggcgacaccacccatggcgtactggacgacggcagcctcggcaagatcggcttgcacgccctgatgggaggtctggccgccgaagcggtcggtggcgatttccgtaccggagccctggctgcgggagtcaacgaggcgctggtggatagcctcgccaagcaatacgccagcctgcccatcgatgacaagaagggcctgctgaccatgagttcgcagttgatcggcatgctggcggcttcgacgcagggcgatgcggacgccaagagcttgcagacgggagcctgggtggcggggaatgccacccaacacaactacctcagtcattggcaggaggagaagaagcggcaggagatcgatggctgcaaggacaaacagctctgcaaaaccggaatagaagccaaatgggcaattatttcggcccagcaggatgtcggtatcgtcgtaggtgttggaggaggcatcggtctttcgacagctgaaaccgcagtgggtgtttatgagctggtcaagaactggagggaaacctatgcagctctggagcagttggccacttcgccagagttccggcagcagtttggcgataactacctgaaggggctggaggagcgcgccgcattcttgacccaggcttacgaggatgccggctggcaaggttcggtcacagctggtgtcgagggcggtaggttcgctgcggaacttgttggcgttctgacggcagtgaaaggtggcgcgcagataaccgccaagctgccaacagcagccaagaacctggtcaacgcgattgcggagtcacctgtttccggtagtatgagttcgcagttcggggcagtgggggacttgggtcggctgggtgggggggcaaaaggtgtagcaacagccgaaagagcagcattaccagcgggatatcgcgaaggatcgtcggcaggttctggctttgcagagactgcaggtttaccggatggttatcgcagggtaatcaataccaagaccggcaacacggaagtgctggcagcagatggaaaactgtacctggaaacaggcaatggactacagccaaaggcgggaggaaatctagcggggctggttgaggcggaaaaaagtattgcggctggtaaggagccaacccgcttcattgatggagttacggttgttgataagaaaaccggtaacgtcctccaaggtactgttgatcttgggccaactctagatcggataaagtcaggtggatcctaccctcacaaaaacgatggttctatattccaaaatcgtgcaggagatttgccggttaagccagctggctactatacggagtatgtacaccctaccccaggagtcacagggcctggagctcagcgtatagttgtcggaaagggaggtgagatgtactacactgcagatcactataagacatttattctgatcaataattga

SEQ ID NO: 351861 - DNA, 951 bp, Pseudomonas aeruginosa
gtggcggggaatgccacccaacacaactacctcagtcattggcaggaggagaagaagcggcaggaggtcgatggctgcaaggacaaacagctctgcaaaaccggaatagaagccaaatgggcaattatttcggcccagcaggatgtcggtatcgtcgtaggtgttggaggaggcattggtctttcgacagctgaaaccgcagtgggtgtttatgagctggtcaagaactggagggaaacctatgcagctctggagcagttggccacttcgccagagtttcggcagcagtttggcgataactacctgaaggggctggaagagcgcgccgcattcttgacccaggcatacgaggatgccggctggcaaggttcggtcacagctggtgtcgagggcggtaggttcgctgcggaacttgttggcgttctgacggcagtgaaaggtggcgcgcagataaccgccaagctgccaacagcagccaagaacctggtcaacgcgattgcggagtcacctgtttccggtagtatgagttcgcagcttggggcagtgggggacttgggtaggctgggtgggggtccaaaagcaactgggactgctgctgaagcggctattcaagttcctgggcgtgttcagtcacgcgttaacttgatgactggtgacaaaagtgcgggttgggagcacgttgtaagtcgtcacttcaatccagaggtaaatgcaagccaattcactatagggcaggctgagcttcgcactttgcttcaaagtaaagaggtggtgagtgcgcctgtaacgcgaatgttagaaagtgcgcaaggtattcgatatgttcgagaagtgaatctcagtgggcctattggtattgataagttcagtggtcagcctacctctaccatgactgttcttactgataggtttggtaacttaataacgactactccggggggtgttaagtga

SEQ ID NO: 351862 - DNA, 699 bp, Pseudomonas aeruginosa
atgaaccatctcttcgcgcccgaagcacccgtcagcctcaccatccatggcagcgaccagaccttcccggtgcggcgggtctactgcgtcggccgcaactacgccgcccacgcccgggaaatgggcttcgatcccgagcgcgagccgccgttcttcttctgcaagccggccgacgcggtggtcccggtcgccgccggcagcaccctggagctggcctacccgagccagaccggcaactaccactacgagatcgaactggtggcggcgatcggcaagggcggctgcgacatccccctggagcaggccgaggaacacgtctggggctacgcggtgggcctggacatgacccgccgcgacctgcagatgcgcatgcgcgagatgggccggccctgggagatcggcaaggccttcgaccgctcggcgccgatcggcccgctctaccctgccagccaggtcggccatccgcgccacgccgccatcagcctccaggtcgacggcgaggatcgccagcgcagcgacatcgaccagttgatctggtcggtggcggaaaccgtcagctacctgtcgcgcttcttcgagctgcgccccggcgacctggtcttcaccggcaccccggaaggcgtcggcgcggtcgagcgcggcgagcggatgctcggcgccatcgacggcctcggcgaactcagcgtccgcgtggtctga

SEQ ID NO: 351863 - DNA, 1116 bp, Pseudomonas aeruginosa
atgtttaaaaaagctttcgctctggcgtcgctgtgtgctgcgatcttatccccaccattggctctggctgtaactggaggtggggcggagatacctgccagactgtataagggtgcacctgaaagtatcttgccgcagagtttcacatatgcggtgacaggcagtggggttggtaaacaagcatttctaaataacgattcagcaccgtttggtacatttgggacggtgcattatgcgggtagtgactcggtgttgacggcttcggagttgagtaactataactcttattttcgtggttcgtatggaccgttaattcaaatccctatggcacatattccgattgctattccatataggcgatctggaattgcaagccttaatttaacttcttggcagctttgctctgttttctctggggaagctaagacatgggggcaactgctgagcaccactgatgctcaacctataaaagtcgtctatagatacactaggagtggggcgacagaaattctaactcgtcacttgaatagtgtatgtcctcaccggatttcagtgaattcggattttattagtgcgagactgagtcctggaggattgccagctaactgggttggggtcgctactgatcaagaagtttttgatgttttgaagagttatgatggctctattgggtatgttgggccagatttgctaggaggggccgggcttggggataattcaaaggttgcaagggtcaatgctactctaccgacatttaataatgtaaatctcgctatctcaggggcattctatctgccgagtactgccactgatcgcgcagatccgaagaaatgggtttctgtcattgctaatccacagtccggctattctattgtcggctctaccaatatgattgttgggcagtgttacaaggattccagtgtggctaaagagcttcttgagtttctcgcgcgccaatatggaggggttgcaaataatgcagcaatgataagtcacggttttttacctctcacaatcacttggaaaacggccgtaatgaacagctttgttacgggtaatagtgaaaatctgaacattaataaccctaacgtatgtaacggtaaaggaagaccttga

SEQ ID NO: 351864 - DNA, 150 bp, Pseudomonas aeruginosa
atgccccccatcatctacgtcgccggccccatgaccggcattcccgatttcaactaccccgccttccacgctgaagccgcgcgcctgcgccacctcgactaccacgtcgagaacccggctgaaaacccggcgccagcctgcggcacctag

SEQ ID NO: 351865 - DNA, 510 bp, Pseudomonas aeruginosa
atgatcgacccacgagcgaacagcccggagaaactggtcccgccggcaccgctgccgcacgtaagccgcggcgcgctcaagcgcatcaagcatcctcagccaatccccaccaactgccccttctgtggctctgatgttgagttggtgaacaacagcgaaatctacggtcgcgaatacggcgactggccatacgcctacaagtgcgaggactgggacgacgattgcggcgcctatgtcggccttcaccctgagaccgacttgccgcttggcaccctagccgataagccgctacgcgactctcgcaatcgctgcaaaaaaccttttgagcggatctggcgcgacggattgatgtctcgtgccgatgcctatgcctggctggccaaacagctcggcttgagcgcggcagagtgccacttcggactcttcgacgttgaccggtgcgagcgggccaaacgcatctgcgacgagtacctggaagcgatctacaccagttcggcgaggtggggatga

SEQ ID NO: 351866 - DNA, 1185 bp, Pseudomonas aeruginosa
atggatgagcagggtgatgacgagggatcatcctcctctgacaccatatccccagatgagttcttttctaaacacgcatttcgcgttgtttatcagacaaataattttctactaccacaacttagagacttagtttcaaaaggcgaggttcttaatctccgccccgaataccaacgtaggttgcgatggtcaaatactcagaagtctcgactaatagaatctcttctgcttaacatacccatccctccagtgtttttgtatgaaaatgatggtgctcgctacgaagtaatggacggccagcaacgtcttaacgccattaaagaatttcaagagggagaatttcctctaacgggtttagaggttctctccccgttaaatggcctaaggtactcaaagacacctcccagaataaaaagagcactagatagagcgaccgtttcggcgatcgtcctactatttgaaagtgacagcgagagatcaccagataataaatttacaatcaccgacgttcgccgctttgtatttgatcgcctaaacactggaggaaccaaactaaatgcccaagaaattagaaacgccatatatcctggagaattcaataagctgatagttaacttggcaagggggcgcgtattcactgacatatttggcatccccccttatatagaatccgagcccagcgattattatgaaaaccccaatcgtcagaaaaataaactttatgcatcaatgggtgactgccagttagtattgcgctatttcgctctgcgcgatgaagagaatattcgcggttctatgaagtccatgctggatagggcaatggcttcaagagtgaaaattacggaggaaagcgccgctaaacttggggaagaattcaaccaggctttaaatgctgccgtagaaatttttggaccgaaaccgtttcttttgcccgaagatgataaaggtcgccgcaggatatcctctgccctttatgatgccagcatggtggcaatataccgccagatggagcatcttcctaagttaatggagcagagcgggaatatcaaaaaacgtttagatcaagagtttgcctctggggataaggatggaatactaaccggccaagggaatactgccaaaactgttaagcaaagaattgaattgctagagaaaataattagagaaggagctggactaatctaa

SEQ ID NO: 351867 - DNA, 735 bp, Pseudomonas aeruginosa
atgtctgaattctcattgaattttgatgatttttccagcgaactcgatgctctatctgaagtggtaacaggaccaacagaaggggcatcgcatactctttcgcctagggcaaggatatgcgctggcaatgcagctacgctaatgctcgccgccatctatgaagaatacattcgacagcaagtaatatcggcatttaaggaaaaatgttccagagtcaatgggtatacggacctccctaaatctttggcgggaaaggtttggaaaaaagcgttggacaacatggcgcgcactcaattctcacgaattgaagagcgtagtcgtgagaccgaggaaaacattcgaaacatcctaaatttcactctgagaaaagacctgaggtctgacgtttcgaagacggtagctcacaacgttaacaacatgagaccgcagcagatggctgagctattcaaagatattggaatttctgagataatcaataagtcttgcaacgagcaaagtctcaaagttttaattggggcgtcgaagaaagcggaattagtttctacagtaacactgagactagatgatttttttcagcgcagaaacgatatggctcacgctctacaagctgggagatctagcggccctggtgaaattttgcaagatatcgaactatttcgactttttggaaagggtctggcgtctgctcttgatagagagtttcctgctttggagagggaaggccttgaagcttag

SEQ ID NO: 351868 - DNA, 819 bp, Pseudomonas aeruginosa
atggaaactaccagtcctcacttcgactatgatcaatacgcagctacaaagtacgagttgcgtaagctcatccaagaggactttgtcgaggccatcgcccatggggaaaagtgtgatcacctaattctctcttcgacccgagaattaggagccggtgaagcccttgcggcagcagttcacgcccactccctatacctagccgcttacgacttggccagagcaggtcacttttcagcaatgttcccacttcttaggaccgctctggaatcagctgtgtatggttacttgtttaatcgcgaagagggactaattgataagtggcgaaagcgccatgtgtctgatgaggacttcaataattgcaagcaagcgtttacgcgagcaatgacacggtttcgaggttatttacaggagcacgataaaaaatcgggtgatacgccctatgaagaatatgtcatgagcttatacgatgctgctatagatttcggcgctcatccaaaccccattgccttggtcaataatacctccgtaatcgctgagggcacacagtctaaattcacttaccaatatctacgaactgaaaagaaaggcatagcgcagggctttgttgcatgtttcgagttcgccacagtgatcgcggtagtcaatcacctatcccggatgcagatcaatcccgagcttccaggacttgacgtgacgtttctcgactttttccgcgaaacaaacgctgtatcagacaagcttaacgggcaacctattggattcgataataggtactacaatcgagtgaattctcttgtctctccaaaaaaagatgattga

SEQ ID NO: 351869 - DNA, 1767 bp, Pseudomonas aeruginosa
atgcttggcaaagtcattgcggggttgctcaaggaaataggtgccgcatgtgagcgattgtctctgtgggatcgctggctgtcgggggtgaagcgtcagtatgaggatttaattgctagtctttcggctcttgaggatagcattaagagcgctaagcttgagcagcatgagattccagtactgcaaaagataagccatcaactgcgcatcaaaaaacagcaagaaaactcacagaaaatagatcaatctgtgaagggggctgcaaaaatatcacctgcgaaggctgagttgagtgcgaatattagcgagtcgatgactgacttcgataaaactctggatgatagcgatttttataacgaatactctgatgttgtcgtcaaatcattcccttttggagatataattgaagatattcaagggctgattgctggtgccggcctcgctcgtttggtcgcattctttgatgacttctcagagctaagtttcatagatcaacgcctttttgttgatgttgtgctgtctcccctgaataattccagtaatgaggcggtcaagttaaaggtagctggatacccaggtagagtgtattatgggaaaattgatccaggaaaggcagatactattagtttggatttttctgatctttacgaggcatctgaagttcaagagatggagcgctcagcagcctcttatgctgcaaggctcttggagactcgctttaaggttttcggtgaagatttgggcaattattttgagctctcatctgatactgctcgcgaagatgtaatgcgcttgatgtttcaggcctcattcaatgtccctaggattatggggcatttgttgcatcttctgtatctggatagagtttcaaaaggtcaaaagataacggccgcctcaatccgcttagcttctcgaaagtactatgaaaacacaatttcaaagtatttcgatcgcctcaatcgttatgcattggagccttttgagaataagcttgatcgtcataatcaaagccagcttttgaactgcttgatcaatgaggcgaaggatgtaaaacgtagaattatctctaaggaagtcggaggcgactatttttcaagccttggatctaatccacctacaagccacttcaccgttagtccgggcttggaggatatgctttcctctctagaatctaatttttttgtgtctcgttataaaaaaatgcgagccaaagataatagagaggtcatagcatactccttgtttcttggtttgtgcgaaaatgagcggatgagttgggggtaccctgacgggcgcccatttaggcattactttcagcagcgttgctttgagtatacacgagctattcatcaatttttgtcgagcaatcagactattcgttgtgatacatgtggtatgtgtcactcaatggataatcgagataagtttgagttctttaagtggcgatgcccagattgccgggagggaacttgctcggttgtaaatctttctgatgatttcaaggaggaagtggctcgccttgataaagacattatgttagagccgattgagctggagattattagcgctctcaatgacgagcaaagagatatgcgcgctggtgaaatatctgcgctaattgatactacccatcaaatggtagggcgcaggacaagtaagttaaaggatatggggctggtggataaggagccagatagtgatgggagaatgaggagtcgcctaacttcccgttgtgaagcgacatacttcggtcccactgatcgctaa

SEQ ID NO: 351870 - DNA, 351 bp, Pseudomonas aeruginosa
atgagcaaaaaaaggagggggccgcagccgctgccccaggaagataaaagagttattcgcgtggtcatgaagttgaccgccgaagaatacgaactagccaagattaaggccgctggcattaacctggctaaatacgccagggcggcattattgcaggcgaaaccagccccgccaccccctgtattacctacggcaaacgtcgaagtttggaagggttctgcagctctgcagaacaacctcaaccaactggttaaacgcctacacgtccaggggctcgaggccggcgacgtggaagaactggccgccttggtggcgagcctacgggccgcgctggtgggggttaaatcgtga

SEQ ID NO: 351871 - DNA, 480 bp, Pseudomonas aeruginosa
atgaaagttacaaccgacaaacttcttagaccttcaaaagaagagttagatttgctgaaaaatctggatgaactttaccaatttggggatggttccgagttcgataacttggttaggtcggcgctgatggatgacttgagacgcggcttaattcatccacgccagggcggtggactggacgtagaagagcgcgccgattcgctgcacctgaggggccgctactacatcctgaaagatgccgagttgcccagcgaggaacatcgcgacgtgttcaggcggctgtgccaccagtccccggcgatgccgttcgacgtcgatctaccagggggccaggtcgcgaacggtcagctcgtcgaggagagagatttccagcggctgttgcgctgcatcgtggcacttgtggaaaagctgctcggccttggagatgtccccgagagggacaagacccacaacctatccgacgacttcgaactgaagtag

SEQ ID NO: 351872 - DNA, 642 bp, Pseudomonas aeruginosa
gtgatcaccattgtcggctgcaataaagggggcgcgtcgaaaacgacgaccgccacgaatatcgctgtagcgctcgccaaggcaggccgtgacgtggttctggttgacgctgacccgcagcgcaccgctgccaaatggcacgcggagcgcgaagcgtcaggaatctctccagcgtttccgctaatcgagaagcgggacaacatcacgtccgctatacgcgccctggccgagaaattcgagcatgtggtcgtggacgtggccggccgcaactctcgcgagctgatcaccggctgcgtcgtcgctgacgtgctcctggccccccatcagtgcagccagttcgatctcgacaccctggaagagctacaggaacaggtcgccaaaatccgtgacctaaacccggatttgcgggtactggtctatcacgcaatggcctcaaccaatccatcggtgaagggccgcgagcgcgccgagttcgccggctacctagccgaattccccgagttcgaattgctcgatgcagtgggctactaccgcaaagcttataaagacgccgcgtcagagggacgctctgtgctggaaaccagcaatggcgaggcagcgagcgaaatcgatgccctggtgcgggaggtctaccgtggttaa

SEQ ID NO: 351873 - DNA, 330 bp, Pseudomonas aeruginosa
atgaccacgcctgttggtctgctcacagtggttagggacaaactggtacacatcgtggaaaagcgaccggatgctcgcgagcgctacacaaaccacgcggtttccacgttaaacgacccatatgaggtctggaaggttgagtacgacaatggcaatcaccgcttggccttcattggagcattcgaagggaaacggcagatgctggttatcgtcgatacgattgatggccaggtgctgtggaatttcatgcacaccgacgcgaagtcattgaacaagcatcgtcatggcctgccgatctaccagcgtagcccgccagaaaataaggcctga

SEQ ID NO: 351874 - DNA, 174 bp, Pseudomonas aeruginosa
atgaataacccaaccaagcaattcctcgtcaccactgcactatccatccttgccttgggcttcgcctcagggcttatcccccagtacaaagacgacggagcgaaacccgagccaaccccctatgtttggtgtgtcccccagccaccgacgaagacctgtctgatccgggtgtga

SEQ ID NO: 351875 - DNA, 231 bp, Pseudomonas aeruginosa
atgaaaacgacgctcgatcacgacgccctgcaggcgctgcaggaagccggcgcgctgcgtgagctacgggcgatccgcagggcgcccggctggcagctgcaggcccggctggccacgcgctggctcgacgtgcgcagccgccgcgaacccgtacgcatctggggctcgctggacagcctggccaagttctgtgatgccctgggcgtaaggtgtctatccgttgagctgtga

SEQ ID NO: 351876 - DNA, 969 bp, Pseudomonas aeruginosa
atgactcctcagccgctgcagttggcgttgacctatcgacacctgcagatgaacccgccgaacgcgttgttctggctggtcgttgacgttgacgcgcccgtgatcagtgatccgatttcgccgcagatgcgcgcgattttcgacggcaccgtgccactgccgaacttcctcgcggtaaaccctgcgaatgctcacgcacatgtctactacgcgctctctaggccggtagccaagggcgatcatgcgagcattgcggcaacgcgctacgccgccgccatcgaagccgcgctgattcgggctctcgggggcgatccgctgtatgccggcgtgatcgcgaaaaacccgacccaccagcattggcggcgcgtggatcttcgctcggagccctacaccctgcacgagctcgaggactacctcgacctcagcggcccgagcaaatctgcgcaacgcgccgaggccctggaagagtgcgcgacgcgacgcaactgctggctgttcgatcagttgcggttccacgcctacccgttggtctcgctgtaccgtcaggacgcgaatttcaacacctggcggcgctaccttcaggcctgcgcccagggctacaacagcgagctaccggcgccgctgcaggccaacgagctgagccacatcgtgaaatcggtggcctcgtggacgtggacgcagtacagcggtctgctcagcgacgaggggttcagcaagcttcaagcgcatcgaggcgccaaaggaggccgcatcagctccctgaagcgggccgaagctggaacgttggaggcaagcatgagcgctgcccgtgccgcgaaggctgctagggcggcagatggagacaaggcagcggaggctgcccgcctgcaggcggagggcgtcgcggttgcagagattgcccgccgcctgggggtgagtcggccaactgtctacgcctacctgaaaaagtgtaaagctctgaagccatag

SEQ ID NO: 351877 - DNA, 387 bp, Pseudomonas aeruginosa
atgctgtcactgatggcaacagctattagaaaggccctgcggggtggggcgcctggcgagctgacatatggtttgatccagttttcccggcagttcctggagcaggcgaaaacaccccgccgcgagcccgtccaggagaggcagccccaggtcgaccagcagccggcgccggaggcgctgcaggggccccaggaggcccctcgccaggtgttggaaggtcttgctcttgatcatgctctgcagggcctggagcaggcccctagccgcatcgagcagcaccgccaggccctagccgagcgcgagcgcgcagagatcaaggccgcgcagcggaagcagcgagagagagaggcgggagtgctggaggggccggaactgagccttcgctag

SEQ ID NO: 351878 - DNA, 363 bp, Pseudomonas aeruginosa
atgcagcagacaatgcaggccctggagatgacactatccgaggaacgtctgcgccaggtgctagcgatagttgcgagagagtcggcgaagctgttctccatggaaatacgacaaacactaaccgacgtgatagcgacgcaggagaagttgatagaagccattggcgaggcgagagcattaatagaagccattccgaaacctccggcggtacagaagcggaaaggaacgccattcaacttgccgaaacgagtcgtcgccctggagggcaaaataagggccctggaaacgctagtaatcatcagcatatgcatagcagtcgtaagcgtgccggcgcccctaatactgctctggaggcttctctaa

SEQ ID NO: 351879 - DNA, 204 bp, Pseudomonas aeruginosa
atgaagaagcaaggccgcccgagcgcgtcgaaaaataagaccgctatgccttcgaactccaccgggggtgttctgatgaagcgtgtgaacttccagctatcggccgaccaacacatgaagttgaaggtgtatgccgcacagcatggcaagacgatcactgagcttttaactgagcacgtcgagcagttgctctgtcagtcgtag

SEQ ID NO: 351880 - DNA, 225 bp, Pseudomonas aeruginosa
atggaagtcaaattcagccgctacgacacagcggactacctcaagtccgaggatgacattgcggcctacatcgaagccgtgatggaggaaggcggcgacgatccggcctatgtcgcccgagcgcttggcgctgtcgcccgcgctcgtaatctgagccagcttgcccgcgaccgcaacctgagagggctggacaagactctgccgggcggcgacaaacaaccatga

SEQ ID NO: 351881 - DNA, 183 bp, Pseudomonas aeruginosa
atgaaagaccgagaccatgaagaagcgatggccgagctgttccggaatgacccggaactcgcggctgccgtcctatccgctgtcgagtcggatggcgaccacgcggaactcgccatcatccgccgtcagttagccaacgccgccgggttggcaccaaaagatagaaccgaaaagcacccgtaa

SEQ ID NO: 351882 - DNA, 366 bp, Pseudomonas aeruginosa
atgacagacgacaaaatgctgaccgccagaggcacacgcccgcgccgtgagcgagtcgaggtttgggtaacgccagaggaaaaggccgagctggccgcccgggccgctaagggtgggctgtcacagtcggcttacatgctcgcggccgggatgaatcaacccatccgctcggttgccgaccttgatgcggttgccgacctcgtgcgcatcaacggtgatcttggccgtgtcgccggcctactgaaactctggttagccgagaagcgcgggcaaggcgcgcggccactagaggtagaggaggtcatgaccgactttcgcatcctgcaagggcagatgcgcgagatcatggcgaggatcgtgcgatga

SEQ ID NO: 351883 - DNA, 309 bp, Pseudomonas aeruginosa
atgcgctacttcgtgagctacgccgcgcaccgccacggcggcggcggctttttcggaaacgtcatcgtcaactcgcgcatgatggaccgttggaccgtcgccgccctcgccgatgcgcaacgcatcgcgccgggacacgtgctgcgcgtagtgatcctgtcctatcacccgctcggcaccatgcgcgcgaccgacgttatcggctactggctggccgcgaaaatcgaaaacgcattcaagcggcttttcggaatgaataaaccggatcggcttagtccatccaaagcgcttaaaggaataggcggatag

SEQ ID NO: 351884 - DNA, 195 bp, Pseudomonas aeruginosa
atgatgactatttccaagcgggtatttgccgctctgcttatcggtgtcggcttcggtggcgcggttgtgtcccggctagtgatatcgcccagcagcgaatgcgcggtgatcgccgacaagatcggcaaaggcgacgcggccgaagaagagttccgccgccgctcgagccagcgcggcccatcggaggggttttga

SEQ ID NO: 351885 - DNA, 1683 bp, Pseudomonas aeruginosa
atgaaccgcaagaccatccctctctgcttcgccgcgctggcgcttctgttactgaccggcactgcgatggctcaaggcgcggatctcacccagagcaacaccgccatgaacgggctgctccgcgagattcacgaggcatccaacgcatggaccggccggctacaaggctatgcaacgcacctgctcgtcggccttgccgtgatccagctcgtcctacagttcatgcctttggtgttcaaacaggcggaaatcggggaaaccgtcggcgagatggtccgcacgatcctcgtcgtcggcttcttctttgccctgattgaacacgggaccgaatgggtcggcgcggtcgtcaatagcttccggcaggccggcgcatcggcggccggcctgccaacggaaaagctcatgccgggtgatatgttcgcgctggcggtcgagttctcggaaaagatcatgaattctggcatgtctattctgagtccgattacgtcgggcgtcattgccctcggcgcgatcattgtcctgctgtgcttcgccttcatcgcggcgctgatcttcgtgacgttggttgaggcctatgtcgtcatcaacggctctgtgctgctgttcggttttggtagtttgcggctcacgcgggaatacgccatcgcccccctgcgctacggcgtcgccgttggagtcaagctgttcgtgctgacgctgctcgtcggcctgattatgacggccgccgccggttggtcggcaaagtattccaacgatcaggcctcgttgctcacgctcgtaggactgtctttggtgtgcgcctatctgacgcgcaccatccctgaattgatgggcggcatgatttcgggcgtttcgatgggcggtggccacgctatcggtggcatggccgccgcaggggccgcaggcgcagcggccgcaattgctaccctcgccaccgccggggcggccgctccggccgcagcgggtgccatcggggcggctggtactggcggcgcagcgggtgccgcaggcggggtggccggtggtgcagcaggcggcggcggtctggcgagcctcatcaattcgagcttcgccgggcaagccggagccgcgtcggcaggcagcacggcgggcggcagtatggccagcgccgccagtaccggcagcaatgcggcgaaggcggccgcgccgcgcgtcggcggcggcgaagcggccagcggtccagcaccgaagcccacgggcgcagccagcagcggcgtcaagcaactggccacggccgccgggcaggcgcagcacggcggcgacgacaagagccaggcgcaagcgcagcctgccccggctccgtcgcctgatagcggccgcagcaaagcctctacgtttgcctccggcgcggttcgtatggccggcgttctgtcagccatgtcggttccggggatggaaagcgcagcaggcctgtcgctcaacgcgccgaacacgccggccgccggcagtgcaggcgaagccccgaccgaaaacgcgggcggcccgaatgagccggaaaatgttatccggcccgcccgcgccgcatcttccgagccggacgggagtaccgccgagacgaaggcggcgccgtcgccaacgacggatgcctcaaagccagcgtcgtccctgtcggccctgcgcatccccggcatggcctcgtaccctaatccccaaggagcctga

SEQ ID NO: 351886 - DNA, 306 bp, Pseudomonas aeruginosa
atgaccgagtttctgtacaccttcgggactttgttcgtcctgttcgccatcatgtatctcctatgctactgcctgcgcgcgcgcggccacggccctaagctcgatgccatcgccgacaagatcgacgttgcacgcgggttcgtggcggatcgcatcatggccccgctcgggttcggaatgctcggtgcggcgcgggccatccacagcgtgccgctgctgggttccaagcagcaggcccagcaactcgcccagctcgtggcccagcttcgggaacagcagcaggcgcaacagaagcgccggcagtaa

SEQ ID NO: 351887 - DNA, 969 bp, Pseudomonas aeruginosa
gtgttcatcgcaccgaacgagagccgggtcgagcgcatggatcacgaggccgccacacgcctcgcgcctgaccgtcgccggcaaggcgatttcttcgtagccgacatcatcgatgcctcgctcaaagacgacacggccagcatggagcatccactgttcgcgcttcgcgccggtgacaagcgcgtgcgcgtctatgagcgtaacggccatagagttacggtgctgcccggtgcaaccggctgcgcgaccatccacgacaaggatttgtggatctactgcattagccaattggtcgaagccgccaaccgaggccgggaaatcacgcccacggtccgctttaccgcattcgacttcctgactgttaccaaccgtggcaccagcggccgcgcctacgagcgcttggcggacatgttgcgccgcctgaaaggtaccgttatcgaaaccaacatcgagacgaacgggcagcgtgagcggcgcggtttcggcttgatcgacagttggcgagtggtcgagaagtcgctcgacaatgaccgtatggtggccgtcgaagtggacttgccgcgctggctgttccgttcggtcgaggccaagcgggtgttgaccctatcccgctcctattttcggctccgcaagccgttggatcggcgcatctatgagttggcccgcaagcactgcggcgagcaaccgagatggcgggtatcgttggccgtcctgcaccaaaagagcggcagcaccgctgcgcttcggcgcttccgtttcgacctgaaggcgctggccgagtccggcgatctgccggactatctgatggccttcgatgccgaccgggacatggtgacgttctacgccaacggccccaagggcaagttggccgaggtacgggacatgctcgccgggcggcctcatgcgtccgtgcaagcccatgagaaggcctacgtccgcaaagcccggaagcggccccaaggggcgtaa

SEQ ID NO: 351888 - DNA, 225 bp, Pseudomonas aeruginosa
atgcaagcaaagacgagcaggactctcatcaacaaaaagaagctgttggcgatgatcccgctgtgtgagcgcacgatttacaacttggagcagcgaggtgaattcccgcgccgcatagcactaaccagccggaacgtcgcctgggatctggccgacgtcgagcaatggattgagacgcgcaagtcgtcgggcattcaagccgcccgtcccgggatgggggcctga

SEQ ID NO: 351889 - DNA, 954 bp, Pseudomonas aeruginosa
atgaccgtctgggacgggtgcgatcccgccgtttcaaaggccatcggacaatttcaggatcgctggaagccctactccgagtccgggaagcgctaccccatcgctcggcttatcgaagaactcattgaccccgctgttgcggcatactcggcaacgcttccggcccgctacgtgggccacatccccggcgcaggaacgggcgtggccttcagcgagattgtccgactggtcgggcttactgcgatggtgcgtttacagcgccagttgcttcgagcgtttgtcctcacagaggaccaacagtccccgcgagatcagcgatttgtcgcgacacttgaatctttgattgagttggtttgggcctgcgctcgtaagcgtcccgcgaaaaggcaggtgcgcaatactcgcctgaacgggcaacgcttgcagggcttttgccgcttttgcggcgaactcgcggagttggcttccttcgccgcaggaagcgatgcgcccaaagcggacgatgcagacgagaagctccgcctgagcaacctgtactgcgtggaccaccggcccaagttagcgaatggcgcatggaatcctgcgtacaggcaagcgaaacgctccgtggcgcagttcgatctcgaactagaaagactcacccgacaatgcgcaatgcggggcgcgccgcaagcgaaatctggcgacgaactggttgacggctacatcctccattacatgctcggacagacgttgcagccggcggatgaagccgagctgcgaaaccgagcacgcctaatggtggactcgaaattgtcggatcgaaaaaagcagatactgatgcttcagcgagctggcttcaaccagtctgagattgcccgcagattaggtattgaacggcaagctgtatcgaaggccattgcctcgatcccccagatatttcgactgagcttgccaaagcgttctgcccgctaa

SEQ ID NO: 351890 - DNA, 1002 bp, Pseudomonas aeruginosa
gtggcacaaaatattgcgattcggtcagaagaagaagcattcgaagcaatagagagattgttgactggtgtaagttttaaggggcggattaaacttgaaggttggccgaagttaaaggtcagattggttggggagaagtttgagtcaagcataaccccaagcgtgatgcgatcttttatagagcttcaaaatttagtttaccgctcctatgctatcgctcgatatgataccgatgacactaggcgcctgtccaaggaagaacgggatgagctagaaatacaagtaaaggttgaagaagggtcttctatctttgagatagactttcaggatgttcttatcaaattcgctgagaaagcgggtgaatctatgactccagagcttatggctgttactgtgcttgggcttggggtgctgtgggctggtaagacagcatatggtagttaccttaactatcggaaggaagttaggcttgccgaagttaagagtgaagagcagcgagatatgctctcaactatgcaggctttgtctcgcgaagagacacagagggcgcaggtattaaataggctgctcatttcccagccatccctggcagcagttgagcagcaggcatatgatgcaagaactgagatgctgaaagggttcgctacagcagatgaagcaactgtcagtggatttgaagttagtcaggatgttgcaaaggaattagtgacgaacgcgcgtagaagggccgtggaaaagcgcctggatggatactatcgagtaatcagggtggactcttctgatccagactcctttagagtaaaggttcgtagaaggaagtcgggggtagagtttgaagcgtatgttgagaatgatactcttgatggtgaaatgaaagagactcttcagtatgcagagtgggagcgtacaacggtgtttctgaatatcaacgccaaggtgttggatggtgatattaggcaggctgttattttgggggttacaagagctgagcctcctagctga

SEQ ID NO: 351891 - DNA, 201 bp, Pseudomonas aeruginosa
atgcccagcctcactgtccttgagcggtacggccaggtcggggagttcgccgcgctactcggcgcggcggagctcaacgccgctacggactgggacgagcagttcctggccgacctccgcagcaacttccagcgctacggcgcccacacctacctcagcgacgcccaactcgagcagttggagcggattgccaacgaatag

SEQ ID NO: 351892 - DNA, 762 bp, Pseudomonas aeruginosa
atgagcaacaacccgcacttcatgaacatgaccgccgacacgctcggcaagagcttgctgcagggactgatccaggaaatccggatcatgccggactgctggcagaagcttcccgaggccaagcagcaggacatcatcgaccgcctggagcgccaggtacggaatgccgccaccatcgctgtccacaccattgccggcagcgatcgcgacacggtctacggcaagctcgaatccttcaccgccaaggacaaggtgaaagcggtcttcaccgtgagccccagcagcccgaaccaggagcaactctttggtgctgtgcaccaggactgtctgctgatcatcggcggcgccgctgagttcctcgacggcatgaaggacgtgaaggctgatccggaccagaacccgttggatctgaatggcggcgaccacgaaatggaggtcgacggcgcctggggcggcgagcagcagcccgacgatgatgtcgtagatgccgagttccaagaactgccgcaactcaccgtcgagcgcttcgccggccacaccctgggcgagatcgccatcggagtcgccaccaagaaggacgtgttcgacgcggcctggctgcaatcgcgcttcgctctcaccaccgaggaagccgagcgcgtcgttctccaactgctggaccagggcgtcatcgtgctcgagcaggagaacgaggaatcccgcgagttgaacacttaccgcgtcgtcaagaagccgggggatatcgccctcgacctggagtga

SEQ ID NO: 351893 - DNA, 162 bp, Pseudomonas aeruginosa
atgaccgcattgaagaagcccgctcccatggacttcaagacgcagtacggcctggccctggatgaggccgacgatgcaatcatcgttgacctgttcgccggcggtgctgccagaaggtggcggcctgacgaaccgcaccaagttacccaccacgggaaatag

SEQ ID NO: 351894 - DNA, 714 bp, Pseudomonas aeruginosa
atgtcctctacccaactgatcgagcagtgcgccacccgcctgcgcggcatcgtcgaagccttggacaacatccacgacaccagcccgcagcgctggtcgacggacctcgacgacgttcactcctcggccgagagcctgctggccctcatcaatgaccagacgccgccgtccgatgccgagcgctggaaagagcaattcgcctgcatgcaattgcagcgcgaccaccaccgcgaacgcgccgacgccgccttggccagggtcgcggaactggatcaagcgctcgccgagaaagacccgttcggcgcgaaactcaaccgcatttccgaaaagctggagcgttgcgatgcactgctcgtagctcgggccgccctggctgggcaggtgccgcaagcatggctcgatgttcaagccgagcgccgccggcaggtggacgcagagggctggacgccggagcacgacgatgcgcacagccacggcgagatggcccgcgccgccgcctgctacgccctggccggttccagcgccccgaacgatggaaccgccgccctgctggtgtcgctggcatggccctgggatgaacagtggtggaagccgaccagtgcacgccgcgatctggtcaaggcctgcgccctcgggctggccgagatcgaacgtctcgaccgggcaggcatatcgcaaaatccccagccgggagccaccacggcctcttcctga

SEQ ID NO: 351895 - DNA, 228 bp, Pseudomonas aeruginosa
atgatttccgccctgtcctgcgatggctccatctcgattgcgccggatggggcgcccctgtgttcgggcatgtgggtcttgacccaggtgccggagcagttcgacccgtcgatgttggacacccaggcgctcgcccaggcgttctctgtcgggttcggtcttgtcgcgacggtccttgtcggcgccctgggcgtcaaggccgtactcgacttcattaaaagagcttaa

SEQ ID NO: 351896 - DNA, 1287 bp, Pseudomonas aeruginosa
atgcgcaggttgttattgtttttggtgctagtttcttcttttgtaagtgcggaggaatattactggtacatgggttattttgataagaaagtttcgtcaccctcggcgggttgtgatctttactttactggtatatctcgcgatccagggcgggtctttgttatggagccgtcgtcaaatccaagtgaggcgggcaaggttttttattgcgtggttcgctctggtgattgggttctttttaatacgactgtttatttgaaaggagataggtgccctgagggcagtagtcttgatctaactacgggtgtcgccatgtgtaagcctgcggagccggaaaagccgaatgactgcattgaagggctgtatgacttgttcagtagtccgccgtctccagttgttcaggtcggtggcaggaatcaagttataagtagtccgccggcaggctgtaagaacgggtgcgcttattctgcggattcatcgaagactactagttgttatttcgtcactggctcgacgaatgaggggttctgcaattactcgctgcgaagtactggtgcgacgtgtccagccgacacgaacaacccaggaatgaccggcccgtcgttgaacggtactccgccgactgacccgaatgaaccgccgtccgatccgaacgatcctggctgcccggctgggtatagctggtccggtacgacgtgcgtcaagacgccgactgaccccactgatccgacgaatccgggtgatggtggcggcgatggcggtaccggtggtggcggtactggcggtggtggtgatggcggaacaggcggtggtggtgatggtggcggcgatggcggtaccggtggcggtggcgatggtggcggtacgcctggaacgggtggtggcggcgatggcgatggcggcggaacgggtggtggcactggcggcggtgacggctcaggggagggcggtggtaccggtggtggaactggcctggaaggcggctgtaaggacgatagttgcgcgttcgtgaagaacaacccgtttggcacggacaaggttccgggctttgacgagtcgctgcaaaaggcttggacggatatcaagaaagccccgattggtcaggccctgggcaagatcacgtttccgaccgggggaagttgtccagttcagagcgttgaactgttcgggaagagtgtgatgttcgattcgcactgctccttgtgggctcagattgagccgatcttgaaagccgtgttcttggcgttttgggcgctgctttctgttcgcgtgttcctgtctgcgtga

SEQ ID NO: 351897 - DNA, 360 bp, Pseudomonas aeruginosa
atggaaggcattcttagtgctatcaaacaactgattcaaacggcgacagatttctttcagcgcgcacttaaggctatcgaagacttctttaagtgggcgcaagatgcgtttgattatttttgggagcttcttcctgttctacctgagtatgtgtttcacaggcttgtctccggtattgtgaagtttttccagtggctgccggtgccggatttctttgcgcaggcaggtaatgcgtttcagtcaataccgccgtcggtagtgtatttcgccaatgcatttcagattggcccgggcgttaccatggtcctgggcgcgtatctgttgcgattcattctccggcgtatcccgattatcggttga

SEQ ID NO: 351898 - DNA, 357 bp, Pseudomonas aeruginosa; identical to SEQ ID NO: 332093

SEQ ID NO: 351899 - DNA, 642 bp, Pseudomonas aeruginosa; identical to SEQ ID NO: 326063

SEQ ID NO: 351900 - DNA, 306 bp, Pseudomonas aeruginosa
atgcgtagcaagcacttcatcacaattgctgcggtcgcgtttttcggcatcgtctgcgcccagatgcccgtccccctgcttgacaacgagcctgccgcacctgtggccaccccgatgcagcaagtaacgctggaatgcgaagagctacctgaccgccccgccacctgcgccctgctgccgcgaaaaccggcaggcgaaggcgcgggcggagtgccgcagcacgtgagtgggcgtagcgcggcgacatgtcgtgcggcatccaatagcggaggaaggaggcagcatgtttgtgtttctgcaccctga

SEQ ID NO: 351901 - DNA, 606 bp, Pseudomonas aeruginosa
atgaagatcatcaacggcgcgaaacgcgcagcccgctttacctttgtcgatatgccgctgtcgatgctcggctggcgacaactcaaggccaacaacggctatatccgcgacttgtggcgcacgctgcgccaccctcaatgcccggagtgcgggcgcggtgtcatgcacctgcccgccgatgcgcagcccgacgaacaggcgctgtatggctgggagtgctctgcacactgcggctttcgcgtgttcgccccgcacgatccgcaggaaatcgcccgcatcgtctccgcccggctggaactgcgcggcaagcagcgtctggcattcctgcaggatcaggagcgcggcaagctgatccgtagccacctgctcaagtcgcgtgcttattggacggtggccgcgctggttttcctcatgttcgcgtggcagttggcgatgggtgccccggtgatggttgtcctgagcgtacttagtctgtgcctgccgttctccgtccatgcaatccgctggagctatcgggcgtggcaggtgcgcacgggcaccctgttcgtggaaggcgcatttggccgctacgtccgcgacatgctctgggttcgggggattcagtga

SEQ ID NO: 351902 - DNA, 2811 bp, Pseudomonas aeruginosa
atggccgccaccgatccttcaatgccgttttcgccatgcgatccatcagggccatgcacagacgtttcggtaggcgtcttgcaatggattttcgggccggtcatcgagaagctgacccaaggcgcagacccggacatgatagacgccagcgtgtctgtcatcgcgtccatcatgtcggtgttcaatagcggcctgctggtcgtggcctcgctgatcgtgtcttacgtcgccgtcatgggcgtgacgcagacggccagcgaaggcgaagcgatgggccgcaactggtcatccctctggacgccggttcggatcgtggccggggggtcggtactgctgcccagcacaagcggctttagcttcatccagttgattgttttgatgttcggcctgtggggcgtgggctttgcaaacagcctgttcaacatcggaattcagaccggcatcatcagcggcgcagcaaccagcgtcagcgcccaaatgggccttggcagtggagcaaagccgaacccgaactatccgttgtatgacgtgcggcagttcgcgcaggaatatctggccgtggcatggtgcaagcgcaccgtgaatgcctcgttcgcggatttcggcagcggcacgccgaacatcagcgcggccagcgcaccagaccagaccattgcagaaggcgacggcaaaaaggcgctgatctatctggcgcgggatcgcaacatcacaacgaacctgggcggggccgtgccgttgtgcggcagcgtgaaggtgtacaactacagcgcacccgtcgccattgccgccgaaaccacggcagcaaaagccaccgtctttgacccggccaagattcaggacaacgccggcgccatgtcggccattcgcgttgcggcgctcaacgccaaggccacggcaatcaacaaggtcatgaccgacatcgaagcgtgggtggctcaatggcccgccacgatcaatgatccgggctgggagaacgtccagagcgaccgtttcaaccagattgtgaatcaggcacaaagcaccctgacggccagcctgaccgcacagatcgcggcggatagcaccctgaaaacgatcatgcagcagtacgtgaatgacatcacggcggacggctgggcgatggctggggggttctatcagcgcctgtcgggcatccggcaggaaatgggccgtatctacgcggagaacgtcgcgcaggccaccgcgccgaacctcaacacactgccgcaggggccgcacgcgcagcttgcacagtccagctacaccacgatttacaacaccatcatcagcaagtcgctatcgggtgccagctacgccaaaccgacgacaccacgggccgccgatttcaaggccgcactggtgccgaccagcatggaggatttgtccatcgacacgctgggaagtcgtggcgatagcctcatgagcggctttgttggctggggcatggagcgcgtcacctcggccatgatcggcaccgatggcgatgtggatgcaatcgcccggatcaaaacgaccggggacgttctggcgctcatgcagagcaccggctttgccgtcgataagttggtgcatacctcgctgtctggcgtcaaagcggcggctgctgccgtgggtagcgtgtccttcatgggcaccagcgttgatgccacgccgcttgccgataccctgctgaattgggtggtctataacttcctgacgccgcttgctgaggtcacaacgtggctgggcagattggccttctatttcggcgtgttcctgccgtccctgccttacaccatcttcatggtggccgtggtcggctggattctggccgtgctccagtcgatcatcgccgcgcccctgtgggcggtcatgcacatgaccccggatcgcacctttgttggcagccagacgcagggctatctgctgctgctgtccctgttcgtgcgccctgctctcatcatcattggcctgttcgcggcaatgatggtggcaaacccggtcatcggctacatcagcaaagccttttgggccatgtacaacgccaacgtgaccagcgccgaaagcctcgggtggttcgtcgagttcttgcagtggaaaaactggttgatcgtctatggcttcgtcctgctgccggtcatgtacatggtgttcgggctgtcgcagagcctgcccgataccgtgctgcgctggatcggcgcgggcatcagcagcatgggcgaaacccaagccaccgaacagatgcgcggcaactcggagaagtacggccctagcgcactggcgggtggcgcgactccccgaggcaaaggcggtgcaggtgacagcaatcgcctgaacggcgaccacggaagtgcaggcaggctcaatgacccaagcggccccacgggcggcggcggtggccgcagcggtggcggcaaccatccgcgcctgctcaatgccaacagccaaggcgttgcaccccaacatgacaccccggccacgtccgcaacagccagcggcccggctcgcagcagtagcgccgcgtccagttcggtcaatacgggatcacaaggcgttgtcggcagccgctgggccaacaatgacattaccgacgcggagttcagcgaagtgaaggacaccgcgccgcgcagcaagagcagcgccgacaagggcaccgatgccgtgctggcccttggcagcgcgggcgttatcagcgggttttccgccgacgatgacaacggctccggggccatcaataccgagtatgacagccgctacagctacaccccgccgactgctgacggctccagcgtcatcaaccacggcacagaacagggagaacaaccggcatga

SEQ ID NO: 351903 - DNA, 474 bp, Pseudomonas aeruginosa
gtgcagcaagcagaggaacagaagcgaggacggggacgccgcccggccagcgaacttgcagaacagcgtgaacgggaaatcgccgcgctggcagcaacagtggcgcagcaacaaaagcggcttgaagagctgaaggacgcccagcgccgggcgcagaaagccgcccggcgcacatacctgaaccaacgcaaatattcggtgggcggtctggctcagattgccgggctactggaggccgaccccggtttcgtgctcggcctcatgctcgaagcggcggaacagcgcgaccgcgatggcacttggcccagcgcggtattcgagaaatacaagcgacgaggtgatgaggtgctggctgagcgtgccgccgcacgcaagcggcgcaagctcacggatgacgacgatgacgacgagagcgatttcgatgcggcagccacgcccatccagaattcccgctatcaggaaggagcacactag

SEQ ID NO: 351904 - DNA, 162 bp, Pseudomonas aeruginosa
atggagatcctcacccagcaccagatgttgaccgccctacccgggacgatcggcaacgtctgcgcctggcgactcgccctgcgggtcgacgtgctcgagcccaccctcggtgagctgatccgcgaaagcattcttaccaccgatgctcaggcgcaagcctga

SEQ ID NO: 351905 - DNA, 1632 bp, Pseudomonas aeruginosa
atgcttcgctcgctgtcgtttgccaagaaaatccttctcgccgccgcgctggtggtagttttcgccttcagctgcttcatcctctacaacgattaccgacagcgcgaggccgtgcgcacggacacggaaaactacctcggggaaatcggcaccctgaccgccagcaacatccagagctggctggaaggccgcatgcacctggtggaaggcctggcctcgcaactggcgctgctcgaccagcccgacgaggcgaatatcgcaaggcaactggaacagcccgtcttcagccgcaatttcgcgtcggtctatcttggcgaggcggccagcggcaccttcaccatgcgcccctacgacgccatgccggaaggttacgacccacgtacccgcgcctggtacaaggacgcgctggcggccgaccggctgatcgtcaccgaacctttcgtcgacgccggcaccggcgagcagatcctcgccatgtcgctgccggtgcggcacgccggtcaactgctgggcgtcgccgccggcgacatgaagctggagaccctgaccgcgatcctcaattccctgaagttcgacggtgccggctacgccttcctggtcagcgacgccggcaagatcctcctccaccccgactccgggctggtcctgaagaccctcgccgaagcctatcccaaaggcgcaccgaacatcgtccccggggtccacgaggtggaactcgacggtcgcagccagttcgtttccttcaccccggtgaagggactgcccggcgtgacctggtacgtcgccctggtcctcgaccgcgacaccgcctattcgatgctcagcgaattccgcacttcggcgatcgtcgccacgctaatcgcggtggtcggcatcatgcttctcctcggcatgctgatccgcgtactgatgcagccgctcaccgacatgggccgcgccatgcaggacatcgcccagggcgaaggcgacctgaccaagcgcctgaaggtcaccagcaacgatgaattcggtacgttggccaatgccttcaaccgcttcgtcgagcgtatccacgaatcgatccgcgaggtcgccggcaccgctcgccaactgcacgatgtggcgcaactggtggtgaacgcctcgaactcctcgatggccaactccgacgagcagtccaaccgcaccaacagcgtcgcagcagcgatcaacgaactcggcgccgccgcccaggaaatcgcccgcaacgccgccgatgcctcgcaccacgcctccgacgccaaccaccaggccgaagacggcaagcaggtggtcgagcagaccatccgcgcgatgaacgagctttccgagaagatcagcgcctcctgtgccaacatcgaggccctcaacagccgcacggtgaacatcggccagatcctcgaagtgatcaagggcatctccgagcagaccaacctgctcgccctcaacgccgccatcgaagccgcgcgcgccggcggccggacgcggcttcgcagtggtcgccgacgaggtgcgcaacctggcccaccgcgcccaggagtcggcccagcagatccagaagatgatcgaggaactgcagatcggcgcccaggaagcggtcagtaccatgaccgagagtcagcgttacagccttga

SEQ ID NO: 351906 - DNA, 837 bp, Pseudomonas aeruginosa
atgagcgaggcgctcctcgacgctcgcgggatcgccctcggctatccgcgcggtgccggctggcaggcagtgctcggcgatttcgaattgcgcctgggcgccggcgaggtggtctcgatcctcggtcccagcggcgtcggcaagtccagcctgctgcgcgtgctggccggcctgcaggagccggccgccggcagcgtgcgggtactcggcgagcccctgcgcggaccgcatccgggcgtcgcggtggcgttccaggaccccagcctgctgccctggctgaacctggagaagaacgtcgccttcggcctcgatttcgcccgccagccgcacctcgacgcggccacccgccaggcccgcgtcgaccaggcgatcgccgcggtcggcctggagcacgcccgtgcccgctacccggcgcaactctccggcggcatggcccagcgcaccgcgctggcccgctgcctggcgcggcagccgaaagtgctgctgctcgacgaacctttcggcgcgctggacgaagtgacccgcgccgacatgcagcagctgctgctgcgggcgatccacgagcgcggcaccgccgtggtcctgatcacccacgatatcgacgaggccctgctgctctccgaacgcatcctgctactgggtgacagcccggcgcggaccctcggcgagtggcgcatcgacctgccgcagccacgcgcggagctggtcgaggaactgggcgcgttgcgcatcgagatcctgaaaaccctacggcgggcgagccgcacccatgcccatcccatcgctcagccggaggcctcccatgtgcctggacgacccgacccattcccgacgtga

SEQ ID NO: 351907 - DNA, 789 bp, Pseudomonas aeruginosa
atgcccagtccacacctacctctccgccccggccgctggcttgcggcgctgctggcgctgctcctgggcggcccggcacaggccgccagtgcggtgctgatctggccgatcaacccggccatcgaagccgaccagccggccacggcgctgtggctggagaatcgcggcaagcaaccggtgaccctgcaggtgcgcgtgctcggctggtcccaggcggatttccaggacgtctatcgcaaccagcaggcagtgattcccagcccgcccttcgtcaaggtcgagccgggccgccggcaactggtccggctgatccgccagggcggccagcccagcacgccggaggacgcctaccgggtgctgatcgacgaagtgcccgacggcggcgcggggcagacgcaacgaagccccggtctcgccctgcagttccagatgcgctattcggtaccgctgttcgtcagcgccgacggcgtctggacccagccgcgcagcgatgtcgagcgcgacccggccgacgcgacccggccgaagctggcctggcggctggtcgaggaacagggcaagcgttacctgcaggtgcgcaacgagggtagcgtgcacgcccgcctcagccatgtccgctgggagggcaacggccgcagcctggcgctgctggacggcctgctcggctacgtgctgcccggccggcagatgcgctggccgctgccgccggggctgctgccggacgccggcatgaccctgaaactgcaactggcggacaacgacgcgccgatcagcgttcccgggtactga

SEQ ID NO: 351908 - DNA, 1962 bp, Pseudomonas aeruginosa
atgcccaatttcgactatttgatggccgacctcgcagaagggaaagaactctgggattcccagcagaaaaaattgaacccattggccttgcgctattggaacggatggcaagtcaactccctaaaaggagtaccaagctttctcgcgctgggagaactatggcactcccatggccctgagtttacagaagagtactaccggacatggaagactttttcggccaagcaagcaagatgcaacatcacattgtgcaacaagctggccagctatttatcgaagaactctttggagtggccaactacaaccttccaaaacccagaaaatataaaatcattctttttgcacttcatgaaggagcacttcttaaccgcatatagagaaaatctaaatataccaacccagataaaaacgtggaacaggttcatatcgaactgcgaagaggcctttatacaatcaggagtttgggcaaccccttttggggatggactaccacggcccatccgccccaaacaacacagagcgcaaacaagagtgtccgtgtctgatgagggggtggaaatccatgaaaaacttatcactagagtccctctcgaaataactgataacgaggcaatagaaatattattcaaaagtatccacaaagacatcgaaaccgtaaaatcctgggcaacagaacaagccaatgaactttactcgagagtccaacttcgtatactcgcaaccacacggataaactcctcggaaatcaaacctcgaaaaggctggcagcgtcggagttacgatcacgaatcaatttgcgcgatttttcaaagcaacggctttccatcctcgcgcatggacttcgaacaccaatacggatacaccatattatctgctgatgtcgcaaatatacttggacttccggctgctggcactctttatccctaccaatgcttactggtagcagagcacaatgagatcacagaatctttccttaagaattttcgtttgtatgacgacaaaggtagaagatccggctttgtgaaaaccgacaccgggtatcagttggtcggcttcaaggatagaagaggtggaaagctaagcgagcagaaaatacaactaaacgcgaactcaacaaagcgaatcttcgaagtaataaagatcacagcaccgttaagaaaatatctcaagggaattggcgacagccgatggaaggagttattcctgacctgcgggaagggtttcggtcacccgcggagcgctgtaatcccgacttggaacaaagcgctattcgataaacacacacggatttttgaacgacttgcacaacaattttcaaatcatacttccttgaggggtactgaactaaaaaatttcttatctcgagtcaccctttctagccttcgagcctcatgtggggtagaggtatatttaaaaacccaaagcgtcgaagccatgtccaaagcgctcggccacgcaaaccacgactgcctgcaactttctcactacctgccggagtcaatactagccttcttccaagcccgctggataagaatttttcagcgcggcttaatctgtgacgcgatgaaagatagcagcttcctcatagaggccgcagacttcgagacaatggaagagttacacctatttcttaagaaccatgcactaaaagacatccctgaccacctggtcaacccggagaacactcaaacaactgaaccctattcagcgaatcagtactcagaggtctacatctcagtggatccagggataatgaccgccctcgtatcattagagaaagcagtggctacagcggaacgacccgaagaagtgacaggagtagcacgatactgggcagatctaacgaaggccgttgttgccgagatcagaagggataatgacgcactactgaaagaccacctttatgtcgccgagcagaggtgtaacccccgcagaatggagaagttgatatatgaatgttga

SEQ ID NO: 351909 - DNA, 2097 bp, Pseudomonas aeruginosa
atgaatgttgaattaccagcagagctagacttcctaaaagcgttctacaccgaccctagaacagaatacaaaaaatcaagttggttgctgagtgatttcgacttgcacatatggaaatatgatttcaattttgcgacccccaacacgatcaactgggacattacattagacgacgaaacctctctgcttgcccaaaaaaacaagccattactagacgggctaaagtattttttaacaacatctacacgttctgttcgaggatcggcgatcgaattaggttcactagccgcacagatgacgatgtttaacagggccattcacgttgccgattacattcttctgaatgcaaaagaatatcagctatccagattcggattggctggaatcaacagccatcacatgaagagaatgctagacgtcttctcaagcgccaacggttcggaagagtcggtttacgagtggaccaagactatcagcaaattttgtttaagcttaataaacacttccagttctatcgaactcgatagcattctagatcaatatccacgaatgcgcattgtgactgacgaacaactagatgagcatcacctggaaataccttttgatttaataccttatgcaagagctgccttgcatttgcatggatattataaaaaaagatcaactgctggagtccgcgcccctaacaccttgcagctagcgaaatcgctttatgccaacacactgaaaggcgggcatctaaaactaaaaacattaagctcattagaattctatactgataatgagagagaaataatatcgagagagtatcccggttcatcggtcaggacaggtgaccatgaagcaatgacatccggtccatttcgcgcctacagatttttaacatacaaccttggaattcttcatgaaattgggcttccagctcccgaggtatcagagctgaagcagatacttgattatgaaccatcactctctgaagctgctcggtttcggacgctgccgtacccaatagtgagagacgccttcagaaaatcaatcgagtaccatttcaagtatggagaacttctaatagaaggtttctgccgcatggcagagcattgcaccctcaatggaattgcccctacgcaacttaccaatggagagttacaagacattatgccccctgagcttatcgacatgggaattaggaagcttgggcttgtatgtcaaacggtgtctattaggcacggcgcactgagaaagcagtcaaattacttcatagagctcagaaataatgtgggactgattgagtgcttacgcatctatattggatgtgtccagatggtagttggaacaatcatggctcgccgaataggagaaatgctcgatttgcactcgactgactgcctagataaaagcgaaagatggttgatcttcttaaatagaaaaagcacatccaacctgttcggcataagacaacgccaagcacgcccaatcgaacccattgccgtaaaaatgattaaaaacttaatttccatgcagcagagacttttaaaaagcggattcataactgaaatgactagcctctttgccccccccggactcctcggaaatgccgggcttagtcagcaaacaatgtatgcctacaatagaaacctagacttgttgtgcgattatttcgaactaccactaaattcaaaaggagaaaggtactatatccgacaacatcaacttcgacgctttttctccatggtattcttccactcgagcagttttggaggactggagacactgcagtggatgctcgggcacaccgacatgcagcatgtttggaattacattactgagtccactgatggtgcagttttgcgtagcgctaaggctcagttcatcgcagaaagcttgcataatggcgatatcactgcttacgaagatctagccgaaatactaaaaattcgttacaacacagataatttttctctagtagacactgctgaacttgaagacgcaatcaccgacatgataaagaccgggaaagtccagattgagccagagtttttcacagacgaaaccggccaacatatgcgcgtggtagtaaaaattcagagcacagactaa

SEQ ID NO: 351910 - DNA, 609 bp, Pseudomonas aeruginosa
atgaaaaaaatctccgacctagagccacatgctagcgccacattaataaccagtgaacttttaaggctaatctaccgtaatcctgactatttttccaaaaacgagaacatcctaaaggctctcagaagccaaggagcgctagccaagctcgaattcaatttcgaggactcaggggctataaagtcaaaatccccaatgagcatcaacactttaaaatctcacgccaacttacagttcaagggaggatttaaggaacttgataccctccgcctagcggcattgagggccattgaaaaggtcaatagcagcaaagagcctacttcaacaaaacgcactaagtccggactttcgcgactagtaactgaactagaggagagacttgataagcagcgctgcgccaacatggtcctcctccagggattaagcctggcaattaacgagttaagaaatatacgtagcagtctagatcccgctctacttgaaaagcgagcaagcgatgccgttcaggcacttactgctctactgagcctccctccagaacagccaacccccccctccccttcttccggagacgggcgagttacgcgactggaggagtatcgcaagtga

SEQ ID NO: 351911 - DNA, 1482 bp, Pseudomonas aeruginosa
gtgacaaaccaccttcgccaacaactatttaaaccacttaaagatctaacactctttagctaccatgcgcatggaagtactataacaaaagatggttctggcctgccgttttgctgttggcctgatggcacgcccaataacgtcgcaaatctctacatgctcgcactacgtgaccgccctggccgaggtggaaaaggcctatcaaggcacggcggtaaaggcggaagcattggggagtatgcatccaaaataagcccactagttcgctactgcttcagataccgaactgactttataggactgtctgaccaacagttctcagacttcattgatgaattaagaaaggagcgatctgtcaacgatcccactgtaaataggcgcaccgaaactacactcctagcaattggtaggatctgtctagattttttgcaattcgtaggacgtctttatggcgacgatgcattcgtatcagagaatggaaccatccgcgccgtaatgaaaacatttactatcacaacgcgctcaggaagaacgataaagcggagttatctgcatcaccactctcttcatgtatctggaacgcgctaccacacgcgcgatccgatcccgagcgaacatataaagcttttgcgagattcagcaaacaaaatccacccatcgagacaccttcaacttcgacggaatctggtgatttccttgcttgagcatacgggcgctcgacgcagcgagataattgaaattaccgtttcggacatacgtaatgccatgaacatgtcgttcccattgctacgtctgcgaaccttgaaacgtggaacctattccgagcgttttatcccgatttcaagagtggtactaagcgaagctaagaaatatattcagtttgcccgcagaatatctcttcgcaacttcaaggacacggatcacgacagactctttgttcaagaaaagactggtaagccgctcggtgccagcagtattacgaatgaaattattcaacttagaagtcacgccggcatcgaagaaaaagtctgtgcacacatgttccgccatgctttcatcaccaatcttttcgtactcctaatcaaaagacacaagttcaagcaaaaggacgacttcagaagcgccctgcttaatagcaaaaagtttctttacgacgtcatgctgtggactggccacaaagatcccctctcggtagaacggtatattcatcttgcattcgccaaacttgatggatacgaagacatcgtttcatctgcccatataatcaggactaaccgtatatatgaccaggccgaggagctacttctgaacgcattaaaaaatggtatgccagttgacgagtacgtgcgtgaactggagaagctaaagcaacttcggcaagaagatctcaagaaagagacaaaggaagagacaaaggaagaggaagaagaagagaatacggagtcagacaaaagctgggagcattggcataaccacctttaa

SEQ ID NO: 351912 - DNA, 264 bp, Pseudomonas aeruginosa
atgtgtgctccggaacttaagcgacggttcacccttgacaccctagtgggggtcatagatgtcgtggactttggcggcatcgaccatgcattcctggttgatcacaacggccaagtgatcttcagccttgacaagggtcaggtgatgacgaacctcaaggacatctatccggacagagccctacggattgagtcgggcattcaggatgccaccttgcacgggcaggagcggattgtctctttcgccccagtgaacgaccggtaa

SEQ ID NO: 351913 - DNA, 2112 bp, Pseudomonas aeruginosa
ttgtgtctcaacggccgtgagttgttgcgcgacgaaccgccgctgaaggtgctgctgatgtccgccacgctggaaggcgagcgcctgtcgcgcctgctggacgaggcgcctgtggtacgcagcgaaggtcgcatgtatccggtggagcagcgttgggggcggccgagtcagatcggcgaggcgctcgaaccccgggtggtacagaccatgctccaggccctggccgatgaacctggcagcctgctggtgttcctccccggccaggcggagattcgccgcgtcgccgagcagttggccgagcgcctcgctggccggtcagagatcctgctctgcccgctccacggtgaactggacctcgctgcccagcgcgcggccatcgagccggcaccggcgggcaagcgcaaggtggtgctggccaccaacatcgccgagaccagcctgaccatcgatggcgtgcgcgtggtggtggacgcgggcctggagcgtgtaccgcgcttcgacccggccagtggcatgactcgcctggacacccagcgtatttcccgctcctccgcgacccagcgtgccggccgtgccggccgtctgcagccgggtgcctgctaccggctctggtctgaggcccagcatgagcaactggccgcccacgggagcgcggaaatcctccaggccgaccttgccggactggcgttgcaactggcgcgctgggggattggtgatcccaatgaactggcctggctcgatccgccgcccacggctgcctacgcccagggccgtgacctgctgcaacgcctcggcgcactggccgacgatggcaacttgacccgccatggccaggccatggccgaactgcccgcccatccgcgcattgcccacctgctgttacgtggccacgccctgggactcggcggcctggcctgtgacctcgccgccctactgggcgagcgcgacatcctgcgtggtggcggtgccgacctgcacagccgcctcgccttgctggccggtaacgacaaggcagcgcgtggcgctcgtggcggcgtgcagcgtgctcgccagctggcgcggcagttccgttcctacctgcgtggcccggccagcgagccggtggccgatccggatcacccgcgctggctcggctgcctgctggcgttcgcctacccggaccgcattgcccagcaacgtcgtgccggaggggccgactatcggctggccaatggccgtgcagccacctttggcgagccggatgcgctgatgaaggagccctggttggtgatcgccgatctcggtagccgccagggccagcgtgaagagcgcatctatctcgcggccgaccttgatcccgcactattcgacggccctctggccgaacaggtaaggtgccaggacctgctcgactgggaagagcgcgaaggtgtgctgcgcgccgaacgtcaggtgaaagtgggtgagttggtgctggcccgcgaagcccttgccgaactggatgacgaggcccgctcgcgtgcgctgctcggtctggtgcgacgcaaggggctggagctgctgccgtggagtgcggagctgcgccagtggcaggcgcgggtggcgctgctgcgccgactggacctggccgacacgggcggcagcgaatggccagacctctccgacgcggcgcttctggccagcctggaggagtggctgcagccctggctgggcaaggtcagccgcctcagccatttcgccaacctcgacctcgccggcatcctccatggcctgctgccctggccgctgccgcaacgcctcgacgagctggcgccgcgtacgctggaagtgccctccggctcgcgcatccgcctcgactacagcgacgagatgccggttctggcggtgcgcctccaagagctgttcggcctcgccgacactccgcgcatcgccggtggccgtcagggcgtcaagctgcacctgctgtccccggcccagcgcccggtgcaggtcacccaggacctggcgagtttctggcgcaatacctacgcggaagtgaagaaagatttacgaggtaggtaccctaagcattactggcctgaggacccgcttgtggcccaggctacagctagagctaagccgcgaaaatcgtag

SEQ ID NO: 351914 - DNA, 1782 bp, Pseudomonas aeruginosa
atgttcacctgggatccccaagatcttaatagtgagcaatcagcggccgtcgtagagccctcgagtgttttccttattgcatgccctggcagcggcaagacgcgaaccctgacctacaaaattgcctacgagctgtctcgacgcactgacaagcggatcgttgtagccattacctacactcatcgcgctgccgatgagatccaagagcgtatcgaggacctagggatcgacacctccgggctatggatcggcacgatccatgctttctgcctggagtggatcatcaagccctacggcatttacagccccgcgctcgcccacggctaccgcgtcatcgacacacatgatcgcgaactcctgctgggaagactttgcgagccatatcgaggtgtcacccactgggattgcgattactacgttaccgaagcggggtatcaccttggctgtcctgacactcgaaagcacgacgcaatacacaaggtgctagcggagtactttaaagaacttacagcgagtcgacagatcgacttcgagcagattctgtggcatgcccataccctgatgcgagatcaggtgcacatcgcagttctgctctctcgagtgttttcccatgttctcgtggatgagtatcaggacaccaaaaagatccagtacagccttgtgacgtccatacttcgcgcaggccgtgggcagactaaggcgttcatcgttggcgacccgaaccaagctatctacggctcacttggtgggtacgcgatgccagtggcagattttcgcgcccaggctgggattccgattaaggaaatggcactcagccgtaactatcgatccagcgagcgaatcattagctacttctcgaatttcaacgtgcatgcgacaagtatcaaaagcgcgggcaaacatgccgcgtttcccagcctggtgacctacaaccaggaagtagcacatagcgatgtgcatgacgagctggttagattgattcagttgagtctcgccgccggcaattcacccgaaaatatctgcgtcctaggaccatggtggattctgctggcctcgacaactcgcaagctggtgacgatgctacctgaccagcaattcgatggtccgggcctagttccttttagcaacgatcctgataacttctggttcaaggtctccaagatcttgctgacagagtcctctccgaatctgctcgctcgacgaatgcgctgggcaaatgacgtgatcaaagacctcgacgatttcggcgtcgacaccacacgactgacgccacgcatgctgttgcgggagtgcaacgcactcgaaatcgatgaatcggatggactccgttacctgaaccaggccttcaccgacctattcgagcgtctcaacatcccccaagaaagctttcttccactcccgtcactccgggaggctttcttcagaagctcggcagcgagaattgagaggttgcagagcgctggggcgagctacatcaatcaagtgtcattcttcaagaaagtgttccgtgagcggaccggcataacggtttccaccatccatggggtcaagggggccgagttcgatgttgtcatcgcctttggcctgttggaaggaatggtgccgcacttcaatgaagcgaatgggcacgttgccgcgagcaagctcctctatgtattgagctcacgtgctcgcaaacatcttcacttgatctcagagacgggacgaccgcgaggacggtatggggtctattccccgaccgagtcactcgcggcttgccacttcatctacgactcgaactag

SEQ ID NO: 351915 - DNA, 2139 bp, Pseudomonas aeruginosa
atgcatatttctaaattgacgctggtcaactaccgaaactttaagaatacgacccttcagtttcacaagggcgtgaacaccatcatcggcgagaatggctcaggtaagtcgaacatactgcgagcgatccgccttcttctagacgacacaatggtgcgcgcggcttaccgcttggatgaatcggatttcagccgctcactcggtcaatggcagggccattggatcatcatcagcatggaattcgaggagatcagcaccgacgaatcagtgcaggcactgttcctacacggcactgccacgctggaagatacgccacttcgcaaggcgacttataacctgattttccggcccaagaaagaaatccggttgaagctggctgaccttgatctttttgacgctgaccagctcgcagagatccgcgacacgattacgatcgacgactacgaaacgattttcacggggcggagctgggttgactttagcgatcccgatgtgtacaaggccttcgttggcgacttcgatctgtgttgcttcaactcggagacggaattcccggacatcggatcgaaggtgcccggattcctctccgttaccaaagaggtatcgctgactttcattcaagcactgcgtgacgttgttgccgagtttcataacaaccgtaccaaccctttgcttaccctgctcaagagcaaaagtggggagatcaaccccgccacgatgcaaccgattactgagttggttcgcgaactcaatacatctatcgaggatctggatgatgtgcagtcggttcgcaaccatattcgcgagaccatcaaggacgctgcgggcgaaacctactcgccggcgtcactttcgatcaaatctgatttgcccgaggatgccgataagcttttccagtctctacggcttttcgtgggcgaatcagaagaagggtacgagggtgccattcatgaattgagcctgggaggggccaacctcatctacctgacgctcaagcttctggagttcaagtaccagcgcgaaaaactggccatggccaacttcctactaatcgaggagccggaagcgcacatccatacccacatccaaaaaaccctgttcgaccgtatcgcatatagcgatgcgcagatcatttacaccacccattccactcacatctccgaagtgagcaatgtcagtaacgtcaacattctgggacgtcacggctccttctgtgaggcctaccagccagctgcaggccttgagcccgtccaggtcaccagcatccagcgttatcttgatgcggtacgtagcaatctactcttcgccaagagtgtgattctcgtcgaaggtgatgtggaagaaatcctgataccgatactcatcaagcaggtgctgggattaagcgttgatgaactgggcattagcgtcattaacatccgcagtacgggcttcaaaaatgttgcagtcctgttccacgacctgcgcatccgaaagcggtgcgctatcgtcaccgacctcgatcaggcctttttcgacatcacaccactacccaccgatgcccctcctacggtagcgaaaaaagccaaagcggccggttcgcagaggtcaggcttggagcgaaaagctgatctggatgggttcattaccggcaacccttggcttgcggccttctacgccaaacataccttcgaggtcgagtttgtctctgccggcaaccatgaggcagttgttcagactgtcccgaaagtctacacggacgatgcaacgatcaagcaagccaaggcggagctccaatccggagagttagggcaaatgggaagccgaacgctgacgatggccaagcaagagggcaagggatggttcgccatattgcttgccgagtatctcaccactcagattcagatccctgcctacatcttgcaagctattcattttgcacacggccccttctcccactccctgattggcagaatcctccagcatcgcgccgaatgcctgttcagttcctggccttcgttcgctactcagaagaaggatttcctgcttgaggtagagcgctttcagcgaaacgagatcaacctgcaggccctcaaaacagcagccttactcatgataccgggggacgccatcaatgactttctagcggagatgacgtga

SEQ ID NO: 351916 - DNA, 144 bp, Pseudomonas aeruginosa
atgacggggcagttaccggtaggacagcagcggctgttctactcgttcaatctggaagagcacgtcccgccccaacacctcttgcgcagcattgaccagcgcctggatctcaacgacctgcgtgcccacctggccgatttctaa

SEQ ID NO: 351917 - DNA, 651 bp, Pseudomonas aeruginosa
atgcgcctgccgtgtggctacaacgcgcaggtcaaacagtttctccgctcggggcagacagaagacacgcagttcttctctgccagtcatcccgaggcgcgcctgttctgtaccgaggccggcgtcgatcccgcgggccgggtcgaattgcgcctgatccgggtcgagctagccagcggtgaaagcgaagtgctgctgacctccctgctggatcgacaggccttcccggccgaggtgttcgcggatctttaccaccgccgctggggcatcgaaacggactaccgccgcctcaagcagaccctctgcctcgacaactttagcggccgtagcgtgacggccgtgaagcaggactttcatgccgggcaactgctgaaaaacctagcgctgctgatacaacatctgctgcaaccggtcatcgagcagcgccacaaaggccgcaagctgcgctggaaggtcaacttcacccaaggggtgtcacgcctcaagaacaccctggtcgacctgctggtacgccccggtgtgcaggggctggccaacgtgatggagttgatggccaacagcctcagcgctgtgcgcccgggccgcagcttcccgcgccagcgtaagcgcctggccagtcgcggctgcgagggctacaaaccgacgcgctaa

SEQ ID NO: 351918 - DNA, 549 bp, Pseudomonas aeruginosa
ttgaaaattgtacaaaaaataaccagccagctcgattgtcccgacttcatcgatacccaccgccagcgccctcacgactttacccgccgacgccaactgaccttcaagaacctcgtcctgtttttgctcaatcagccacgcactgccctgcaaaccgagctcgatcagttctatcgcgtgctcaaccaggcctcggccgagacccaggtggtcaccacgcaggccttcagcaaggcgcgcggcaagctcaagcccgaggtcttcgagagcctcaaccaaacccttcagcaacagctcgacagcctcgggctgcgccagacgtggcgcgggttacgggtactcgccgtggacggctcgaccgtccatttaccgctggagtcggtcatgacgcgctttttcggctgccatagcgagtttcccgttgcccgtctgtccatgctctacgacgtcgccgacggccagacgctacacagcctgatcgtgccatccaccatccgcagtcggcgagcgcgattgcgcccatctgcacctcgcgcatctgcccgctga

SEQ ID NO: 351919 - DNA, 1275 bp, Pseudomonas aeruginosa
gtggtagctgtcctgcaaaaccttctgcaccatgccatgcaccagcgcggccagcgcgacgtgcggatgccgggccacttcgatttgcagcgccgccgtgcggtgggcgctcaaccgctgcgccagctggtcggacaggctcgcggccttgggcgggtcgtcggcgtcctcgtgctcctcgttggcggcttcgccttcggtgctgccgaagccgcgccgcagcttttccagcgtgcgcagcgccttggcctcggcttcgcgcagcaggccgcgatgaataacagcctcgccgttgcggtcgatggtgacgatggcaccggccacctcgcgcacttcgggggcgtagccttgcaaggcattctccgcgtcttgcagttctccgaccacctgatcgcgccgctgttccagcttctcggccttggcctcgtcctcggcgtcgcaggcttcttccagttcggcgtcgatcttttcgaggcgggtttccagcgaggcgatgcggcgggcctcgcgggtggtcggctcgcggcggtggcgcggggcgttctggaacgcctgccgttcctcgtaggccagatgcggcacggcctccacccatgcccagccctcggcgcgcacgtcctcggccagcgttgccagcttgtcgcgcacgagcgtttccagcactgcggtatcggtgaggtaggttccggcatcgccttccgcgaacaggtcgcggcggatgccgccgcctgcctgccggtaggcgtccagcccgacgaagcgcaccagcgcgtgcgcggcgtcgatttcgcgctcggtcaggcgctcgcgcagcttggacgggctgcgctgccattccggcgcaccatagaacgtggcttcctgcgcggcgtggtcgtcggcgaagggacacagcaagaccgccccctcacgccacccacgcacgccggttttcggcaagcggagcgcgcaggcacggatcagcgagccgggccggaggcgccagcgatggaagcccgacaggggcgagactcgcgcagcgaggctcaatgcgcagcacgacagcgcgacggcggcacgccgggacgcccgactgcttgggacaggactactcgttgtcggtcttgcgcggctcgatgtgcaactgtccttgacgtgcagccgggcgtagttgcgaaggtacagcgtgtcgtactgcttatcgggcgatgtcaggtgcaccaccatcaggaaggcgggggactgcttttggacggtgatgccctggcgcaccacatcgcgggcagccgggcctga

SEQ ID NO: 351920 - DNA, 210 bp, Pseudomonas aeruginosa; identical to SEQ ID NO: 323948

SEQ ID NO: 351921 - DNA, 606 bp, Pseudomonas aeruginosa
atgcccagtcccaccccgctctaccagatcgaagagtgcccagacctgtacgtcgacgcctgcgtgtgcgacgagcagcgcaacctgatctttctttcggcctggggccgcgacaccgtgacacaagagttcctggccaggctgacgctgggccgggaagaaaatggcatcgaccatttccacatcatcgtggacggccgccgcttacctgtcttcccaaaccaggatctcctggagaaacgcaccacccgccagttccgcggcacgttgttcgggagcctgctcaacctctggctgttcgatcggcgcgcctcggcacctgaccgaagcaatcacctcgccttcgcactcctgcagcgcgatgaggatccacaccaaaggctctggccgctagtgatggagacctgtccgctccccctcctacagcactggcgcgagccagtgatggaggtcctcacccagcaccagatgttgaccgccctgccagggacgattggcaacgtctgcgcctggcgactcgccctgcgggtcgacgtgctcgagcccaccctcggtgggctgatccgcgaaagcattcttaccatcgatgctcaggcgcaagcctga

SEQ ID NO: 351922 - DNA, 3588 bp, Pseudomonas aeruginosa
gtgaccctggcggcggcggcgaacgaggagcacagcttcgccaccggcaagaaggtgacggcgaagaacgatcgggtggaacaccaatcgaccgtggtcagcgccggcggcgatctcagcgtgcaaggcggcaatgacgtgaccttcgttgccagtcaggcgaaggccagcaacgaggcctatctgtacgccggcaacgacctcaatctgctggcggctcacgacgaaagctattcctactactcgaagaagaaaaaaggctcgttcgggcgcagcagtagccggatgagcgagagcgaagccagtaccgtggtgtcgtcgtcgatccaggcgggacaaggggcggaactggtcgccaagcgtgacgtcaacgtcgaggcctcttccgcctccagcacgaagggcgagctggcggtcgtggcggggcgcgatgtgaacctcacggcagctgagaacagctactccagcgtgtccgcgaaatccaagtccggaggcttggggctgtcatccaccagcaaggccaacgcccagtcctcttcctacaccagcgttcagggcgccacgttgagtggcgataccaccgtggtgcaggcgggaagggacatctcggtggccgccagcaatgtggtttctaccgggaagactgcgctgcgtgccggcaacgacatcatcatcgacagcgtggcggagacgtcggagtcgcatcgcagcgagtcgaagaagaagtccggcctgatgagttccggagggatcggcatcacgctcggcacggcgaagaatgcctcgacacaggacacccgtaccgtcgtcaaccagggcagcaccatcggcagtgtgctcggcgatgtcgacatgcgggcgggcaagaacctgtctatcacggcttcggatgtggtggccggcaaggacatcaacctcgtcgggcagaacgtgagcattctcgctgccgacaaccagaacgtcagcgagcagacccgcaagaccagcgagagcggcttgacgctggccttgtcgggaacggtcggtagcgcaatcgacgccacctaccagaatgccaagcaggccaggaacgaagacgacagtcgcctttccgcgttgcaggggatcaaggccggcttgagcggcgtccaggcctggcaggcagctcagcagagcggcggcatgacgggcgagaacagcgcgcagttcgtcggcatcagcgcttcgctgggctcgcagaagtccagctctcggcagcgccaggagcagcagatcagccagggaagcacgctcaccgccggtggcaacctgaacattatcgccacgggttccggggctgtcggcgaagacggcgacttgcgcgtgcaaggcagcaagctgcaggctggcaaggacctccaactgatcgccaaccgcgacgtcgtgctggaagccgcggccaatacgcagaagctcgatggcaagaacaagagcagcggcggcgctgtcggggtaagcgtcggcgttggttcgggcgaggctggcatcagcattttcgccaacgccaacaagggcgccggcaaggaaatcggcaacggcaccacctggaccgaaaccaccctggacgcgggccagaaggccagcttggtcagcgggcgcgacaccacgctgaaaggggcgcaggtcaatggtgaaagcatcctggcgaaagtgggtcgtgaccttaccctgcaaagcctgcaggatcgcgattactacgattccaagcagaagaacgtcggtggtggggcgagtttggctatcgttggccagggtggcggcgccaacttgagtctcagccagagcaagctgcattcgaagtacgacagcgtgcaggagcagaccgggctgttcgccggcaagggcggcttccaggtggaggtgggcaagcacacgcagctggatggcagcgtgatcgccagcaccgccgaagccgagaagaatcgcctgagcacaggctccttgggctggagcgagatccgtaacaaggccgagtacaagagccaacttcagagtgtcagtgtcagcagcgccaacgatggcgccggtgcgttcgtcagcaacatgcctagcggcatgctcattgcctacaaccacggcgatagtgccagcggtaccacgggttcggcgatatccgaaggcaccctggaggttcgcgatccggcgcgccagcaacaggatgtggcgacgctcagccgtgacccgagccgcgccaacgatagcgtcagtccgatcttcgacaaggagaaagagcagaagcgtctgcagcaggtccaactgatcggcgagatcggcacccaggccatggatatcctgcggacgcagggccaactcgacgccgacaaggcggcgcgggccgaactggaagcgcggggtatctccgcgccggacgccggcgccagcgagcggcaagtcgaggactaccgcaaagcgcttctgggcacgaatgcctaccaggacatcatgggcaagtacggcaccggaggcgactaccagaaggccgcccaggcggtgaccgcagccttgcaagggctggccggcggcgacattggctcggcgttggcgggagcttcctcgccctatgtggcgggcgtgatcaagcaggtggcaggcgacaatgacacggcgcggatcatggcccatgcggttcttggcgcggtggttgcgcaggcccagggcaattcggctgctgcggggggcgcaggagcggcggggagcgaactggcggcgcaggtgatcagcgagcgactgtacggaacccgggacagctcgacgctgaacgaagcgcagaagcagactatcaccgcgctggccagcctggccggcggattggccggctccgttgtcgatgggagcagcggaggagccattgccggggccgcaggcgggaagaacgcaacggaaaacaacttccttggcggcggaaccccgccgggcttgatcagctatggtcaggcagcgagctccttgaccgagtacatgcgcaagaacggggcgacagccgaggagatcacccaggcgcaacgtgatctggcccagggacagggcttcgatggcgtacagccagcgaatgagttcatcaaggcctggggcgaggccatggttgcggaagctgccggccttgggattgttgcggggttgggtagatttgggttgtggggtgcaaagggagcgactcctgttgtaactgctgaggggcgaatcggtaactcagtatttacggatgttaaccagacggctagaccagcagcccaggcgaatcccaaccaaccgaccttgattgccgatcgagtggacgcaaagatagcggctaaggggacgcctcacccgaatgggaatatggcggatgctcatgcagagattggcgttattcagaaggcatttaatgaaggtaaaacggtaggctccgatatgaccatgaacgtagtaggtaaggatgtttgtggatactgcagaggtgatattgctgcggcagctagcaagtctggtttgaaatctttaactattcaagccaaggatgatattacaggtttgccgaagacgtattactgggaggtaggaatgaagtcaattagagagaaaaaaatatga

SEQ ID NO: 351923 - DNA, 1092 bp, Pseudomonas aeruginosa
atgagttcgcagttgatcggcatgctggcggcttcgacgcagggcgatgcggacgccaagagcttgcagacgggggcctgggtggcggggaatgccacccaacacaactacctcagtcattggcaggaggagaagaagcggcaggaggtcgatggctgcaaggacaaacagctctgcaaaaccggaatagaagccaaatgggcaattatttcggcccagcaggatgtcggtatcgtcgtaggtgttggaggaggcatcggtctttcgacggctgaaaccgcagtgggtgtttatgagctggtcaagaactggagggaaacctatgcagctctggagcagttggccacttcgccagagttccggcagcaatttggcgataactacctgaaggggctggaggagcgcgccgcattcttgacccaggcttacgaggatgccggctggcaaggttcggtcacagctggtgtcgagggtggtaggttcgctgcggaacttgttggcgttctgacggcagtgaaaggtggcgcgcagataaccgccaagctgccaacagcagccaagaacctggtcaacgcgattgcggagtcacctgtttccggtagtatgagttcgcagctcggggcagtgggggacttgggtaggctgggtgggggtgcaaaagggactgcgactgccggaaaagtggccgatgagttcattccaccaggaatggaacgtccgttccgtccagttaatccggagttcccaccaaacaaagctgtagtggatgcgatggaaagcccgcgcattaaaggaatgacggcttgtgatggtacagactgctcagaaattgcgagtaagttgcttgcggcagcaggcgggaaggggaaagttattgaggttaggccaactcagcggagtaacctaaatttgtatgagaatggtaatgaagtcccagggcaagcttatcaccaagtctatacagatgggcggtacgtgtatgaccctcggctgtcatctcagccaatacctaaaggcgactgggaacagcatataaaaggcatgaatcctgatggggtcactatttctgataagttgcaggggttgcgatga

SEQ ID NO: 351924 - DNA, 1281 bp, Pseudomonas aeruginosa
gtgggcattcagaaagcgaaagcctggtatgaggaggagaaaggcgaaccggtcggcatccgcgagctgtcacggaagctcaccgatgacggctatcctgtttcacattcacacatcagcaagatgctggatgccgttgagatactgctgccagccatccctgtgatgctgtattcagggctcggtaaaccgcaaatcgaaaaactcctgtcactcagaaagtcggcatcctcctgctgggcacgtctatacgccggtgaagggattgactttgaaatgctgttccaggacacgctggcaatcttcgacagtagccctgacgagttcatattcgaccgcttccaggacgagctcatcgatcagatgaagcggcccctgggcctgcgttatgaccagatcctgctcgagatcaccaacggccagcaggaacagcgccggggcactctggtcgacctgcccgcacctgccgcaccacctgaaatcccaccagtagggcaggaaagtcctgccgcgtcgactactggacaatcacaatcacagagccccgctgccggcctccaaacgtccaagaccaatagcctcccgggtaatccctctaccccgccaactccgccgctacctgtacaacagcagcaactgaccgatgaggagcatgcagcgctcttggcaggccatatcgtgagtccggtatcgaccaagatcctgcagactcgccaacgtctggccgctctcgagggtgaacatctacctgtcttcgaggaaacagctcttcacgcaatcccggtgcaagtcggcggcctgcacccgatcaccgacctctggtacatcgagcggtcgatcgacacctccgaaatcctgcgacagcacatcgctgatctggctgaagaaatcgctctgcacgtcggcgccccaggcgagatcgtcaggatccagggcggtgtgggttacacgtatcgcgagcccaatgaagaccctgagattactgattcagcgctgcacctcatcacgctgcttcaagcgctcagcggccaggtccaagtcgtcctgaactcacacgaccagcagacctgccgcgacgccctgggcgagtttcaattctcagctggcctcgctcagttgctgctgggccaacccaccacaggcgatcagccatccagccaggcaggccgtctcaatgacgaagccctggtgaaactgttccggataattcgtcttgcccgacgtctggttgaccttgagctgccgccggccgcctccgagcaagcagctaccgaccagtga

SEQ ID NO: 351925 - DNA, 756 bp, Pseudomonas aeruginosa; identical to SEQ ID NO: 342538

SEQ ID NO: 351926 - DNA, 681 bp, Pseudomonas aeruginosa
atgagccccttcattgaacttccgatctctcgccggcgggagccggcaaggagtctagtcatgcgtgaccagcagcccgctaacaatctcctttcgatagcgagcgccgaatggatacaagccttgcagaacttctgccaccacggacgagtgtatgacgggtccgccgccaatgcctggctattggatgcctgcctacttgttcccagcgctgccctcatccacggtgtcatcgagtacattcttaacagccgtgaggacataccatacggagggctacgcccaagctgggtggctcagcggctcgagcaggagggattgattagtcaccggtgcggggcagtcttgcactggcaggagcacggctatcgcttttccacggtggtcaggatcgaccccgaacagatttggcccgataagcgctcgagacccgaagcattcgttaccggaccactagatagccaggagcttggggtaattgaaatcctggcgcatccgaacgccagacgtcgtagtccgtccccggtgcgcctggcagcactggttcgatcttcgctagccatacctgctgagcctcttcatcccattgcaaatccgccagttcttcatgcagtgctagccacctatcccgaattggcatctcccgaatggtttccagtggccaggagtagcgacgcatga

SEQ ID NO: 351927 - DNA, 258 bp, Pseudomonas aeruginosa
gtgcagtttgtgcgcggtcccggcgacttcccggatcgagcgatggatacgctcgacgaactggttgaaggcatcgccgagcactccgaattcatcgcggctggtcacggcgaggcgcttggtcaggtcgccctcgccctgggcgatgtcctgcatggcacggcccatcaggtgcagcggctgcatcagcaggcggatcagcaggccgagcaggaccaggatggcgacgatggagatcagcgcggcggcgatggctga

SEQ ID NO: 351928 - DNA, 606 bp, Pseudomonas aeruginosa
atggagtcggatgcgcctcgcctctacgactctgcccgttcggaccaacgatacagcgagtggatcccaacgcggcccgaaggcgccggttggttcgtgctgtcgatccacgataccgataacggcccggtgtgccagtacgtgcgaccgctcggagaacacctgagtccaatcgatcttgatgcggcagcagaacagcatgagcgcctgctcagcgaggcttgtgccaaggccttgaatcagcgtgacgtcgccctggccagggtcatggagcttgaaacgaagctggccaagttggagaagcaggaacccgttggtgtgatgcgcgcgtcaagcgagatgggggtagcgccttacgcggatatctggccttggctggagcctggccaaaaactctacaccaccccagtagcccaggctcagcactgcgcggtgctggacgctgagaagctgatcgcacaattaaaggactgtgcgtcgcatgccggagatcccgagcgagctgcagcattcaacgatgcaatcagcgaggtacacgccatgctcgccgccggctcctcccaagctaagcccagcaccgacgacgggcagggaggcaggccatga

SEQ ID NO: 351929 - DNA, 687 bp, Pseudomonas aeruginosa
atgagtgaccccaagctcaagccctgcccgctctgcagcagcacgaacattcgaatgctggaacccgagctgctcgacaccgatgcctggaactgtgccattgaatgcctggactgccagattcacatcgggccgtcctactgcgagccagacccggtaacagcgaggtattcggcacaggtcgactggaacaggcgcccaagcgcaaaaagccacgcggacgagcgtgagcagttcttgatggccaacctgctcgccgccctggaggtcgcactgggcgacgtaacagccctggctattgtcgaccgggtaagacaggtcgcagaccgaatccaccccacctcgagcctatcccctgttccccaagcatggctcgatgtgcaagcagagcgccggcgccagatcaccgtcgaaggtttcgataccagcaaagacgacgcaagcggtggccagatcgcccaggcggccggctgctacgcgctccatgccggcggcatcggcaccgactggccgggcggcattcggaatggttctgccctgttctggccctggaacgaagagtggtggaagcctaagtcggcgcgcgagaacctggtacgcgccggcgccctagtgctggccgagatcgagcgcctggaccgctccgccaccgagcagggctcaacctgctgcaaggggggcgcgtaa

SEQ ID NO: 351930 - DNA, 1161 bp, Pseudomonas aeruginosa
atgggcgttctcgcagccaaggcacggaaaaccgtgctgctgaccggaacgctcatgggcggctacgccgacgacctgttctacctcctgttccgcatcctcacccagcgcatgatcgaggacggctaccggcccaacgcgcgtggcagcatggctccagcagccatgtcgttcatgcgcgaccacggcgtgctcaaggacatctacaccgaacgcgatggtgactcgcacaagacagcccggggcaagaagctctcggtacgcacggtgaaggctcccggcttcggcccgaagggcatccaccgcttcgtattgccgttcaccgtgttcctgaagctcaaggatatcggtggcaacgtactgcccgactaccaggaggagttcgtcgacgtgccgatggcgcctgatcaggcttcggcctatcagcgcctggcggccacgctgacagcggagctccgccaggctctggcgcgacgagataccacgctcctgggcgtggtcctcaacgtgctgctggcttggccggactgctgtttccgaccggagatcgtcaagcatccgcgaagccgggacacactggccttcgtgccagcgatcttcggcgacgagcagttgatgcccaaggagcaggcgctggtggacctctgcctcgaggagaaagcgaagggccgcaaggttctggcatacaccgtctacagcgggacgcgcgacaccacgtccaggctgaagaaagtgctcgagcaatccgggctgaaggtggcagtgctacgtgcttcggtcgataccgctcgacgcgaggattggatcctcgaccaggtcgatcgcggcatcgatgtgctgatcaccaacccggagctggtgaagaccgggctggacctgctggacttcccgaccatcgcgttcctgcagacggggtacaacgtgtacaccttgcagcaggccgcgcggcggtcgtggcggatcgggcagaagcacccggtgcgggtggtgttcttcggctacgccggcagctcgcagatcacctgcttgcagttgatggcgaagaagatcgctgtggctcagagcacgtcgggagacgttcccgagtcaggtctcgattcgttgaaccaggacggggactcggtggagatggcgttggcacgacaactcattgcagcatga

SEQ ID NO: 351931 - DNA, 324 bp, Pseudomonas aeruginosa
atgcccttccagcatgtcctgcggcgtcacgaccatggtgatgcacagcagcgtgtcctcgggcattcgatcgaacagggcgttgaggccatcgcctttgagcgtctcgccggtgacgtggcctgtcagcggcgctttgttcaactggtcgaccacaatcactcggtgcggcatggcatcgaagagccacacgccctgggtggcatcggaaacaggctgcctatagaacaggttctgggagaagtcagtgccgtcggccagtggcaattcatcctgcaggatcggttcgtccggacggcataccagttcgtagaagcgacgtag

SEQ ID NO: 351932 - DNA, 363 bp, Pseudomonas aeruginosa
atgggatggcttttctcacatcagacgaaggaagacctgctgcgtgagctgctggccccaaccagtaccttcgcaggcagcaccgaggtgctggcacacgcagtctccggcaatgaactttggactgtcgtaaaacgaaccttccaccttgccggattctatttcggcaagccggccggtcactcgatcaccatgatcgagctgcacttgctggactgctcggccgggcaatggggctacaagaccattccagaaagtgccggcccgttctactacggctgtccgctggagttcctggacctggctcacgatgaggtcaaccaggagtggcgtgaacgtctgacgcacgaacaccaagcctga

SEQ ID NO: 351933 - DNA, 225 bp, Pseudomonas aeruginosa; identical to SEQ ID NO: 340271

SEQ ID NO: 351934 - DNA, 276 bp, Pseudomonas aeruginosa
atgaaaacgcccgtactagagacccgcagaaaggtaatgaccacggtagccaatgcctatccgggcggtcgcgattgcgctgccgcgcggctggggattccgctgaagcgcctggagaaccagatgtacgaaacggcgggcgtgaagcccctgagcgacggcgacctgtacgtcctggagcaggagatggggacttcctatctgccggactacatctgcgcgatgtacggggagtgtttgtgcggacgccggaagcgggcgatctggacaacgtag

SEQ ID NO: 351935 - DNA, 180 bp, Pseudomonas aeruginosa
atgcccacaaagcacatcgacgacgcgacatggcgaaaggtcgagaaagagaccgtcaaagccgtgatccacctgcaagcatcggtaaaggacaccgaggtcctacgctggctgatactgaagggtctcgaagaaatgaccccggaagaccttgagcgcttccacaaaaaaagggactag

SEQ ID NO: 351936 - DNA, 1155 bp, Pseudomonas aeruginosa
atgtcgccttcgactgatccgtgttcaccgatgttctacgactggatatccggctatcaggatttcccgttcgacattccccaggtgggcaaggtcattcgactgaacgtcgattcagagaccaatgaggtgctgagccagtcgtgcccggccttccatgctgagggtagctacagcacgaagtttcgcattcaggtggcagggcgccgggtgtacgtcgatggcaatgcgagccgcgttaaccgcctggacaacctctacggcctgaccacgctcgcggacaacatggccgtcatcaactcgatcttgaccgcgccggaaatcggtcttccgccgctcactcgatgcactcggcttgatcgtctgcaggacggttcggctgtggtggacgggttcactttcactcggatcgatgcgacccggaatctcttcgtagggaagggcaacgagtcggcatatctgcgggctctgtcgagccagcgtttccggaactccattggctacctgtacccggacggcggcaccgttgtgtggacgcccagcgggggagagaaggccggtcgcctggtgtatccgggttattacaacaagggtctggaattgacccgtcacttgctgccgaaggttctacggcgctacggcgttgagtctgaggagtaccgctacgttagccaggtgcgcgactggtgcgtggaagtcggagttgtccgcgctgaaatcaagctcaagagcgagctgctgaagagggattgcctctgccattggggcctgttcgatgaacagcgcatctgggatcacctgggcgaatttttgaaggtgggcgacaaaatgaccctgaccgcacatgacattgccagcatttctgaagaactgatgcgcgtaggcgtctgcaactccatgcaggcggccactcgtactgcaacctatgcaatggaatggatgaacggcaagacattcgatttcaacaagtctgctgtacagacccatcgcgcccgtcttcgggctatcggattcgatatcaagctgccgttcgacgcctcgcggcacatgttcttcattcacaacgtgcgcgaagtctcccgcaccttcgacgtgcccgcgccgagcttctaccggcgtccggacgtaccgcgtcatctgcggttggtggcctga

SEQ ID NO: 351937 - DNA, 189 bp, Pseudomonas aeruginosa
atgggtgcgctcatgaacatgaaagctcgcatcttcctgcgcacgctgcgcttcgttgcctacaactggtggctgccgttcctgctgggcaacgtttccgcgttggtcggctttgcgttcacggctgacctgatcaatgacgcgttcgtctcgtcgctcgaaacggtggtgcattcatgcgcacggtga

SEQ ID NO: 351938 - DNA, 309 bp, Pseudomonas aeruginosa; identical to SEQ ID NO: 342596

SEQ ID NO: 351939 - DNA, 351 bp, Pseudomonas aeruginosa; identical to SEQ ID NO: 334664

SEQ ID NO: 351940 - DNA, 180 bp, Pseudomonas aeruginosa; identical to SEQ ID NO: 351935

SEQ ID NO: 351941 - DNA, 189 bp, Pseudomonas aeruginosa; identical to SEQ ID NO: 351937

SEQ ID NO: 351942 - DNA, 237 bp, Pseudomonas aeruginosa
atgcgcacggtgagttttcagggcgacggcctgtcagccagccaataccggacgatccagcttcgccagcaggtgagggcggcggtgaatcagtccgtgttgcagcaacaggtcgcggccacgctccaggccctggagcagcacaaagagcagggcggtaagcccgaaaaggtctggtccacgatctccaacgaaaagggcacgccgttcctgggcgacgtgttcgggtggccgtga

SEQ ID NO: 351943 - DNA, 309 bp, Pseudomonas aeruginosa; identical to SEQ ID NO: 342596

SEQ ID NO: 351944 - DNA, 315 bp, Pseudomonas aeruginosa
atgccattgttcgtagctctgttttcgtttctgagttctgtcgcgggtccgctggtggccaaggtgcttatatcgctcggcgtcggcgctgtgacgtatgcggggattaatctgctgattagccaggtgaagacatatgccatatctcagttcggcgcggtgggtgctgatgtggcttcaatcctagggctggctaagtttgatgtggcaatgaacattatttttgctgcggtggtggccaaggctgttatctcgggtatggataaggccagcggcagcattaccaagattggcagcgtcggtaaaggtagttaa

SEQ ID NO: 351945 - DNA, 930 bp, Pseudomonas aeruginosa
atgagctggctttgttctcgggcgctggtggaggaattcttggcggccacctcctcgggtggcgcacggtctgtgctgtcgagttcgagccctacgccgcaagcgttcttgccgccagacagaatgacggccttctcccgcccttcccgatctgggatgacgttcggacctttgacggacgaccttggcgcggccttgttgacgtggtttctgggggattcccgtgtcaggacatatcagctgccgggaatggcgccggaatcgacggtgagcgatcagggctctggagagaaatggcacgaatcgtcggtgaggtacgaccgcgattcgtcttcgtggagaactcaccgctccttgttcgaagaggacttgccgtggtcctcggtgaccttaccgagctggggtatgacgctcgatggtgtgttatgggagccgccgacgtcggggcgccccatcagcgggaccgcatctggatcgtggcccacgccaaaggcgaacgatgcggagaagcgcggaaacttcgatgtgaacaaccctcgaaacggcttaccggccgcggcgaagaagtttccaacaccattggcttcggactggaaaaggaatggtgcgccaggcgatcacaatcggaagtctccatcgctcggcgcggtagttcagagatggccaactccaaatgcatcggacgcgaacaaatggaacaaccaatccctgacggagaggaaggcgcgtggacagcagatacggctgaatactgccgtatatccccagggcggggcgggtggccaattgaacccgacgtgggtcgagtggctgatggggtggcctctagagtggacagacttaaagcccttgggaatggccaggttccaagagtggctgcaacagcattcacttatctcgcatctgaatggatctgaggaggcagcatga

SEQ ID NO: 351946 - DNA, 291 bp, Pseudomonas aeruginosa
atgacaacccctatcagtgatgagcagttggcgcaggttgaggaaatcgcatttcgagacacggccacccgagtgacggttaaagcaagtgacctgcgcggtctgatcgcccgcctgcgcgctgctgaggctgatgctaagcggtatcggtggctgtgcgcatctgcatggtatgtcggaccggggccgcgcggcgacacagaagccgttagctggcatgaccgcaacgaaaccacggatggcgtaaccgaagccatagacaaggcaatcgccatggagcgcacgccatga

SEQ ID NO: 351947 - DNA, 252 bp, Pseudomonas aeruginosa
atggaaacctgcaacgtttgggcagttatcaacatctggaccaacgaagtgattgacgaagcgacccactaccaagctgctgcggagctttctaattctcagactgaccgctggtatgcagagcacgtcggcccgtttcctcatgcgttctggggcggccagtggcagaagtgcgtgcgactgccgttttcggtttgccgcatcgacgccctgagccgtttctacccagggattaaacgcctggccgcctga

SEQ ID NO: 351948 - DNA, 219 bp, Pseudomonas aeruginosa
atgcgcccggcgaagtgcacgcccttccagtgcatggggaacaacaccaggatcgaggcgatctgcgccgacagcgagtccttcaggtcgaaggtctggaagaccacgaaggacagggtcgccaccgtggccccgagcagcgtctcgtggcgccggctgggggcgtccttggccggcgcctggcgcggcggccgcggttcgacgtcggggaacaggtag

SEQ ID NO: 351949 - DNA, 621 bp, Pseudomonas aeruginosa; identical to SEQ ID NO: 36226

SEQ ID NO: 351950 - DNA, 261 bp, Pseudomonas aeruginosa; identical to SEQ ID NO: 16909

SEQ ID NO: 351951 - DNA, 1089 bp, Pseudomonas aeruginosa; identical to SEQ ID NO: 16908

SEQ ID NO: 351952 - DNA, 879 bp, Pseudomonas aeruginosa; identical to SEQ ID NO: 138555

SEQ ID NO: 351953 - DNA, 261 bp, Pseudomonas aeruginosa
atgaacccattcaaaggccggcattttcagcgtgacatcattctgtgggccgtacgctggtactgcaaatacggcatcagttaccgtgagctgcaggagatgctggctgaacgcggagtgaatgtcgatcactccacgatttaccgctgggttcagcgttatgcgcctgaaatggaaaaacggctgcgctggtactggcgtaacccttccgatctttgcccgtggcacatggatgtttgctttacgaatgatgcaagctga

SEQ ID NO: 351954 - DNA, 222 bp, Pseudomonas aeruginosa
ttgctcctcaactacactgaaaccatgccgcaggaaaaagggcttggcgaccagactggcttctgtgaagagcgaaacacctgggagggctttctcaacctcacggtacagaacagacgcgacgccccgacgctcggaacccggtgcggtgtaaagaaactcgatgtggccgctaagctcgtaagagatgaacccgataaccgcatctccctcaattgctag

SEQ ID NO: 351955 - DNA, 333 bp, Pseudomonas aeruginosa
atgcttgaggagattgatgagcgcggtggcaatgccttgcctccggtgctcgccggagactgcgagatcatagatatagatctcactacgcgcctgctcaaactttggcagaacgtaagccgcgagagcgccaacaaccgcttcttggtcgaaggcagcaagcgcgatgaatgtcttactacggagcaagttcccgaggtaatcggagtccggctgatgttgggagtaggtggctacgtctccgaactcacgaccgaaaagatcaagagcagccctcatggatttgacttggtcagggccgagcctacatgtgcgaatgatgcccatacttga

SEQ ID NO: 351956 - DNA, 780 bp, Pseudomonas aeruginosa; identical to SEQ ID NO: 10334

SEQ ID NO: 351957 - DNA, 2052 bp, Pseudomonas aeruginosa
atgtccgacctactctcgataggcctgtccggcctcggcaccagccagacctggctgactgtcaccgggcacaacatcaccaacgtcaagacgccgggctacagccgccaggatgccatccagcagacccggatcccgcagttcagcggtgccggctacatgggctcgggcagccagatcgtcgacgtgcgccgcctggccagcgacttcctcaccggccagttgcgcaacgccaccagccagaacagcgagctgaacgctttcctgggccagatcgaccagctcaactcgctgctggcggataacaccaccggggtcagcccggcgatgcagcgtttcttttccgccttgcagaccgctgcgcagaacccgtcctcgaccgaggcgcgcgaggcggtgctggcccaggcgcagggcctgagcaagaccttcaataccctctacgaccaactggacaagcagaacagcctgatcaaccagcagttgggtgccctgacctcgcaggtgaacaatctcagccagagcgtggccgagtacaacgatgccatcgccaaggcgaaatccgccggggccgtgcccaacgatctgctggacgcgcgcgacgaagcggtgcgcaagctctccgagatggtcggcgtgaccgcggtcacccaggacgacaacagcgtcagcctgttcatcggcagcggccagccgttggtggtgggcaataccgtttcgacgctgagcgtggtgccggggctggacgacccgacccgctaccaggtgcagctcacgcttggcgactccacgcaaaacgtgacccggttggtctccggcgggcagatgggcggcctgctggcgtatcgcgataccgtcctggatagctcctacaacaagctcggccaacttgcgctgaccttcgccgataccgtcaacaagcaactggggcagggcctggacctggcgggcaaggccggcgccaacctgttcggcgacatcaacgatccggacatcacggcgctgcgggtcctggcgaagaacggcaacaccggcaatgtccacgccaacctgaacatcaccgataccagcaagctgaattccagcgatttccgcctggacttcgacggcaccaatttcaccgcgcggcgcctgggcgacgacgcaagcatgcaggtcacggtcagcggtaccggtccctacaccctctcgttcaaggatgccaacggcgtcgaccagggcttcagcgtgaccctcgaccaactgccggccgcgggcgaccgcttcaccctgcagccgacccggcgcggcgccagcgatatcgagacaaccctgaagaacgcttcgcaactggctttcgccgggtccgctcgcgccgaggcgaccaccaacaaccgcggcagcggcgccatcggccagccgaacctggtcggcggaccgtcgccgatcgatccggcggttctgcagaacgccttcggcgccaatggtctgccgctgagcgcgacggtcagcgcggatggcaagacctacaccatgacctcgccgctgccggccggttggagttatgtcgacaaggacggcaacgcgctgcccggcagtccgacgctgaacagcggtaccagcaacagcgtgcgcatggcctataccgatccgggcagcggccagacctatacctacgagttcaacctgtccaacgtgccgcagactggcgacagtttcaccctgagcttcaacaaggacggcatttcggacaaccgcaacgccctcaacctgaatgccttgcagaccaagccgacggtgggcggtaccggcagcacggggtctacctacaacgacgcctacggtgggctggtggagcgggtcggcaccctgaccgcccaggcgcgcgccagcgccgacgcctcgcagaccgtgctcaagcaggcgcaggacagccgcgactcgctgtccggggtgagcctcgacgaagaggcggccaacctgatccagttccagcagtactacagcgcgtcggcccaggtcattcaagttgcccgctcgctgttcgataccctgataggcgcgttccgctga

SEQ ID NO: 351958 - DNA, 954 bp, Pseudomonas aeruginosa
atgaataattttaggattggcgcctcagccgccacgaccgtttgcatcgtcttcgttcgcctgcttttcaccagcacgctagaaaagccaccggtgccactgggcttcctcgacttgctcgccgtgctaattggctccctcttcgccgtcttcgcagccttcgaatttgtcttgaagcgctaccctgacacgaaagaaatgctccccctcttcagcggaatcgtttggaccgttctggtctcaagctatgcggtcctgagataccagcccgagtatcagacgtccctgtcgatcttggtcactggcgtcttcgtcggaatgggttggtggattcaagctatcaccactgccgccaactctcggcgctctcatacgctgaacatcatcatggcctcgagaactagtagcgagtaccagcagcaaacccgggcgagctccaagctgtacctgaattccgtgatccctccagagttcgctgagtggaaattccagcctagcaaggaagagttcaagcacgctcgcatcacagatgaggtgagggacgctatcaacggcactgtctacgtcctgaattacttcgaatttttggcgcaaggcttaaagtaccgcgatctggatgcttgcctgctccgtgaatgcttcagcgacatcctcgcaggcctggagcgcagggggtttcatctgatcatcgaggcccaaaaaggaagcccgaaatcatttgagggcctgctccagctcgctaaagaatggaacggcgagtcgatcgttgaacgttacagatccaatccagacaacaccgcaattgggccacgttggccagatcaagaaaccgtgaactgcatgatggattgccgaaaaactccggtagttcagccaggccaagaggaggcacaccatcccacgccagcattggcaacagctgatggagtgccggtaacccctcccggggcctaa

SEQ ID NO: 351959 - DNA, 258 bp, Pseudomonas aeruginosa
atgaagtggctgctggtggtaatggtcgcgttggcgggatgcgctgcccaagtcaatcctgagcctcgcatagtgcgcgtggaggtaccggtggcggtcccgtgccgcgcgccggcagttgaggtgccgccctgggcgacggcatcactgcagaaaggtgacagcctgcagacaaaggtgcgggcgctgttagccgagttggaacagcggaaaggatatgaggctcagttgctcgcggggatagaggcctgccggtga

SEQ ID NO: 351960 - DNA, 369 bp, Pseudomonas aeruginosa
gtgatctcggcccgtgttgtctcgatcgtgctgggctgcctgctgctgatcggcgtaggagccgccggcggtgtctggctcggcgcgcggcactaccggccgcaacttgacgtagcgaacaaagagaagggtcagtgcgtgactgctcgcgacaatctggaagagttggccaaggagcagggcgccaagctcggcgaactgtccaaccaggcggagcagcgccaggcgaaggccgctcaggccgtggccaatgcccagcagcaggccggcgagcactacgctgccgcccagcggctgcagcaggagcgcgctgatggcgatcctgccgcagtggcagaggcgctgatcgacaaggagttagggttatga

SEQ ID NO: 351961 - DNA, 699 bp, Pseudomonas aeruginosa
atgaagaaattcaaactttccgcaccgctgatccttgcggtgatcgccgttgcgatgctgatccctctggtggtcggcctcgtcactcccatgaccaatgcggtcatggctggcagcgcgctggccagcctcactgtggtggcattcagctcgatgttcgtcgagccggcccgcctcgcgcagcgtgctgctcacgcgcagttcggtcgcgccggtgaggaaactgacatcgagcgcgagtatcgccaggttcaggctgacctgaagaccgtcggcgacgacctgcgcaagcacgccgaggcgtccgaaaagagcctcaaggcccacgtcgcgctttccgaggagaccaaggcctccgtcgacaagctgctgaccacccagggcgaactgcaggcccgcctgcaggctgccgagcagcagatcgtgaagctcgacggtggtaaccgtggcgatgatcgcccggaatccgctggcgagacctttaccaatgacgagcgttacagcgcgttcgctgcccaggctcaggccagcggtaactacagcctgaccgtcccggtccgtgcggccatcaccagcctgccgggttcggctggcgcgaacatcgagccgcagcgcgtcggtatggtgcagccgctccagcagcgcctgttcctgcgcgatctgctgaactggggggcgcaccacctcgccctcgattga

SEQ ID NO: 351962 - DNA, 384 bp, Pseudomonas aeruginosa
atgcaagcaatccaatgcggcggatggatcggtcacaccggccttggtctcgcgccgcgagaactcgaagccacggcctggagcgccagcgaactgacagcaaaggaagtcgcgcggcgcatgggtatcgccccagggaccgtcgagaaacgtctcgacgacgcgaaattcaagatgggtgtgcgcagcgtgcgcggactggtgcttgaggcgttccgacgcgggatcatctcgccggccgtcttcgtgctcgcattcctcgtcgccggccacccgctaatcgatgacgaccatatgaaccggaatcgcaggccgagcaacgagcggcggctcacagaagtccgcacggtacggcgcctcgaagaaatcaccatcaacgcgtag

SEQ ID NO: 351963 - DNA, 894 bp, Pseudomonas aeruginosa
atgggcctggaggcgctcggcgaggactggtcgctgagcctgctcggtccgcgcgatcgcctcgaggccgccgtgcgcccggccctggcccggctcctcgcggcgccgcccgactggcgcgcgagcggcgagcgtctgtcctccgccgagcggcgccgcagcgccactggcctgccgatccggcaattgctggacgccttgcccggcgtattcggcgagccgctggcggaggtcgacgactggcggcggacgcgctgggacgccttggtcatgcaggccgcgatgccagatccccgatggatgcccggccaggctgccggcgagcgcctggagcctctgccgccgaggcccggacggcatcgccgcgaactggccgtggacggcgagtcggcgttgctgctgttctgtccgctgcccacgcaggaggtgccgatggaggcggcctggcgcttgctggcgcgcctgcacgaaccggccttccagcggcgcctgcgcgacgagctgcaactgggctacgcgttgttctgcggcttccgcgaggtcggcgcccggcgcggcctgctgttcgccgcgcaatctccgcgtgcctgcccggaacgcctgctggagcatatggagaccttcctccagcgctccgccgaggcgctcgcgcaactgccggcgcgacgcctggccggcctgcgcgaagccctcgccgacgacctgcgccgagcaccgggtagcttcgccgagcgagcacggcgcgcctgggcggagcaccttggcggtggcgccggtcgctcccggctgctcgccgaggccgccctcggcctgagcggcgacgacctgctcgcggcccaggcccggttgctggaggcgcgcggcggctggtgggtgctttccagccggcgctga

SEQ ID NO: 351964 - DNA, 2175 bp, Pseudomonas aeruginosa
ttgccaacggcatggggaggccgctactttttcaacagaatcggccaggtcctgaccctgatcagcggcaagggcttcgaagatatcccgcagaacctgagcggcaaggccggcgagttggccggctcgctgttctggacactccacaggctgttgcaggcccgcgccggaggccaccagcaaccctatcgctacctggacgaagcgcctcagccattggcctcgccggacaacgcccggctggccgccgaccagccgcgcatgccctggcaggatgtgcattgccgcatcgaagggccgtcggtgtacgacctggcgcgcaacttcatcgaccgctggaacggccagcaggcctacctggccaagacgccggcgctacaggatacggcgctggtacgcagcgccctggaagccgtgatgaagtggctgaacagcctggccgccgccgcgggattggagaactacctggacgagaagcgcaacctccggctcgaactggacccacccacgccctgctggatcaacgcgccggaacagttgccgcaagagccggaggtgcgccgcggcggcatgaccgtacaggtactgcgcagcgccgcggcgcgcatgctcgaacaggagcaggccggccgcctcggcgcgggagtgaacctgcccttgcaggtcggcgtctccaccgaaggagtccagagcaactgcaaggacgccatgctcctggcgatttccggggcgcagcagttcatctatatcgagaaccagttcttccagagcgagttcggcaaggaaggcgaagttttcaaggatctgcccctttcaggccccatggccagtctgcgcgacgttggcagcctgcgacgcgacttcgtcgtccggatacgcttggaggaagccctggagcagcgcgacctctggctgctggactgggccgaagtggagaagatcgcccaggagcctggcaccgaggcccgccagttcctcaagtcgatgctcgccatgtggggcgtgaacgcccagggctggctcacccacaagctcggcgaggcccagcacggcctgctcaacgagatcggcgaagccctggcgcggcgcatcgaacgggccatccagcgcgagcacccgttccacgtctacctggtcctgccggtgcacccggagggcgcgctgaacgtgccgaacatcatgcaccaggtgcacctgacccagcagagcctggtgttcggcgaacagagcctggtcaagcgcattcagcggcagatggcgctcaaggccctggaaggcaagtccgacccggcccaggcccgggaaatcatcgagcgcaaggacgctcgcggtcgcccggtctacgaacagcaggactggagccgctacctgaccctgctcaacctgcgcacctgggcggtgctcggcgggcgggtggtcaccgaacagatctacgtgcacagcaagctgctgatcgccgacgaccgggtggccatcctcggcagcgccaatatcaacgaccgcagcctgcaaggcgagcgcgactccgagctggcggtgatggtgcgcgacagcgagccgctgacggtcaggctggacggcaagaacgacgccatcgtcggcaaggccatccaccagttgcgggtgaatttgtggaagaagcattttggcttgagccaggggccaggcggtttcgtcaagccggccagcgagttgagtgcttatctgtccatcccggcggctcaagaggcctgggaagctatacaaacattagccaaggagaatactcgtgcctatgaacggactttcaattttattccccaaaatatcagccagactcaactgcaactgactccagagccgcctaaaggatttgaggacggatttcccgcctccatatggccaacctgggcatacagaaaacctggcgagttaagggcgggcggacaactgatggagccgatgccatatcaggaaatcttctggcgctcatctaatctcacttcggtgaaaaccttcccaccacccaacggggtttccggtttcatcacggctctaccaaccagttggacccgtggtgagcgcaatgattctggcttgaatctaagcatcctggcacatcaggacagcagatcgcttcccacccaggtcgccatgaatggagatagctcggcacaaggaaagcatcgcacatga

SEQ ID NO: 351965 - DNA, 201 bp, Pseudomonas aeruginosa
atgggtgaatggtcggaatacttcgaggacttccccgaagaaaaccccggaaactacgacaagaacgggcgcttcaacccgcaaggtgctgcaaccgagcgagcggcagaatccaagctccggcaggatcaggcaaacctgaatgctgaaatccgcgcaatcgtcgagaagcaccgcccgcctactgctggcaagaaatag

SEQ ID NO: 351966 - DNA, 702 bp, Pseudomonas aeruginosa
atggcaagcgaacgatttgaaatgcggatcgacagcgatcttctggaacgtctagaccagtggaggcaaggggaggacgacacgccttcgcgggcagaggctgtgcggaggctcattgaggcggggttggcacacgacaacaaggggcgcgcaccgcacctgagcgatggcgagaagttgatcgcgatgatgctggccgagctaatcaagaagactggcgtcgatgtggatacgaatgtcgatctcgttgagaaggtcatcctaggcgggcactactgggcgctcggctgggagatgcccggaatctttcacgggcatgccgacaaacagagccgcgtgcgcttcgttgtcgatgtgctcgacatgtggtccttcatggaagaagcgtttgacgagcttggagaggagagtaaggcacgtctcgccaaggaagccgacccgtttgggaagcatgtgcagttcctcggctttgacgggaacaacgagtctgagcaccttggtatcgcgcgcttcctcatcaacgacctagacaggttcagccgattccgcgaagggcatcgcgacctcaactcgcattgccccacgattgaaagctacggcaggatgctaagggtctttgagcctattcggcagacccttgtcggtcgcagactgaatgtggatgagcttgctgcaatcctgaacagcaggcgcgcaagctag

SEQ ID NO: 351967 - DNA, 429 bp, Pseudomonas aeruginosa
atggaacaagccaagacctacaccaagcgcgagaacgcccgccgtgctggtgttgccgcaggggtgcccgctgaactggtggaaatcaccgtgcataaatctgcggatggtgtgcgtttcggctggaaggcgatggaagcaccggcacccgccgacgctgcacccgccgacgctgtggtgaccacaggcaagccgaagaaagcagcagccccgaaggttgagcgcgtcgagcagaacggggtcaagcgtcccggcccgggcaagtgcttggaggtgtgggagtacctagaccagcacggcaacatgaagccgaaggacttgcagccagtcgcagaggcgagggggtggaatatcaataatgcgtccatcgaactctaccagtggcgcaagttcaacggcatcagcgggcgcgcaagcgtgacaggctaa

SEQ ID NO: 351968 - DNA, 201 bp, Pseudomonas aeruginosa
atgacctacaacttcacgccgggaggctggctgcaaccgaagcccgcgcccctgatcgacacgccacaggggcaagccgatctcaagctgattgtcgatacctgctatgccgccatcctgaactgcgacgaccctgccgtgcgctggcaagccgcgcgcctgttgcagaacctcggcccgatgaaaggaaccctgcaatga

SEQ ID NO: 351969 - DNA, 711 bp, Pseudomonas aeruginosa
atgcccacgccagtcgattcaagaattacccccagcttgcacgccgaaaccctcaaggctattgacggatacgacgagcaactgaccgcccccatcctcgcccccgcgctcgaagcgctggacgatgcctatatcaccctcggcaggctgcacgacgggcgcgacgcggcgaaaaagaatcaagcttggtcggaggggcagcaggtgctggccgtatccgatgccgcctacaagcaacagcaacggctcgccaagaagttcgacaacgtgcgcgccacgctggataagcagatcgcgcacttcgagcaggagctttcgcagccgcttgagtcccgcgccagtgtgggtatctccggcgagattcggaagttcgttaaagacatgacgaccgaagaacgccacaagttcattcaagaggctatcgacgcgggtgaccacactaccgtcagcgcggtgctgggtgcccccagctacctgtcgggcctcgatgccaacttcgccaagacctacacccgcttttggcacgagcgcgctaccccggaagtggcgacgaagctcaaggcggtacgtaacgcaaaggcggctatcgaagaacgcggtgcgctgctcttcaaagaggtcgagaaagcgatgggctccacttggggcaaggtgcaggagcttcgtcagggcaatgacaaagcactggcagccctcaagttcggcgagtaa

SEQ ID NO: 351970 - DNA, 465 bp, Pseudomonas aeruginosa
atgaattacaacgaatgggaagtcagtgagctttgcaatgaactgcatcgcgtgcaggacgaagttagagcgctagaaaaggcgctccatgaagcacggttgaaacatgagcaggcgcgcaggcgggtgatgcacgcagacccggatatgactaccgatcacgtgctgcggtggagtgacgctccagactggcgcgctgcccatgtggattcagacgttgagcgcgcctatcggcgcgggttcggtcaaggtgcagcgcaggcggtgtatgccttgcagaagggtgccactctcaaggaggttgatgattgggtttggcggaaggtctggccgtggcgctatcaactcaacggccattcattctttgcgcgagcaattgaaccgccccggcacccgcgcgacaagccagcacaacagcgcccgcatgtggttatcccgtgcgaaatcagcgaacaacaaacatga

SEQ ID NO: 351971 - DNA, 708 bp, Pseudomonas aeruginosa
atgggtgcgtcggataccgatgcaaagggggacgcacggcaggcgctgcgggagtgggggcaatggctggaatgggcatacgtggcgacgacccgagactatcaggcctatatcgagttgagcgcagaagcgcgtgcgctgttcgacgcggaggtaaaagccgttcgggagcttgtggtggcgactgaggagttctcgcctgcctacgcttcgcaccttggcaagcatccgggcatgctggcagagatagcgctggtgttccatgtcttcgggcagcacggcggcacgctcagcaacgaagtcagcggccagacgatgcaatgcgccatccgctacatgaggaaggttcgccgccatgcgcacaccctctattcgagcatcctgagcagcgccccggccttcgagcttgcgcaagcgctcgcgcgctccatcgtggcctctgacgaagtgataaccacatgtgggcgcgactggatgacgcagcactgccaagcgttcaagaaggcagacgaccgcctacggcgcgaggctgtgcagattcttgaagatgctgattggctggaagctcaacccggcgcgcgtgcatacgggggctggcctagcaagtattccattcacccgaaagtgttcgagatgttcgcccgcgagggtgagcaatggcgcgcgcgccgtgcggcagtgcgtgacgcaatcggtgatgcggaatga

SEQ ID NO: 351972 - DNA, 765 bp, Pseudomonas aeruginosa
gtgatcagtatggaaatgatgggcaaaatccgccggatgtatttccgcgacaagctgtcgctgcatgagatagccaagcgcaccgggttggcgcgcaacacgattcgcaagtgggtcagagcacctgaggccaagccgccggtctaccaacgccgcgcgatcttcaacaagctcagcccttttcacgccacgctggagcaggcgctaaaagccgattcgctgcggcccaagcaacagcggcgcagtgccaaggcgctgttggcgcaaatcaaagccgaaggttatgacggtggctacagccagctcaccgcgtttatccgtgcctggcgagggggacagggcaaggcgtcgcaggcctttgtgccgctgacctttgctcttggcgaggcgtttcagtttgactggagcgaggaaggcttgctggtcggcggcatttaccggcgtatgcaggtggcacatctgaagctgtgtgccagccgtgcgttctggcttgtggcgtatccgagccagggccatgagatgttatttgacgcccatacacgctcgttcggctccttgggcggcgtgccgcgccggggcatctacgacaacatgaagaccgccgtcgacaaggtcaataagggcaaaggccgggcggtgaatgcgcgctttgcggtgatgtgcgcgcattacctgttcgatccggacttctgcaacgtcgccgctggttgggaaatggcatcgttgaaaagaacgtgcaagacagccgcaggcgtatctggctag

SEQ ID NO: 351973 - DNA, 624 bp, Pseudomonas aeruginosa
atggcgaagaagaacatgatgtgcgcagcagccctagcagtttcactgctttctggctgcgcctctgtaccaatggagacagcagccagggatcagcaactcaaagccttcccctcaccgccaaatggccaggcaggcctatacatcttccgcgacaccttgatgggagcaggcctaaaaaagaccatcaaaattgacaatgaaattgttggggaaaccgcatccaacacttacatctaccaagcgatcacacctgggactcacgtgattgccacagagtcagagttcagcgataacaccctgaacctaactgccctggccgataagaactattacgttcgccagtacatcaaactgggcgtatttgtcggcggagcaaacctagagcaggtcagcgaagctgaaggccagaagggcgtccgtgacacaaagctggcaaagacgctcacttcagcgccgcccatcattcaagagcaagctctcgttaccgcgcccccctcagctaacagcactcagaccagcaacatgcaattgaaaaagcaacagattcagcaattgcagcaggaagcgggtcttagctacgaagagtaccagagccgctaccgggcaatcatggctcaataa

SEQ ID NO: 351974 - DNA, 2022 bp, Pseudomonas aeruginosa
atgtataaaaacaaggaagtgctagataaaaatccgctcaccgacaaagcccttgagtttggaaaagtcaagtggttcggcggcttaaataacaaaactggccgtacgaatgaattcggatttatagatgcttccggggaagacctatattttcataagtccgatattttgtccgtagctacggcctttattccagatgctgaagttgttttttttcgtactgaaagccgtaaaggcccggcggcggtttcagttcaagcgcttgcgcaggcgtcagatgatgagattgtagcgctggtgcgagagagccgagggctgagcccactccagttcctgaagttgattaccctaagaaatgctttagcgccgctggagttgcaagctcttacagctcttgcagcgctggacgctagttcggggacggcatcagagttaaaaaacttctggtataaatttgccccaaccaaaatcgacaatgagctttttccatttgcgcccgcatacattaagcgccatctgtatcaggagcactttgctgattttcgaaataaactagctaaactctttgatgctcaatcaaaaataaagacaacgctggatgttatcgaggtctatggcaacaatcttgatgagcgagatttgctaattgctaaacagtgggcaccgctcccggacaatgacgcctcgctagccaaaatgctttcggcaagagcagctgaaaaggctacggcattattttatcgagatatgggatcggtagtggaagatattgccatcacccaacttgatgggacgaattctgattggaaaacacatgatctactggtagatgaaaatattgctcttgacgtgaaaaatgctcggcgcgcaattaattctgtaggtttttactctgaacatacagtagcgcgttttaagctagatcgcagggagcaacacgttagaattgctggaattttgtcaccatacttaaatctagagcagattaaaaatccatcatctttagagagcggcaaatcaaaggcacagattgtctttcttggggaaacggcaagaaacagcattgatcgtattgaggctttatttaccacgcctgaattcgaggttatgcgccctggaggcacggtgcctaattggatttttaattatccagatacttggtatagacaatttaggaaagacctcgaaattttttcctcgcaatgtaactggcctgagagcgaggagtggagttatgtgctatctaaagaagaactaaacaactccataccagctttatgcttggctggaaaacatttgccagcgcaagccattcaaggattggaaagctggcaagttgatttttattcgcgactacaggatctgttagcagagagcgcaccagaaataccaataatatttttcttagttttaacagattttctatcacgccttaaacaagacgaatcgcattattctccagaaggttatcgttcactcctgtacatcggcactgaccaaaaaaggagctttcctcttggcgctgttgaccctttaggtatagtaaatgtacttattagtagcctgtgcacgatctggaaataccgtgcagaaatcaacctaggctcgcttaccaactttagatttggagggcttggtctgttgcagggtagatccagaggccaatatttatggacaccattaattgcctactgcggtggtatcgactaccagaaagactctgagggaaatgtcaggctcgacatcaatggattgcctattgggaaaaacggtaaatgtggtaacgccccattagttattggacagcatcatcggtgctcaagttgcgcgcgcctgatttgctctaagtgtggattctgctcagcagaatgccaaaaaaaactatttgccatgatggctgaagagcagcgaaaaaaagcggaaaggcgcaactccgaaatggccgcgtggacagggtctcctccacaatgggaaagtccaccactcgaagcttacgaaggacacttttatgggcggacttaa

SEQ ID NO: 351975 - DNA, 753 bp, Pseudomonas aeruginosa
atgctctccgaggaatacgtttcagaagaaatcaaccaaaaaaaatataaagcaaccctgggatggtttttgattggtgttttatcgatttattttattatgcttcgcggccagggtgacaatatcacctggagtataggtaacgttctacaatacgctcaatcagttggccttattggcgttgccatgtcgttttttatggctctactaataccagctcccatagcattattagcgctattctttaaatcatgccggaacatgaaattcgtattcaaggtgtaccgagtgtttttcatggccttactggcatttgtactctttggattatttagcctgacccaaagaaacctaattactacttcagttaagtcagaacccacccatccgattgagcccatttatacagcaacgtcccctgctcaaattactgttaagcctgcgcttatagcacctgccgccgaaggatccaagttcagcaatggagaccttatgaattacgctataggatgcgctacattgacacgcagaattgacggcgatgatttagcctcagcaatcatggggaaatccatttacaagatgagtcaattagcgatcacacaagaagcaggcgaaaagttaatcgaaaatgctatctctaccacactaaaaataattgaaaacaacaagaacgattcgaattatctgattgagcttaggaatgagctttgcaatgacgcagagattttgattcccaacattatgggctaa

SEQ ID NO: 351976 - DNA, 1218 bp, Pseudomonas aeruginosa
atgacgacgggcgacgctccacggcgtgatggcccggttgcgctgtcggcgttgttcgacgaggcgctgcggcaccttgagccgaaggaaccggcgcagggcacggcgccgagccaggacggctttctctacagcggcaaccggcacgagagcgtgccgcgcgcgttgttcttcgaccggcgcctgacgccgctggagcgcaatgcctggcaggtgttccgcctgcagctcaacgacgacggcgtgaccgcctttcccacctacgaccagctccgcccatatctggcgtccatgccctgtgcggcgcaagcctcgcacgagaccgtggcgcgcgccttgacgctgctgcggctgacgcgctggctcagcctggtgcggcggcggcgcgatcccaagaccggccgtatccaaggcaacctctacgtgctgcacgacgaaccgctgtcacccttcgaggcgatgcagctcgacccggactacctgggcctggtgagccaggcgctcacgcacgcggcgaaggcggtgcaggtcgtgggcatgaacacgctgcgggagatcgccgaagacccgctgctcagcgggcgcacgctgccgacccgtctgcaagtgctggcgcagcgcatggcgcggcatggctggacgacgccaggttatccacaggagggtgcggaccacgaatccgaagaaggccaggaagcccttcttcggaatgctgcgcgcccgtcttcggaatccgaagcagggctgaaatccgcgccagacggctcacttcggaatccgaaggaggaccgtactgtacgtatggatcgtataaatcaagtacgtacagtaccgcgcgcgaagtcgttgcagcacctgcgcctgcccgagcgcctgctgcgcttgaaggacgagcagcaaagcggcgcgatggtggccttgcagcaggtggacgagtcgctgcggcaggcggtgttggacgaatgggatgcgcgctgccgcaacagcgcggtacgcaacccggccggctatctgttcggcattatccagaaggcgatccgcggcgagttcaaggcctgggccggcgaaggcggttcgccatcgacgccgcctgcgccgccgccacggccagccgcaccggcaccgtctgcaccgccaccgcccgcgccgaacggccctggccgcgaggcagcgcgggcctacctggcgaaactgcgttcaaccctgggcgattcctga

SEQ ID NO: 351977 - DNA, 831 bp, Pseudomonas aeruginosa
atgagcaccgtcacgatctaccacaacccggactgcggcacgtcgcgcaacacgctggcgctgatccgcgccagcggcatcgagcccacagtcatcgagtacgtgaaagcaccgcccgaccgcgagaccttgaaggcgctgattgcgcggatgggcatgcgcgtgcgggacgtcttgcgcgtcaagggaacgccctacaaggaaccgaacctggatgcagcgcattggagcgacgaccagttgatcgaccagatgctggcgcacccgatcctcatcaatcggcccatcgtggtgtctcccttgggcgcgcggctgtgtcgcccttcggacatggtgatcgagctgctgccgcagcgaccggcgggtgagatttggaaggaagacggcgcgacgctcctggtggacacgccgatcgccggcagcgatccggaccttgcgctggcgctgcacgaggccggtcttcccaccgacgacctgaccgagccggggcgtcgcttcttcgcctatgccaccgtgtcaggtgagcgcatgggcttcggcggcttcgagcacacgggccaggacgtgctggtgcgctccctggtggtgctgccacaagcacgccatcgcggcatcggcagcggcatgctcgcgctgttgctgcgccgcgccttcgatgaaggcggacgccaagcctggttgctgacgacgacggcagcgccgttcttcgagcgtgcgggcttcaagcctgcggagcgcactgccgcgccggcggcgatccttgccacacggcaggccgcgagcctgtgtccttcgagtgctgcgctgctcaaccgccgcatgacgttgtga

SEQ ID NO: 351978 - DNA, 720 bp, Pseudomonas aeruginosa
atggccaacacctactccgacgccaccggcgtcctcattctcgaccgggtgacgccggtcatctccgcgttgttcggcgcctttcgcctcgatgcgagctatcccggcaacgggaagacttatatcgctcgcctcgccgagatcaacgatccgcaatggagcgacgtgctcgacggtctgctgacgctggccgctcagctcgatctgcccgcaccggacgacgccgaaggcgaggatggcgaagaccgtgacgccgaactgtcgatgcctgtccttatcgacctgatcgccccgcacttcggcgccgaccagaaccaagacctcgccaatctcatcgagcaccacccgtttgagggcagcgcagacctcgacgcgctgttcctgatcggcacgtgcttcgacgacggccatcacctggtcgccatccagctcgaaggatgctggcgttgcagccgcccacggcttttcgagttcggcgggcatggttgcttcatcagccgcgagctgacggtatcgagcgaatccacgcatgcgctgcaactcggcgcggaactgcgcaccgcaatcctggccggcgaccttgcggcggcggccaaccgaattgccaacgaaacgctggcgcttctggcggccatcaccgacgaccaggttcgcgcacgcctgcgcagaaccgtcgctgaccgcctgctcaccgacccgtcctccgccgctgccggctga

SEQ ID NO: 351979 - DNA, 351 bp, Pseudomonas aeruginosa
atgaggacggatttttcgtattccaataccctcggctggaacacgttcccggtgccgacactgaccgagaaaaacaaggctgacctcacgcgctgcgcggaggacatcctgctggcgcgggagcatcacttccccgcgaccatcgcggacctgtacgaccccgagaacatgcccgccgacctgcgggcggcgcatgagcgcaacgacgaagtgctggagcgcatctacataggccgtcgcttcaagaacgacaccgagcggctggaaaggctgtttgacctctataccaagatgaccgcttcggctgcaccggccaagggcaagaagcgcaaagcgggagccaacgcatga

SEQ ID NO: 351980 - DNA, 1539 bp, Pseudomonas aeruginosa
atgaatgccgtagaaatcgaacaggccatcacagaccttgcggagcagccctttgactccgcagagttcccctacgccttccttgaagccttcggcaacaaggcgacaaccatcaagcgcctgcgcgcgggggcgtcgaacaagtccgacctcggcggcgttctccagaccagcaacatccacatcctgacctgcgacgtagggcgggtgccgcagacgctggccgccctcaaggccagcccagcgacggcaaaggccaaggcgaagttcatcctcgccacggacggcgcggacttcgaggccgaagacctgaccagcggcgagaccgtcgcctgtgccttcaaggactttcccgaccatttcggcttcttcctaccgctggcgggcatcagcactgtccgccagatcagtgaaaacgccttcgacatccgggccaccagccgcctgaatcgcctgtacgtcgaactgttgaaagacaaccctgaatggggcacggcggagcgccgccacgacatgaacaaactcatggcgcggctgatcttctgcttcttcgccgaggacaccgatatctttggcggcaggggcaagttcactgagaccgtcgcgcggatgagtgcgggggattcggccaatacgcacgaggtcatcgccacgctgttccgcaccatgaacaccaagcgtgaggatcgggcggcggccgggcttccccgttgggccaatatcgacgactttccctacgtcaacggccagttgttctctggtagcgacgaggtgccgcgattcagcaagatcgctcgatcctacttgctgcacgtcggtggcctcgactggaccaagatcaaccccgacatcttcggttcgatgatccaggccgttgccgaggacgaggagcgcggcgagttggggatgcactacacgagcgttcccaacattctgaaggtgttgaacccactgttcctcgacgacttgcgttccaggctggaagaggcgggcgataacccccgaaccttgcttaacctgcgcaagcgcatcgccaggatcagagttttcgacccggcctgcggttcgggcaatttcctggtcatcgcttacaaggaaatgcgcgccatcgaggccgagatcaaccggcggaggggggagtcggatcgcgcatcggaaattccgctcacaaacttccgagggatcgagctacgtgatttcccggcggagatcgcccgccttgcgctggtcatcgctgagtaccagtgcgatgtgctgtatcggggtcaaaagctggccctggccgagttcctgcccctgcgcaacgagaactggatcacctgtggcaacgcgctggagctggactggttatctgtttgcccaccgaccgggaccagcgtgaagttgagagcggatgacctgttcggaacgccgcttgatcaggctgagatcgacttccagaacgaaggtggagagacttacatctgtgggaaccccccgtaccttgggtctgttttgcagtccgaaaaacagaaggccgagcttagggcgatattttaa

SEQ ID NO: 351981 - DNA, 615 bp, Pseudomonas aeruginosa
ttgcttagcgttgaccatagtggctcggtatcagctcgcataactcggcgggttatgcgcttacccaaggggcaaccatttagcattaggcgtttcaagggtgtaggaacgaaaagcgccgtatccaaagccatcgcgcgattgaccaagcgcggagagctggagcgcgtttatcgcgggatttatatgcggccgaaggccggtcgctacttggccaaagcgcacgcgaatccttggcaattgattagccttattgcaagagaaaagcgcctttcattacaaatccacggcgctgaagccgtgagaagatttggcttgagcacacaggttccactagttcagactttttacaccaacggagctagtcgatccgtagtcatcggaaagggcgaagtccggctgatgcatgcgccaccaatggttatgcagcatgctggcacggaagtggggtcggctatcagtgcacttttttatttaggaaaggatggcgctactcaggattgtttgcgcgtgatcaagaacgccctaagccctgaagacctcttgaagctgcacagcagcagaatgccggcatggatgcgcatagctttggaggaccgacgtttaccggcctaa

SEQ ID NO: 351982 - DNA, 423 bp, Pseudomonas aeruginosa
atgcacgcaaaatccaccccccgtgcatttacgcttggcgatggcagcctagttctgcgcactgcgctaaaaattttagagcaatggaaggctactactcagcaggtttgcagcatccttcgtatcacacggagtcgcgtttgccgtattcggcagggcaaagccgttcgcgtcgaccgtgatcaaatggagcgagccagcattgtattgaactgccatgccagcctgcggctgacctttgaaagccctgagaatgtctacggctttgtgaacatggaaaaccacaacgacttcttcaatggtcgtaaaccgctggaaatcatggcgcagggcgaccttctgtccattttcgagacgtacaagcggatcgacgcgctttgtgggagtaacctcagctactcccgcagtcggggcgtggtctga

SEQ ID NO: 351983 - DNA, 1401 bp, Pseudomonas aeruginosa
atgagcagctcgctacgcagctggcagaatagctgcatcaccagggcgttggagcactttgccgtcacgccgcacttcttttgccaggcaacgccgggggctggtaagacgcgcatggctgcagaactggccagccgactgcttgagcagggcagaatcgatttggtgctgtgctttgcgccatcctgccaggtcgtggagggttttcgttcgacctttgcggctgtgctaggcaggcgtctcgatggccagataggtgccgtgggcgcggcctatacctatcagtccatggaacaccgtgatgagggcttctggcagcttcttgatgactaccgcgtgttcgtggtcttcgatgagatccaccattgcgccggccatgatccgctgctcagcaatgcctgggggcagcagatactgcatcggatacaggatcgggccgccttcacgttggcgctgtctggtacgccctggcgttccgacgaaaaggccatcgcattggctcgctactcgtcgcccgaagggcatctgatctgtgactaccgctatggcttgaaagacgccattgccgatcgcgtgtgccgatcccctcgcattgttctgctcgacaatcagagggtgaaactcacggaagaattgggtgcggacagttccgtaagactgtttcccagcatcgccaagcttttgggggagtctcctgtcacctatgaggaacttctgcgtcatgacgatgtgatcaatccaatcctcgatcttggctgcagcaagctgaacgagctacgccagaacaaacctgatgccgctggtttggtggtggccacagacatcgaacacgcccagcaagttgcactcgcactggaagccatgggtgaagagtgccgcatcgtgaccaacaaaaccccggatgcgcagcaggtgatcaatgcattccgcagcagcacctgccgctggattgttgccgtcggaatgattagcgaaggcaccgacattcctcgcctgcaagtgtgctgctatctgagtcgcatccgtaccgagttgtactaccggcaagtgctggggcgagtacttcgacgcacaggcgagttggatcatcaggcatggctattcatgctggcggaagaggcattgcagagttttgcggagcggattgcagatgatctaccagatgacttggcagtgcttagcactgtaaaggcgcctgctccatgttcggatcttaatgctggggggcatgaatccgcccgcaacgcagatgagcattttctgtgcggtgagaatcaggtgaagggaagagctaaaaccggcgtcgcgagcgttgtatcactgaatggctttgcgtctgaaccaggctatcagatcactttttcccagtattacaggcagcagttgctggcatgtttctaa

SEQ ID NO: 351984 - DNA, 1989 bp, Pseudomonas aeruginosa
atgatagaaattcgttccttgcgtgatctgttgcgcctgctgttcatctaccagcgcgagttcaagctggcggccctcagcgcggtggtgatcatcgtcctcggcgccttcctgctgccggccaagtacgagtccaacgcacgcctgctggtcaagccgggtcgtgactcgaccctgccgatcgagatcagcaaccgccaggcactggtgatgccgagcacccagcgcgaccctatcgtcgacgaagaacgcctgctcaccggccggccgatcgtccgccaggtggccgagcgctacctcgaggtgctggccaaccggccgccgccggagggcctgtggaagcgcaccaagttctatgtgaagaaggccatcggcgcggtgttcgacgggattcgcgtgaccctggaaaccttcggcgtgatcgaggaaaccaccgcggtcgagcgcctggccaaggacctggagaagaaattcgaggtcacccatgcggccggctcgacggtgatggagatcagcttcacctggagcgagccggaagtcgcccaggaagtggtcaaggcctggatcgagatctacatggaagagcgcacccaggcgctcggccgcaagagcctgtacgccttctacgaggcgcagaccgccgacagcgcggcgcagatcaagagctacaaggcgcagatcctcaagcacctcaacgagatcggcgcatccagcatcgaggaccgcctgcaggacctgtccgagcggatcaacgtgctgcgcggcgagcgtttcaactcgatccgcctgatcgcctcctccgacagcgccctggaatccacccgccagcaactcaaggggctgcccagggagatcgtcacggtgcggcagatcgcgctgaacccggcgcagcaggacctgcgccggctgctcaaccagaagcgcctggaacgcgccgacatgatgcgcacctacaccgacgacgcgccgccggtgaaggccctggacgcctcgatccgtgccctggagaaagaagtccaggacgaaggcgccaccgtgcagagttccgaggaccgcgcgccgaacaccctgaccactcacctggaacgggtcctgctggacgagaccagcaacaacgcggccctgcgcacccagctcgcggagcaggaaaagcagctcgccgaactcgaggcgcaacggcgcgaagcgctggacatcgagccgaccctggcgcgcctgcagcgcgagctgaacgccaccgagcgcaactacgcgctgtacgtcgacagcctggagaaatcgcggatcgaccgtgaactggacaagagccagatcagcaacatctcggtgatcgaggaagccacctacaaccccgggcggatcttcccgaaaaccctgctgatgctgttcctcgccgtgcccttcggtctcgccgtcggcctgctggtggtctatctctgctacctgctcgaccagcgcatccacgacggcggcctggtcgaggagaaattcggcctgccgctgtggaccaccctgccggagctgagcaacagcaccgcggagagcagcaacgccttcaccgccagcatctaccggctgtacgggctgctgccctacgcgcgcatcgaggaaaagggcctgaccctgggcctgacctcggcgcgccacggtgaaggcgtgaccttcatcatcgagcaactgcgccgcctgctggaggaaaacggcgtgcgcgtgcgggtcggcggcgaaccggcccagccgggcgaagtggtattgctcgacgcgccggccctgctggacagccgcgaggccttcatcgccctgcgccgcgccgacctgatcgccctggtggtggaggcgcagaagagcaccgtgccggtggtcgagcatgcgctgaccatcctcaccacggcgttcggcaaggtcgacgggatcatcatcaaccggcgccgcttcgaggtgccgagcaaggtcctgcagaccatcgcccgctaccggagcgcgttctga

SEQ ID NO: 351985 - DNA, 1248 bp, Pseudomonas aeruginosa
atggcgaagctaacgaagacattcatcgacaaggtgcaaccgcccgccgagggctacgcgatgcactgggacgactcgctcaagggctacgggctgcgcgtcaccgctgcgggcaagcgtgtgttcgttgctcaaggccgggtgctgggtaaggccgtctgcttcacgattggccccttcggtgaatggacagagttcgaggcgcgcgagaaggcccggaaggtgctgcaaggtatgcgcgagggcatcgacccgcgcgacgtgaagaaggccgacgaagcaactagggtgacgctgcgacaggtggcggacgcttatatggggcgaccgggcaagctcaaggacagcagcaagagcgagattgaacggcatgtgaccacaacctttgaggcatggcagcacaagcccatcaccggcatcaccgaagacgactgccgcaagcgctacaacgagattctgacgaaggggctacgcggcaaagcaccggcacccggtcaagcggtgcaggcgttcagcgtgttgcgcgccttgataaatttcgctggtcgcaggtacaagcgcgcagacggcaccccgctgatcctgcacaaccccgtggcagtgctcaaagacgattgggtgacgctgcccgagcgcaagacccgcatccctgaatcgaagattggccccgtgtggtcagccctccagcagtggcgcgaccaagcctacaaccgtgacacgctggcaagcatcgaccttgtgatcttcctcgtgctcactggtgcgcgcattggcgaagcggcggcgctgacatgggacaggatcaaccttgatgaaggctggtggcacctgcctgatccgaagaaccgcaaccccgtatggctgcccctatctacgcaggcggtgcagttgctgaccacacgccagcgcgtggaaggtagtccgttcgtgttctcgtcctggggcaaggctgggcacatcaaagacccgcgcgacaccatgaagaaggtcagcgaggttgccggaacgaagatcacgccgcacgacctgcgccgcaccttcacgacgttcggtgtagcgaactgcggagttgatctgcataagatcgaactgctgacgaaccatgtgcctcgcggtgtgaccgccaagcactaccttgagacctcgcacctgcaatatctcaagcctgaagttcagcgcatcgcggactggatcgagcagcaggcagcgaaagcgaatggtgcaaacgtggtgccactgcgggcgtga

SEQ ID NO: 351986 - DNA, 309 bp, Pseudomonas aeruginosa
atgaccgccgacgaaatgaccttcgagcagctttgcgagctgttcaactacatcccgaagaatcgcccgctcagcaccgaacaggtgtctgacatcaccgggcttgcctgcaacaccttggagcaacaccgcttcaagggcaccggcccccgcttcttcagtcctcccggcacccgccgcgtctggtacagcgagcgcgacgttctcgcatggcttgcgtccggcgcgcgttacagcaccagccagcctcttgatcgcgcagcactcacccgcgcgccgtggctttctgtcgaacagcaaacctcgtaa

SEQ ID NO: 351987 - DNA, 132 bp, Pseudomonas aeruginosa; identical to SEQ ID NO: 328159

SEQ ID NO: 351988 - DNA, 2289 bp, Pseudomonas aeruginosa
atgacgactcccaagtacggcggcctgctcaccgacatcggcgcggcagcgctgatcgcggcgagcgaagccgggaagaagtggcagcccacccatatgctcatcggtgacgccggcggcgcgcccggcgagacggctgaccccatcccctcggccgctcagaccaagctgatccgccagcgctaccgcgctcaactgaaccgtctgttcgtctccgagcaaagcgcaaacgtgctggtcgccgagctggtactgccgatggccatcggcggcttctggatacgggagatcggcctcgaggacgccgatgggaagttcgtggcggtcgccaactgcccgcccagcttcaaggccagcgtcgagagcgggagcgcgcgcacccaaaccatccgcgtgcagatcatcctatccggcatggagcacgtcgaactgatcatcgacgacggcatcgtctacgccacccaggactgggtgacggcgaaggttgccgcggacttcaagggacgcaaggtgctggccggcaacggcctggtcggcggtggcgatctgtctgcagatcgcaccatcgccttgccagcctccggcgtgggtgccggcacctaccgcgcggtcaccgtcaacgccaacggtatcgtcaccgccggcaacaacccgaccacgctgggcggctacggcatcactgacgcactgcatgccagcgaggcggtcaccaccccgacggcgaacaagctgctcaggctgaacgcggccggactactaccggcctcgattacgggcaacgcagccactgccagccggcttgcagcgcccatcacgctcagcgcgagcggcgatgcaacgtggtcagctcggttcgatggggccacaaacgtcaacggagtcctgacgctggccaactccggcgtcaccgccgggacctacgcgaaagtcacggtgaacgccaaaggactggttaccggagccagtgggcttgtagcgagtgatattccggcccttgatgcaggaaaaatcacctccggcatcttacctgctgccagaggcggtaccggcaatggtattggtcaggctgcaacggcggtcaaactcgccgcccctcgcacgatctacctcggtggggacgccagcggctcgacaacgttcgacggtagctcaaacgctggaatcacggtcacgctggcgaactcgggcgtaaatgccggctcctaccccaaagtcaccgttaacgccaaggggctggttacggctggcggtggcctgacggcagcagacattcctgcgttggatgcttcgaagattgctaccggccgactcgatcttgaacgcttgccgttggtgtcgcagggactggccacggctgtgcataccagcgttgatcccaactcggtagtcattccgctggtactgaccaatcacgcgaatggcccagtggctggccgctactactacatccagacgatgttctatccgaccgtcgaaggcaacgcgacgcagattgcaaccggctatgccggcgtggctgacatgtacgttcgttatgcctacgcttcccccgcaacgaccgattcgtccaagcgggagtggtcagcctgggtccgctgcgatctgggcggtgccttcgcacacgcgcccgatggtgagctgggtggctatgtcaatctggactcgatgattgcttcgggctggtggcatcaaccgttcaccgcaaacgccaagaacggggagaactatcccgtaggcgaagcaggtttattgacggttcatgctccaaccgcctcgatgatctatcagacctatcgtggctacgccgccggcggtctgtactggcgctgccgctacaacggaacatggtcagcttggtatcgtgcatgggactccggcaacttcaacccggccaactatgtggccaagtcggaatactcctgggcgtccttgcctgggaaaccatcgaatttcccacccagcgcgcacgttcactctgcagcgagcaggggcgtgagcggctggtacaagaacaacgatacgggggtgatatttcagtgggtgaacctgtctatcggtgaccaccctgggggagttatcgatcgggtcgtgacgttccccattgccttcccgaatgcctgtctacatgtcgttccaactgttagagaaaacggccgtcctgccattcccgcctcaactgtaacggttgcagaaaaagccagaacggcgaccaactgcaccatcgtttcaagtgagtacatcgggaatgtgcagaacttcggcatcaatgttttcgcaattggctattga

SEQ ID NO: 351989 - DNA, 690 bp, Pseudomonas aeruginosa
atggatattttggagtccattaaaagtaattttaaggataggattgagagcccactatccggcgctttttgtgtctcgtggattttatggaattataagttttttgttgtgattttttccaacatggagcctggtgctaagtttaattatatagagcagagtctatggaatccttggtacgttgctctaatctttttcttctttggtcctcttgctaccgctcttttctatatatttatttatccagttcctgctaggtgggctctgaaattttcacttgaaagtaagagggatattcaagagataagacttgcagcagaagggaaaaggcccatctctgaagaagaagctatggagctaagggttaaatatattcataaggctgacgaccttgagaatcaactcaaaaaccagatagaaatagcgagagcggcgacggctagagagcgagaggttaaggatagttgggccactactttggctgaacttgaaagagtaaaggaagatttcaagtatccaccggatagcgcaattcttgtcaggactttagagcggcaaattagtagccttaatacagatctttcaaatgagaaagatatgaatttagatcttcggaggcagattggtaagttggatgagcaaatcctacgttaccgtatggctctggatgaaaagccaagtggctcttag

SEQ ID NO: 351990 - DNA, 3021 bp, Pseudomonas aeruginosa
atgaccatcaccgaacaccagatcgagcaggacctgctcgccaagctcggcgacctcaagtacagctatcgccccgagattcgcgaccgcgccgggctcgaagccaactttcgcgaaaagttccagcagctcaaccgcgtcaacctcaccgatgaggagtttgcgcgcctgctggaagagattgttacacccgacgtgttcaccgccgcgcaaacgctgcgtacacgcaatagcttcatccgcgaagatggcacgccgctgaactacaccctcgtcaacatcgaagactggtgcaagaacagtttcgaggttgtaaaccagctgcggatcaacaccgacaacagccaccaccgttttgacgtcatcctgctcatcaacggtgtgccggtcgtgcagatcgaactaaagacgctgggcatcaacccgcgccgcgccatcgagcagatcgtcgagtacaagaacgaccctggtaacggcttcacccgcacgctgttgtgcttcatgcaggtgtttatcgtcagcaaccgcgtttcaacctactacttcgccaacaacaactctcggcacttcagtttcaacgccgatgagcgcttcctacccatttaccagtttgctgcgctggataacaccaggatcaccgggctggatgattttgccgatgtcttcctgcccaagtgcacgctcggccagatgatcagccgttacatggtgctggtcgccagcgagcagaaattgctcatgatgcggccctaccagatctatgccgtcaaaaacattgtcaagtgcatcgaagaaaacagtggcaacggctatatctggcacaccaccggcagcggcaagacgctcaccagcttcaaggcctccaccctgctcaaggccaatccgaacatcgaaaagtgcctgttcgtggtcgatcgcaaagacctcgaccggcaaacccgcgaggaattcaaccgtttccaagaaggctgcgtcgaaagcaacaccaacaccagcgagctcgtccgtcgtatgctgtcggacgatgcggccgacaaggttatcgtctgcaccattcagaagcttggcctggcactggacgagggcagcagacgcaacaaaagccgcgagaagcgtggacttgcaacttatgccgagcagctcgaagcgctgcgcgataagcgtatcgtcttcatctttgacgaatgccaccgttcgcaattcggcgataaccatcaggccattaagacgttcttccccaaggcccagctttttggctttaccggcacgccaatcttcgaggccaatgccagcattaagcagatcagtggcgaagagaagacgctaaagaccacgcaggatttgttccagcaatgtctgcacgaatacaccattagcgatgccatcgacgatcgcaatgttttgaagttccacgtcgactactacaaacccgacgggaagaacccacccaaacccggtgaaaccctggccaagcgcgccgtcgttgacgccatcctcgccaagcacgatgccgctacgggggggcgcaagttcaacgcgattctggccacagcttccatcaatgatgccatcgcctatcacgcactatttgaagaggctcaggccgagaaactgcaggccaaccccgagtttgtgccgctaaatatcgccgccgtgttctctccgccgggcgacgtgagcgccgatgtacgtcagttgcaggaagacctgcccaccgagctggaagacaaccagcaggagacggacgccaagaaggcggcgctgcaagcgatcattgcccgctataacgcccgcttcgatacgaaccaccgcattgaggaattcgacctctactaccaggacgtgcagcagcgcatcaaggatcagcaatggccggatgccgacctgcgcaaagccaaccccagggccccgcaacacaagatcgacatcaccatcgtcgtcgacatgctgctcaccggcttcgacagcaagtacctcaacacgctttacgtcgacaagaatctcaaacaccacggccttattcaggccttcagccgtaccaaccgcgtgctgaatgataccaagccctttggccatatcctcgacttccgtgggcagcaagacgcggtggacgctgccatcgcgcttttctccggcgcgaaggccgatgaggcgcgcacaatctggttggtggacaaagcccctgcggttatcgaaaagctccaagaagccgcactcggcctgcacagcttcatggaggcatacgggctttcaggcaaacccgaggagattgccacgctcaagggcgacgaagcccggatcggctttgtcgaagccttcaagaaggtgcagaagctgcaaacccagctcgaccagtacaccgaccttacccccgagcaggaagcctctatccaggccatcctgccgccggacgaactcaacgccttccgtggccagtacctggagacggccagacgcctgcgcgacgagcgagccaagcctggcgatgccaagcgcgaggaactggagcagctcgatttcgagttcgtgctcttcgcttccgccaccatcgattacgactacatcatgagactgatcgccgacttctccaccaagaagcctggcaaagccaccatgagccgcgaacagctggccagcctgatcgcgagcgacgccaaattcatcgacgagcgcgatgacatcaccgaatacgtgatgagcctcaaggccggcgagggcctggacgaacgcgccattcgcatgggctaccagcaattcaaggcggtaaaagcctcccgcgaactgaccgagctagcggccaagcacggactgcccactgcagcactacaaagttttatggatgaggtactggagcgccgcatcttcgacggcgaacagctaaccgaattgctcgccccgctggaactgggttggaaggcgcgtacgcagaaggaattggccttgatgagcgagctggcaccgatgctgaagaagcgagccggcggccgggatatctcaggcctccaggcgtatgaggattga

SEQ ID NO: 351991 - DNA, 1311 bp, Pseudomonas aeruginosa
atggtgaaggcgggcaataaagcgatggtacctcggttgcggtttccggagtttcaacacgagggagactggacgacagtaaagcttggggctgttgcgacgattagcacagaaaaagttggcaataacatttgcgtgccgatgagcatcacatccggcgtggggcttgtaagtcaagaggacaagtttggccgtgtaatcgctggcgactcatacaaaagctacttgctcttgaagccaaacgattttgcttacaacaagagcgctaccaaggaatttcctgaaggttttctcactctgtactcgggtacggagctggctgcggttccgaacagtatattcacttgctttcggatcaacggcgcgtcgccaaatacgcggtttctgaactatcaattctcagacaacctgcacgggcgttggctgcgcaagttcattcaggttggggctcgggcgcatggttcgttgagtgtcagtgatggcgacttgctggcgctgcccattcccgttccggcgggcacaacatcggtcgcagaacaacaaaaaatcgccgactgcctcacctctctggacgagctgattacagcgcaggagcgaaaagtcgaggcattaaagacttacaagcgcggcctgatgcagcagctcttcccccgcgaaggtgaaacccttccccgtatccgctttcccgagttccgtggtgcgccagagtggcaagccaagccattaggagagcttgtgcaactgcagtctggatttgcattctcaagcagtttcttctcggactcaggccagaagttggtgaccccaaagaactttacaaagacgggtttcggaaattttgagagttcgatctcgaaatatacaacagaggaagtgtcagaaaaataccagtgtcgcccaggtgatttacttgtgcttctgacagatttaactcctacttgcgcacttttaggtcagccgatagaagtgactgaggcggacggcaacctgctactcaatcagcgagtggtgaagattgaaccaatatcagcgcgggttaataagagttttctaaagcaatttctgctaagcgactcttaccgcaaggttatagtaggaactgcaaccgggactaccgttaagcatagctctaataaggttctggagggaatagagttcgttttccctcaagaagaggagcagctctgcattgctacttgcctttcctccttagatgtgcagattttcgtcgaatataaagcaatcgaactaataaaaactcataaggcgggactcgtgcagcagttgtttccgtctcaaggggcggcttga

SEQ ID NO: 351992 - DNA, 1140 bp, Pseudomonas aeruginosa
atggctgttatattgttttcagatttgtcggcactggcacaatacttacgtgagaaccttgaattaaagaagttctcgcttatttatgcctacaatgggacgggaaaaacaaggctgtctggagaattcaaggagcagggtaagaagttcggcgaggaccgcgagatcacgcagcgtgatacgctttatttcaatgcgttcaccgaagatctttttaactgggataacgacctcaaaaacgaccgaaagcgagtgctgaaaatcaacggcgattctcgtttcttctcagggctagaaacgcaggaaatggataatcgtatccgcccgctgctaaaccgctacgcagactttgactttcgcatcgacaccaccgagtgggaggtgagcttctcccgagaagtggagatcgacggtaagaggacaacggtagaagacatcaaggtctcacgtggcgaagagaacatcttcatctggtgtttctttctcgccatagtgcagctcgcgctcgatggtgacgaggcctacgagtgggtgaagtacgtctacatcgacgatccgatttcatctcttgacgagaacaatgcgatcgctgtggcccaccacttggcccaattactgatggccaccgataaagggccgcgcgtggtcgtgtccacgcatcatgtacttttctttaacgtgctatgcaatgagttcaagggcaaggcctacaagcatctgctgaagaggggggcggcgctgggtagctattcgctagtggatacctcggccaggccctttcttcaccatctatcaaacttagttgagctgtatgacgcgcaggccagtggttccctttacacccaccacttcaacatgatgcggcgagtcatggagcagaccgcaaatttcttggggctggacgactggaaggcctgcattgccgcgccggatggtgcagacaaggcactgcacaagcgcttcattgatctgatgagccatggcgactattcgctctatgagcctcgggaaatgatggaggagaacaaagcgtacttccggattatctttcggcagttcattaccgggcaccccttcaatcgcgcactgtttccgaaccttttcaatatagcgggcgcgaccccggatgttgacgcatga

SEQ ID NO: 351993 - DNA, 414 bp, Pseudomonas aeruginosa
atgagaggactcatcctctacaccactggcgacgaatgcagccaggtcaagctgcgagccaaggatcagccggtctggctctctcagcgtgaaatggcagaggtgttcgacgtcagtaccgataaagtcagcctgcacctgaagaatatctttcacgatggcgagttgagccgtgaggcgatccccgtgagcttctggcgccagaacgtggaccagatcatcggtagcaacggttttccgctgctcacccatgccggcaaggtgagctacgcgcaaatggaacgtgccaccattgcgctttatctcgattatgaccaacgccgcaaacagaaggaggcacgtcaggccgacgcgcaggacgaagctgaacccaaggcgctggaaaacacactcaagaaacggcccaaaccatga

SEQ ID NO: 351994 - DNA, 282 bp, Pseudomonas aeruginosa
atggaacaggccgaatctgtcactgatatcttttgcgatgtttgtggcaacagcatgcgtgttgaagggtatgggttgcaattcggaacccttcgcgccagttgggaactcggctcggctcatgctggcgagcgttatgaagtccatctgtgcgaactctgctttttcaggaccctggcaggcttgaagcgcgagcgaatggtgaactcgatgttcagtgccagcaacgaggacttgagccgtttcggtcttatcgcgcgcgatgattcttccatcgtttga

SEQ ID NO: 351995 - DNA, 3981 bp, Pseudomonas aeruginosa
atgaccgaccagactccttcccttgaccaactcgtccggcgcctcgaccaggcccagatcagcgaccgccaccgcttgcgccggcagctccacgaactgcgcaagcagcccgacgacgcgcgcctggcgcagtgggtcgagcgcttccagacctcctgcgccaaggtcgaggcgcggcgcgccagcgtgccggcgatccgctacgacgacagcctgccgatcgccgccaagcgcgacgagatcaaggccgccatcgccgcccatcaggtggtggtgatcgccggcgagaccggctcgggcaagaccacccagttgccgaagatctgtctggagctgggtcgcggcatccacggcctgatcggccatacccagccgcgtcggctggcggcgcgcagcgtggcgacgcgggtcgcggaagagatcggtacgccgctgggcgcgctggtcggctaccaggtgcgcttcgaggaccagagcgacgacagcaccctggtcaagctgatgaccgacggcatcctcctggccgagacccagcatgaccgctacctggagcgctacgacacgctgatcgtcgacgaagcccacgagcgcagcctgaacatcgacttcctcctcggctacctgaagaccctgttgcaccggcgtccggacctgaagctgatcatcacctcggcgaccatcgacctggagcgtttctcccggcatttcgacggcgccccggtgatcgaggtttccggccgcacctatccggtggagacctggtaccggccgctggcggcggaaaccgacgaggagggcaaccgggtcgaggacgacctgtcggtggaccagggcatcctcgccgccctcgacgagatcgccgcccacgaacgcgaggtcggcaagcggcccggcgacgtgctggtgttcctccccggcgagcgggagatccgcgacgccgcggagatgctgcgcaaggccaacctgcgccacaccgaggtgctgccgctgtacgcgcgactgaccccggccgagcagcagaagatcttccagccgcgcccgggacgcaagatcgtgctgtccaccaacgtcgcggaaacctcgctgacggtgccgggcatccgttacgtgatcgacagcggcaccgcgcggatcagccgctacagctaccgcgccaaggtccagcggctgcccatcgaggcggtgtcgcaggccagcgccaaccagcgcaagggccgttgcggacgggtcgagccgggcatatgcgtgcgtctctacagcgaggaggacttcaacgcgcgtccggccttcaccgacccggaaatcctccgcaccaacctggccgcggtgatcctgcagatgctgcacctgcgcctcggcgacatcgaggcgttccccttcatcgagccgccggacggcaaggcgatcaaggacggcttcacccttctgcaggaactgtcggcggtcaaccgcgaaggccagctgaccccgctggggcgccaactggcgcgcctgccgatcgacccgaggctgggccgcatgctgctggaggcggcccagcagggtagcctcgaggaagtgttgacggtggccagcgcgctgtccgtgcaggacccgcgcgagcgtccggtggagcggcagcaggccgccgaccaggcgcacgcgcaatggaaggacccggattccgacttcgccgcgctgatcaatctctggcgtggcttcgaggagcagcgccaggcgctgggttccaatgccctgcgcagctggtgccggaagaacttcctcaactacctgcgcctgcgtgagtggcgcgacgcccaccgccaactgaccctgatctgccgcgaactgaagctgccgttcgggcgtccggccaaggccgaggcgcgcaagccggaggcgaagaaaggcgcgtcggccgacaacgaacgcgaggtaccggggatcgattacgcggcggtccacaaagcgatcctgtccggcctgctcagccagatcgggcagaaggccgaggaaggcgactacctcggcgctcgccagcgacgtttctggatccatccgtccagcggcatcgctcgcaagcgcccgcaatggatcatggccgcggaactggtggagaccaccaagctgttcgcccgaatggtcgcgaagatcgagccggactggctggagccgctggctgggcacctgatcaagaccaaccacttcgagccgcactgggagaagcgtcgcggccaggtggtggcgttcgagcaggtcaccctctacggcctcatcgtcatcggtcgacgtccggtgcactacggtccgatcgacccgccggtggcgcgcgagctgttcatccgcgaaggcctggtgcgcggcgagatcaacagccgcgccaagtgcctgagcgccaaccggcagttgctggaaaagctcgacgagctggaagccaaggcgcgccggcgcgacatcctggccgacgaggaaaccctgttcgcctattacgacgcgcgcctgccggcggatatctaccagaccgccagtttcgagaaatggtacgcccgcgagcggcagaaccagccggacctgctgctgatgcgcgaggaagacgtgctggcccgtgaagccagcgaagtcactgcggcgcagtacccggatcgcctgcgcctgggcgacctgcacctgtcgctgagctaccagttcgagcccggcaccgcgcgcgacggcgtcaccgtgcgggtaccggcgccgctgctgccgcaattgccggccgaacgcatcgactggctggtgcccggcctgctctacgacaaggcggtggcgctggtgcgcaacctgccgaaggcgatccgcaagagcttcgtgccggtaccggacttcgtccgcgccgccctggagcgcatcaccttcggcgaaggttcgctgccgcaggcgctgggccgcgagcttcagcgcatgaccggcgtgcgggtagccgacgaggcctgggccgaggcggcgacgcagttggacgatcacctgcggatgaacatcgaggtggtcgacgcccagggcaagttcctcggcgagggccgcgacctggccgaactcaccgcgcgtttcgccgaagccagccaggcggccctggcgataccccaggccgacaaggaacagcagcgtccggtggaggccaaggccttcgccagcgtcgccgagaaggcccagcagaaggtcgccggattgtcgatgacggtatacccggcgctggtggaggagcagggcgaggtcaaggaagggcgcttcccgacccaggccgaggccgactaccaacaccgccgcgccctgcaacgactgctgttgcagcaactggccgagccggccaagtacctgcgcgccaagctgccggggcagaccgagatgggcctgctgtaccgcgagctgggacgggtcgaggcgctggtcgaggacatcctcctggccagtctcgacagttgcgtgctgcagggcgaaagcctgccgcgcgacggcgccgccctggccgcgctggccgagcgcaagcgcgctgcctggaacgagcacgccgagcgcctggcacgcctggtgctggatatcctcaagctctggcacggcctgcagaagcgcttcaagggcaaggtcgagctggccatgaccgtgccgctgaacgacgtcaagggccaactggccaatctggtgtatccggggttcgtccgcgccaccccgctggagtggttgaaggagtatcctcgttacctcaaggccatcgagcagcgcctggacaaggtcgccggccaggtccagcgcgaccgggtgtggagcggcgagctgggcgaactctgggcgcaataccaggcgcgtctcgccaagcacgcccaggaaggcaagcgcgacgccgagttgcaggtgtatcgctggatgctggaggagtaccgggtctcgctgttcgcccagcaactgggaacccggctgccggtctcggacaagcgcctggccaagcagtggagccaggtcgagggctag

SEQ ID NO: 351996 - DNA, 345 bp, Pseudomonas aeruginosa
atgcgcatcgtcgaccggaagaaggacatgatcctggtctccggcttcaatgtgtatccgaacgaactggaagacgtgctggcgaccctgccgggcgtcctgcagtgcgccgcgatcggcatccccgacgagaagtccggcgagtcgatcaaggtcttcgtggtggtcaagccgggggcgaccctgaccaaggaacaggtcatgcagcacatgcatgacaacctgaccggctacaagcggccgaaggccgtggagttccgcgacagcctgccgactaccaacgtcggcaagatcctgcgccgcgaactgcgcgacgaagagctgaagaaagcgggccagaagtaa

SEQ ID NO: 351997 - DNA, 1305 bp, Pseudomonas aeruginosa
atgatcgaaaacttctggaaggacaagtacccagcgggtattgctgccgagatcaatcccgaccagtacccgaacatcctgtcggtactgaaggagtcctgccaacgttttgccaccaagcccgcgttcaccaacctgggcaagaccctgacctacggcgagctgtacaagctgtccggcgacttcgccgcctacctgcagcagcacaccgatctcaagcccggcgaccgcatcgccgtccagttgcccaacgtcctgcaatacccgatcgtggtcttcggcgccatgcgcgccggcctcatcgtggtcaacaccaacccgctgtacaccgcgcgcgaactggaacaccagttcaacgactccggcgccaaggcggtggtctgcctggccaacatggcccacctggtcgagggcgtactgccgaagaccggcgtcaagcaggtgatcgtcaccgaagtcggcgacatcctgccgccgctgaagcgcttcatcgtcaacttcgtggtcaagcacatcaagaagatggtgccggcctacagcctgccgcaagccaccaagctgaccgacgcgctggccaggggcgccggcaagtcgttccaggaagccgcgccgcaggccgacgacgtcgccgtgctgcaatacaccggcggcaccaccggggtcgccaaaggcgccatgctgacccaccgcaacctggtggccaacatgttgcagtgcaaggcgctgatgggcgccaacctcaacgagggctgcgagatcctcatcgcgccgctgccgctgtaccacatctatgccttcaccttccattgcatggcgatgatgctcaccggcaaccacaacatcctgatcaccaacccgcgggacctgccgtcgatgctcaaggacctcggccagtggaagttcaccggcttcgtcggcctgaacaccctgttcgtcgccctgtgcaacaacgaaaccttccgcaagctggacttctccgcgctgaagctgaccctctccggcggcatggcgctgcaactggccaccgcggagcgctggaaggaagtcaccggctgcgccatctgcgaaggctacggcatgaccgagaccgcgccggtggtatcggtcaacccgttccagaacatccaggtcggcaccatcggtatcccggtgccctcgaccctgtgcaaggtgattggcgacgacggccaggaagtgcccctgggcgagcgcggcgaactctgcgtgaagggtccgcaggtgatgaagggctatggcagcgccaggaagccaccgacgagatcctcgacgccgatggttggctga

SEQ ID NO: 351998 - DNA, 621 bp, Pseudomonas aeruginosa
gtgcccgattcaaatacaggcctgcgggccggccagcgctttggttgtctcgtagtgttgaggtccaatcgcggtaggtcagtttgcaggtgcgattgcggcgctattcacgaggcttcaaatggaaacatcaggcatggaaagacaaagagctgcggatgccttaaagcacaggggaatcatagaactcatggaagtactggcactttaacgcacaagcgctggttatcaatgactaggcgatgcagagacgagaaatgtatcggctatgagaactacggcggcagaggtatcaccgtctgcgatcgctggatgtcattcgaaaacttccttgccgacatgggcgaatgtcagccggatatgacgcttgatcgaatcgatcctaacggaaactacgaacccgacaattgtcggtgggctgacaaaacaacccaagcgcggaacacccgggccaacaggctaatgacctggaatggccagacgcactgtgtcgaagagtgggccgaaattataggggttagctcgcgcagcctgatgagccgtatccgtcttggatggagcgacgagaaggctctttccactccaataaggcagcacaagccatataaggatcgaacctag

SEQ ID NO: 351999 - DNA, 657 bp, Pseudomonas aeruginosa
atgaccgacctcaccaagctgaaggagctggcggaacgggctacgcctgggccgtggtctgcggcctgggaggaaggcgatgacactgcatggccgaatctgtttcctgtaatccaagcgggcaatggcgaagtcgtgatcggtaacgaaggcttttacaccgatctggagcaggacaaggctaacgccactttctgcgccgccgccaacccacaagccatcctcgggctgattgccgaggtggagcggctgcgctccaggctggagatagacgaacgcatccctcatgacgggatcgcctgccgggacgaaacgatcaaaggactggacgagatcgaccggctcaaggcggagaactgcgcccacaaggacacgcagaaacactgcgagtggttggcgcaggacttgaaggagtgcgcaagcgttctgcccggtacttactacatggaccctccagacggcggcaatgtcagcattccagagcagattcggcgcatggcgaaggacgccgcgcgctaccggtggctgcgagagcgagacctcgaaacgatcagacaaggcggcgtattcgccgggatgaccccggagaacatcgtactcaacctggagcacctagacgctgcaatcgacgcagccctagaaggagccaagcaatga

SEQ ID NO: 352000 - DNA, 342 bp, Pseudomonas aeruginosa
atgaacgaccgcgaactactcgaactggcggcgcgggcggcgggctatcagttctcatacccgtaccactccatctccatcccgttaatcctggcagagactgggcggtggcgacaatgggacccacgacacgacgacggcgacgcgctgaggctggctgtgaagcttcgcctggacataacgttctacaacggctttcaggaagtagccgccgagccatcaaatggtgacgggatgaaccctagtcaggaagtgttcacggaaaatccgtatgcggcaactcggcgagcaatcactcgcgccgcagccgagatcggaaagtctatgggaggtggggagtga

SEQ ID NO: 352001 - DNA, 234 bp, Pseudomonas aeruginosa
atgaaagacaacggcggacaagcgtttccctcggaatcgatgtacacgtccgaagcgggaatgaccctgcgcgactacttcgcggccaaggcgatgcaggccttgcttcatccgacgtacatagagtcaagcgtaagcaagccccatagcaatcctcttgctgacataccgagggttgcttatcgatacgccgacgccatgctaaaggccaggaaggaaggaggtggggagtga

SEQ ID NO: 352002 - DNA, 240 bp, Pseudomonas aeruginosa
gtgcgtttgcggacgtataggccacggattataatccgcattttcgcgctatttcttctggtgccctcaatgaaatcggcctcgtttatcttcgacaggcgtctgtatgagctgcttcaggggccagggcgtacatcgtttacgacccgcgaactgcgcgatgcctatgccgcgcgcttgagtggcacacaattccgtatcgccgatgtgcgccgctatgtgtatgagcagattctgtag

SEQ ID NO: 352003 - DNA, 237 bp, Pseudomonas aeruginosa
atgagcaagttcaaggctggggatttggcgctgattgtaagcgcgcaatacgaagagaatttggggaccgttgttcaactggtgcgggtagacgggttctattcgctcattagcggcgagacctcctggcttgtggaaggagaaggacgtggttgttactgccgagagtcggcgctaatacccttgcgcggcgacttccagcccgagcagcagaaggcgaaggaggttgaggcgtga

SEQ ID NO: 352004 - DNA, 1275 bp, Pseudomonas aeruginosa
atgagcacagcaatcagtcagactgcttataactataaggtggtccgccagttcgccgttatgacggtggtctggggggtcattggaatgggtctcggtgtcctgatcgccgcccaactggtatggcccgaattgaacttcgacctgccgtggacgagcttcggccgccttcgccccctgcacaccaacgcggtgatcttcgccttcggtgggtgcgccctcttcgccacctcgtactacgtggtgcaacgtacctcgcaagcccgactgatttcagacacgctggcggccttcaccttctggggttggcaggccgtgatcgtgggcgccgtgctgaccctgccgcagggtttcaccacctccaaggaatacgccgaactggaatggccgctggccatcctcctggcgatcgtctggatcacctacgcgatcgtgttcttcggcaccatcgtcaagcgcaaggtcaagcacatctatgtgggcaactggttctacggtgccttcatcctggtgacggcgatgctgcacatcgtcaaccacatgtcgctgccggtgagctggttcaagtcctactccgcctactccggcgccaccgatgcgatggtccagtggtggtacggccacaacgccgtgggcttcttcctgaccaccggcttcctcggcatgatgtactacttcgtgcccaagcaggccgagcgtccggtctattcctatcgcctgtccatcgtccacttctgggcgctgatctccctgtacatctgggccggcccgcaccacctgcactacaccgcgctgccggactgggcgcagtcgctgggcatggtgatgtcgctgatcctcctggcaccgagctggggcggcatgatcaacggcatgatgaccctctccggcgcctggcataagctgcgcaccgacccgatcctgcgcttcctggtggtgtccctggccttctacggcatgtccaccttcgaaggcccgatgatggcgatcaagaccgtcaacgccctctcccactacaccgactggaccatcggccacgtgcacgccggcgccctcggctgggtggcgatgatctccatcggctcgctctaccacctgatcccgaaagtcttcggtcgcgcagatgcacagcatcggcctgatcaacgcgcacttctggctggccaccatcggcaccgtgctgtacatcgcctcgatgtgggtcaacggcatcacccagggcctgatgtggcgcgcggtcaacgaggacggcaccctgacctactccttcgttga

SEQ ID NO: 352005 - DNA, 2445 bp, Pseudomonas aeruginosa
ttgcagcacgctgctgttggtccattcgctggcgcggatgtccagcaggccattggtggtcagttcgccgccggcgcggatcacctgcccggaatccaggccgaaggtgccattgccggtgtggaggatgcgcccaccggcgttggccaggctgcccagttgcaggtcgaggtcctggttggcgctttccagcacgccgtaggcgttgttcaggccgccagcgaccaaccgcgtgctgccgctgcggccgagggcgcgcaggctgccgccgctgttgtcgatcgcggcggcgcgcaggtgcagctcgctttcgctttccaactggccgaagcggttggccagcgcgccggccaggctgaagtcgatgcgcccggcgccgaccttgccgccctggcccgccgccgcgccctggttgaggaagcgctggccgtcgaggctgagcaggccgctggcgtagaggccgccgccctggttgtcgaagtcggcggtgacgatgcggttgtcgccgcccagcgccgagaggtggccctgctggttgcgcacgccttgcccggcgcgaatctccagcgactgcgcctgggtgacgccggcgctgttgtcgaacagcccggtgaccagcttcagccaacccttggcgctgttgagcacgccgccggcgccgttgtcgaggctgccgctctgcaggtcgaggttaccggcccggctgtccaggcggccgccctggttgtccagcgcgccaccgatacgcagctggttgtcgccctgggcctggagcgtgccctggcggttgtccaggctgccggcctgcacctcgagggcgccggcctggctgaagatcaggccgtcctgctggttgcgcagggcgccgccgcccaggcgcaggctcatgccggcctggctggcgagggtgccggaggcgctgttgtcgaggctgccggcgctgatctccagcagcccctggctgaccagcttgccgccgcggttgtcgacgctggcgctgcgcagcagcaggtcgccgccgctggccaggcgcgccgcgccggtgttgaccagggcgccgccaaggatggcgtcgagccggccctggctgatcaactggccgtcgctgttatccaggctggcgcccttgagcagcaggctgccgccgttgatccggccgccggcgttgttcagcagcgtatcgtcgcgctcgaagctcagcgcgcgctgcgccgagaccaggccgccctggccgttgtccagcttcccggcgatgctcagggtcacgtcgctttcgccggagacgatgccctgggcgttatccaggctggcggcgtcgatccgttgcgcgcccttgctgaccagcgcgccctggccgtggttgtccagcgcgccgccgaggctgatggccagctcgccgtccttgctcgaaagggtgccgccggcgctgttgtccaggctcccgcctgtcaccgtcaggccctgccatccggagagcaggccggcgccggcgttgcccagcgcgtcggcgtccaggcgcagtttcccggcgctgatgatgcgcccctgctggccgttgtcgatgcgcctggccagcagctcgaagccctgctggctggaaatctcgccgccctggcggttgtcgaggacgttcagccgctcgatgctcagcgggccgcgggcactgatcaggccgccctggttgtccaggtcgccaccccgcaggtcgagactgacgccgcgctcgccgatcagccggccctggcgttgcaccaggcgctcgaccgtcaggcgcaggtcgccccgggcggagatttcgccgccgtcggcggaatcgacgcgccctgccgtcagttccagttcgccgtcgctggtgagcaggccgccacggttgtccaggttggcggcgctcaggcgcagcgactgcttgccactgagggcgccgccacggttgtcgaggtcggcgctgctgacgtccaggacgccctggctgatcagttggccaccctcggcgttgtccagcgcgccagtggcgacgctcaggccggcgttgccggagagcaggcccttgccgctgttgtccagggaggcactggcgagcgtcaggcgggcgccggaaacggtgccttcggcgtggttgtccagcgcgccgtcgacgcgcaggtcgatgccggcgcggctggccagggtgcccttggcgctgttgtccaggcgagcggccgcgatgtccaggccggcggtgccggagatcaccccggccaggctgttgtccagggcctgggcgatgcgcagggtcaggctgtcggcgccgatcaggcgcccgccgcggttgtccaggctggcggcggcgagggtgaaggcgcggtcgctggagatttccccgccggcgccgttgtccaccgcgccgagctggcgcagcagcagcgcgccgggcgtggcgatcaggccgccgtcgcggttgactag

SEQ ID NO: 352006 - DNA, 237 bp, Pseudomonas aeruginosa
gtgcccttgtacccggcggtggcggtgcccttgtacccggcggtggcggtgccctcgtccccggcggtggcggtgccctcgtccccggcggtggcggtgccccagttcccggcggtggcggtgccccagttcccggcggtggcggtgcccttgtacccggcggtggcggtgcccttgtacccggcggtggcggtgccctcgtccccggcggtggcggtgccgtatgcgcctacctga

SEQ ID NO: 352007 - DNA, 483 bp, Pseudomonas aeruginosa
atggcagtcgtttccgagaaaaccgctggagggaggaacgttcttgcgttcctggacatgcttgcgtggtctgaagggaccagcacgatcagaggtagcgacaacggctacaacgttgttgtcggtggaggactgttcaatgggtacgctgatcacccgcgcctgaaggtctatcttcctcggtacaaggtttattcaactgcggcaggcaggtatcagcttctttcgaggtactgggatgcctaccgcgaaagcctggcgctgaaaggcggcttcaccccggctaaccaggatctggtggcgttgcagcagattaaggagcgccgcgcgctggcagatatacaggccggtcgcttggcggatgccgtgcagaagtgctccaacatttgggccagcctgccgggggctggttacggccagcgtgagcattctctcgatgacctggcagcgcactatcttgcagcgggcggggtgctgtcgtga

SEQ ID NO: 352008 - DNA, 624 bp, Pseudomonas aeruginosa
atgaaacggatcgatatctccgggcttcgctatgggcgtcttttggtggtcgcctacgactctcccggggaaaatggaggatctgtctggctctgccggtgtgagtgcggagccgaggtcaaagtgaagtcgtcgaacctgcgaggcggctcgacacgttcgtgcggatgcctcgccagcgaatgggcttcagcacttggctcaaatagggaattcgtcaggaagcgtgcagccaaagtcaccgcgcacgggcacagccgtcgaggggtgaaaaccccggagtacagaacctggctaggcatgaaacgcaggtgctacgacgagaagtacaaggacttccctaactggggcggtcgcggtatcaaggtctgcgaacgttggaacgagtcgagattgacggcactcagttcaccagcattgcccaggcgatttttttggcgatgctgggagtggctgagagcagtaagatcaaggcctacaaccgttctgattcgccagaattcgcatcgattggtacaaaaactggtacacagtcacgtcttcagaatgtatagctatctgttggcatgcaaaggatcgagccgagactcagcaggattggtatcatcgcctacaactgactga

SEQ ID NO: 352009 - DNA, 798 bp, Pseudomonas aeruginosa
atgagggactcagtgaccgccgaaatttcgacgcaactatccaaggtgcttagtgttatcgagcaccatctggaaccgacgttgcttgccgtacatttgtacggctccgcagtggatggcggcctgaagccatacagtgatattgatttgctggttactgtgaccgcaaggcttgatgacacaacgcggcgagctttgttcaacgatcttttggaggtttcggctttcccaggcgagagtgagattctccgcgctatagaagtcaccattgtcgtgcacgaagacattatgccgtggcgttatccagccaagcgcgaactgcaatttggagaatggcagcgcaatgacattcttgcgggtatcttcgagccagccacgatcgacatcgatctggctatcttgctaacgaaagcgagagaacatagcgtggctttggtaggtccggcggcggaggaactctttgatccagttcctgaacaagatctaatcaaggcgctgaatgaaaccttgaagctatggaactcgcagcccgactgggccggcgatgagcgaaatgtagtgcttacgttgtcccgcatttggtacagcgcagcaactggtaaaatcgcgccgaaggatgtcgctgccaactgggcaatggaacatctacctgcccagcatcagtctgtcttgcttgaagctagacaggcttatcttgggcaagaggaagatcgctcggtcttgcgcgcagataagttggaagaatttattcacttcatgaaaagcgagatcaccaaggtgctcggcaatgatgtctaa

SEQ ID NO: 352010 - DNA, 2691 bp, Pseudomonas aeruginosa
atgctcgagcaatctctgcttgagctgactattgcaagcctgctgtcaagccagagtctggtcgaccagctgcgtgcagacttgctgtcgccgcaagccgccgagcggttcggtgagttcgacaagcgccacaaggcttacctgcaacgcctggcgcacgaaatcgaccagcgccaccatggccgctttcgcctgaacgacctcaccagcgcggcggcgcatgcatggccagcaacgctgttgcgaacacctgacatcaagcctctggatgccctgttcgacgaactgttcctgtgcaatggcgactacgtccactatcgtccggagcggctgcgggaatacgccagtctatgctcgaaactggaccccagtgtggtagtagcctggcacttagcaaagcagttcaaaaaatctgccgggcttcacgcggtcgatatctaccgtattgtgcaggcccagcaaccgttgttcagcccccctccgatcagcaataagccatttgccgaaggtcatgtccacctgggtggcattcatttcgacggcatcatcctgatgaaccaactagccggcgaaccaggtatggaggactttgccccactgcatcggctgacgcacgccttactgagtgaatggccgccccgcgaaggcgtcggcaacgcccagcagatacacatcctgaacctatgccgtcgtgccctgggcgaccagcatatgacgaatccagtgacaatcctcgactggtccagcctagcccatctacaggcttccgaagacgatatccgcaagccgaactggctcaagcgccagattgccctggcggtcaccctcggtgacctagacaaggcatggctctggctgctggtatggctctggactcagtaccagtctgacaccgcccccgccatgctgcggatgagtatcttctttctaatatctgcattgatgagtaagcggcgccaactgatcatggacggccagggcctgtcgcggttctccggcatatacggaaagtttgcctcggcgtcgggctcgaaatcacacaccccgaaaccaagaagtgcgtttgcacaaggcagcgtgcgaaaactgtttcaaggtgccgcagacgtcgccgaaatcaagatcagcgagcaggtgttcaaccccgacagcgttcgtggctgggccctcgcgatcaatcgccatcacggccaggacagtgtgccgcttctgaagcaggtcaatgcgaacgaagccgctcgcttcaaggcacaaatggagcgctggcatttctgcgtgcatttcctgcgccgcaccgaacacctgaaaaatcgcaatcaactctggctcgagggtgaaaatctttttcagaaactcacccaacagaccggctggtctgatcccacgtttctggatgggtatctaagcccgcattttcactttgaaccggacgcctgggttcgtggcctcgatgtcgccggtgacgaaaacaagacccgcaatgagatctacgcccccatgctacgttggcttcgttcaggcttgcagcccaacgtgcgcaaagttggtgtacacaatggctttcatttgagcattcacgccggtgaagactatgcccacccactgtcgggtatgcgccatatcgatgaaaccgttcgattctgcgaaatgcgccacggtgatcgcatcggtcacgccttggcactgggtgtatccccgcggacctggtgcgagaaccagggcgacatgttgttgccggtcgatgagcacttagacaacctggtatggctctggcacaacgcgacattactggcgccacgcctgccactggccaacaaggtcttgccacgcctagagcgtcgcattacacagttcgcagcccagatcccatggattggcacaaactacctaaatgcgttctatcccgatcagcacaagaaaactcctgccaccaccccaacggcccgctttatcagcccgcaaaccttgcacgatgcctggcgcctgaggcgcaactgcttccacatgctggaaggctaccgcagcaaccgtatgaaggacgccaaagtgctttctgcagttccagacctgacgctgctgtcaaccattgatttcgacagactcaatggtagccatgccgaccccacccccgagctgctctactggcgccgctcgacacacatcaagcatggcagcagcaagccactgaccgtgcgggtcagtgtgcgcccccatgcgacgactgattatctactaccccgccatgacgcccatctgcaactgctgcaggactacgaaaccgaagacgacctcgaactgatggaggcccttcaggactggttgatcgacgagtacgaccagcgcggtgtgatattcgagaccaaccccagctccaacgtatacatcgcgcggatacgccgctacgaggaccacccgattttccgctggaacccgcctgatgaaagcgtgctggaacaaggcgcacgacacaatcggttcgggctgcgtcgaggaccgatacgggtaactgtgaacaccgacgatcctggcgtgattccgaccaccttgcgcactgagtacgccctgttgctagaggccagctgtgcgttgggcatttcgcgcacgtgtgccgaagagtggctggagcggctacgggtgtatgccaacgatcagttccaccgcacacaccagcaggtattcagggatcgctag

SEQ ID NO: 352011 - DNA, 2616 bp, Pseudomonas aeruginosa
gtgttcaacacacgaagcgcagctggatcaatcatacgcctccccatcgaacagaaagagcaggccgctcaaaaggatgcgagcacgctgctggcgcgcgagatatatcaggatctagccactctgctggccgacagtctgaacaaccaaccggacagcgatgacgatgtcgacctgtatcgttctcacagcgcaatcctgattgatggcaagcgcggcgctggcaagagctcagtactggtcaacctgaagttatatctcgagcgagagcaaccggaactggaaaatcaagtccacatcctcaaaccggtcgatccaaccctactcgaagatactgatgaccttttcttgaacgttattgtcgcggccataattcgcgacaaatccattgctcgcgcgctcagctgtgctgaccacaaagcagaagcgttccatcatcagctccaggtattgggcaacacactggaaaacctgcagtcacagcgggataagtacggactagataaactgcgggcgttcatgggcagccatgacctgatgcagcaggttcatatcctattcaagaaagcgttggatctggtcggtaaaaaattgctggtattgccaattgatgatgtcgacacctcaatgaaccgcgctttcgaaaatctggaagtagtgaggcgataccttacctccccctttgcacaacctattatcagtggtgacctgtcgctttaccacgaagtaacttggcgggattttcactcgaagatcactaaagatagtagcgccaactccgaaagtgcggttaacaaggccaaagaattggcaacagagtaccaacgcaaggtaatgccgctacaactacgccgaaaaatgccatccaccagcagctacctcaaacgcaacgacatcgtgctgtgcaacggcagcacagattacttttcactgcatacattctggcgttggattgacgcactgctgaatgatcgaaccaattgtgccgaggagcataggctttgggtttcagtcgacactgttcgcgagctggtccaactcatattttctttcaagaacgagattcccaaactgcacgagtttctcgtcaacctcaaggccagcgcatggagtgaacatatcctacagcgtctgatatttatgcccgtcggcgccgccttacgcatcgagcagttttccgatgactaccagagggcacagaacctctctggaaaaagtcaacgagagaccgcacgcaatcgagcctatgctgatttcctaagcccacgacaagacgtagaggcaccggatctgacctattggcatgcaatgattcttgactgcaagcgagttttgttccgtcatctacgccatgagtacagcagaacggctgagtacttggccttggatgccgacctgcactttgcgcgcctgatgaaagaccccagcttgaaactggccgacttgttcgacatcatgctgttcaagccccagtttctatccaaacaaactgctgagtccttccctgcgagcaaacaacagtttgatggcaccgagctaattgaacgggcaccctacaattgggtgaaggagctaccgtttaatgaggattttccttatacgttgccagaggtcggcttcgccaccaaaaccagaagctcactcaccttcactgaagagactcaactgctcattgatctcatgcttcatcgaagcttctacagcgagaacaagaaagccagtctgatttattgcggcagattgtttgagatagtcatcgctagtctggtcagggatctggacccgcgagacatcacccatatcgtggctcggcctccgttctattccctgccagctatcgctgggacggagaccagtgaactagaaacagcgcccacggaaacacttattgaaacatattatgattctgccattgctgacctgactcgacgaatcaatgaatggcggcgcagcgagcagattgaccagcagttactgtctggctggctagtattcaacgtgatgaatcgctatttcagtcaagcctggcacttcaatcagccgttgaaagtcaaccaaaacccggccaaggaagatcactcgtacctcaccgatgtttccagacgcgcctatcgcagcctctggaatgcgttcgcaatgctagaaaaaggcgaaatttttggtatgccctacatcatcgctaacgtaaacgtcggcgaaggtgaaaacttcgagaacagcgacctctaccggcaaaatatttctccattcatgcatcgttctggcaatcgctccttcggaagagaaacccattcctacactcatgccctagcatcgcacccgctgaaagatcttattgaaagagctcaccaacacgtcagtgagatgccaagcaacaagttggacacttccaagacgcctttctatgccagtgaaggacgccaagtgaccgcaataatcaagaagcacttcaatatcaaagggcgaattgatgatgaaatcgaaagcctagtcgtcactaaaaaagatctatctgaaatattagaggaagggctgaaaaaagacctcaaaaatgaggtatttctcaagagcaaacacttttcctacctagtagaacatgtgactaaggataattga

SEQ ID NO: 352012 - DNA, 822 bp, Pseudomonas aeruginosa
gtgacgatagttggtgcaataaaagaagttctttccttagccgaacaccctttaacacacaaagaaatatatgaagcaatcaccaccaaagggctctattcattcggcgcaaaagatccaatttcaattgttcggaataaaatcagaaagcattgtatcgacctagatttccctagcgccagtccacgaaagatattttcaatagcgcatcagaacagcaaggattcctctgtacgctataaattatgggacggagttttaccttcagctcaaaccgacaccaccgtcaataaagatagaatttcagaggaattactatactcaacccacaaagaccacattacaagcataaaaaatcaactcctcgattgtataaagtcttcagacccagcattctttgaaagaatcgtggtagatctcttattgaaaatgggatacgggtggcatagctcgctagcgggtcaagtcacaggcggcaagggagatgaaggtatagacggagtcatttatgaagacaagcttgggctagaaaaaatctatatccaggccaaacgatacaagcaaacctctgtaagcccaggtgaaattagagattttattggggccatgtcagtaaaaggggcaagaaaaggagtttttttcacttcctccgacttcaccgcgcaagcgaagaaacatgctagccaagctcagggaatgagcattatgctcatagacggactattactttgcgattatttggtacaacatgaaatgggtatagaaaggatattcacatacccagtctatgaaatcgacagaaatttcttcaatgatgactaa

SEQ ID NO: 352013 - DNA, 2001 bp, Pseudomonas aeruginosa
atgtctagaagacaaaccgcagcaccctaccgatacgaattcgagaaggatggcgcttttggcgtctttaaaactaatggttctgtccctatagaatatttcatgacgtctttcaaggtggacgaactatcatttctttcatacgcaaaagacgtcaacaccgagcttaacttcgattaccttattcagcgcgacatcgacgaaacccgcgccatcgctgagattagtcagtatctagccgccaaagagggggcgatacagaaggatgtcgtttttcttccgcctctgctggttgctgtagtttcagttaatcaggacaattgcttggaagactattaccctgactcgacgtatcagaccgacagtgacgccgtgggggcgttgtacatccgagaatggccaggaatactcaaggtaactaattaccaggttaaccaagaacaacccagaatcttttcttgtggtgatggcgaccaccaagtatcagtcgctgtggacagtgccaaaattcaggtaaatctgacgagggatggggtaaaaggcgctcgcttggtagttattgatgggcagcataggctgtttgccctaaacactctacgagcacacaatcgcgccttaattgatggattaacgctaccaatctgcttagtctacccaccaaactccatcgaaaaaaacacgggggagcagccaaaggtgccagaagttttacggcacttgttcgtggatgtgaactctacggttgagcgagtaagtggccacttcctaaccttgctgtccgagcagacgctgggctctattatctgccgagagttttgcaaaacagttctagaccaaaaggcgagcgagggtttgggcctagttgaatggaacaccaagaatcataaagaatccatggagatatctcgagagcatacattaacgagcatcggcgtgctgaacagtgcttttgaagaaatatttaaaaccaaaaatggcgttaaactattagccgcaatccttggcatcgaccgacgctctagcgaattcgacttcggcctagatgaatatgacgaggaaaagagcgcacccgagtatttcccttggcgggatttcttatcagttcacagggaaagcctgatcgcactcgtgaatgaaaacatcaccccagccttaatcgacatgttctatggaacatcgtttttctccgaatactataatgcttttaagaattacttcactaccactgaagatgaaatcaaacgcgaccgacgcggagaccacggcgtcttctccaatgtcaaagaccatgtcctcttcaatgggatgttaggcaaagctgcaaacacgatgcatgccgaggtcagagcggacttgggtcgcatcatttccgagatcattcccgacttctcacggaaagccattttccagaaggccatgattgaagcgtggtctgtactctgcgcaaaatttatcgcaaacggcatcccgctttcacgcgcctcgcactacatgcaattatttgtagagcattcgttcacgccaaagtccgatctattcgatgatcgccatctttacctacaagataccatcttcagtggatcacgtattaaagttacgaaatcggcgaagcgtcaaattgtaaggctactattatcaaatgcggaaaacgcaatctgcgaagacaccaaagaaaaacaagtgctctcggacttagccaaagccgaagtcggcagctttatcaaccagatgagagaggataagcgcaaggtttttgaaaagtcctatcgaaccaacttcagcattcccgcaatagagcgagagaagttgtatgcggccgagctcgacaaaccacgagaaatgaaagatctaggcggtgactcgtcgaaaaccaccttcgaccagttgattgacgaacttatcatcaccaatctcactgactcatttgatgatttagcaaaaacgctgaagtcgagggactttatctactccaagagcgaagagtttgatgaggagctctga

SEQ ID NO: 352014 - DNA, 1269 bp, Pseudomonas aeruginosa
atgaggagctctgaggacatctatttctcgatattggacggtgacaccctcgatgaagatcaacgggcgttgctgtccgctgcggtgattgaatacggggcatttagtatcgtttcgcgttcagaacgcctgctgatggatgtatcccagcgcgtgcacacttcaacggaaatccgaccaacctgcattttggtatcaggtggtgctttgctagccactgcagaaaatttcctcgctctcgcctaccccaacgacaacgtggacaggcgcttttttaaatttgatctgaatgacgccagcatcgaagaaataacgcaactgtccgactctggttttttcagtgataatgagaacagagtacaataccgcctcaaactcgaaggaatacatccaattgtacgaaacctgattgacaccacgtgcactcaacatcacgagctcaccagcctgatcagtcagcttttaattggctatagttttttgccggattcgactttacggaaaaagagtggtgacagcgaccttaacggactacaattacaagagctcgatgcctttatcagccatcttaaaaatatcgcccacggcttcattagcattaagaatgaaattgatagcatcgtaaattattgcactacactattagccgtccgccccgccagcgccgccgacctgtctaacagccaccccagcgcaacacttcaaaatggcttcccctgtgcatataaggtgatgtcggtactccactatctgagctatgaacttgcaatgcaacgaaagctttataacaaagcattcatgcatatattcagatcgtatgaatgctactcttcgggcgccttatttttggataatgctcgaatcgctaaccatacgaccaaacatggcaccacacgggatgtttacattatcggaaaaaacgacaaggttcggggatttggtcaagtatttgactgcctcggcatttacttcaaattaacccgcgacaagaattaccaaatttgcaaatcttaccttaagctgagaaatcgtttccattacacccatggagacctgaaacccagcgaaagcctggtaagagatttctcccaagctgcgttgcgacagatactaaagctcgaaaaaataggcaagcaaaagacattccaatggaaagctgtctatagacaaaccaagcagcatttgatggcctctcctagcgaaatggtgcgggccgcggttgcccgtgagctgcaaaccgaccagctgcagatgttcatggcgctttaa

SEQ ID NO: 352015 - DNA, 1083 bp, Pseudomonas aeruginosa
atgagtacctacgtccactcctttccctgtgtcagagggatacaagccggaaggccctgctacatagccatgtgccctatgcgcctggtccccaaaatcttcagtttcaatgaagagaatgtacctgctgacctccgcgcgcagcgtacattaaatcttgcgcgcgtcccggaaattgctgcttatctcctagacaatcgagaagattacacgctgtccgcaatcactgcgtccattaacggttcggtgcggttcaatcctgcctccgatacagggttggagcaaagcgttggcacactgtccataccgatggatgctcagatactcattaacgatggtcaacatcggcgcgcagcaatcgagcaagcaatacgagaaaatcccgaattgggatatgacaacattccggttctgtttttcatcgacgaagggcttagtcgtagccagcaaatgttcgcggatctgaacaagcacgccgtgcgacctagcgattccatcagcacgctctatgatcacagagaccatatttccgacttagcccgttacctggcgaaaaacgttaatgtcttttcgcgaatgactgaactggagaagtccagcctttcgcctcgcagctcgaagctcttcactctgagtgcgatcaaaaatgcctcccgcgttttgttgaaaaaaggtaaaggcgatctcattgcgcagaatgagcgcgaattggctcgctccttttgggatgaaatttctcagcaaatgccggattggatccgagccaaaaacaaagagctgtcgacatccgaactacgagataactatatccatgcgcatggcgttatgttgcaagcgatggggttagtaggtgcggaactaattattcgtaaagaacctgagtggaaaaagattatcagccaacttcgtcatatcgactggtccagatccaaccctgaatgggaaggccgcgctatggtccatggtcgaatctccaaggccacaaccaatgttgcgctcactgctagcttgataaagaaaaagcttggcatatcactttcaactgttgaacgagagcttgaagataggttgcctaaacaatga

SEQ ID NO: 352016 - DNA, 126 bp, Pseudomonas aeruginosa
atgccgttgacccacatcgaggcgatgtacagcacggtgccgatggtggccagccagaagtgcgcgttgatcaggccgacgctgtgcatccgctcgcggccccagagtttcgggatcatgtggtag

SEQ ID NO: 352017 - DNA, 324 bp, Pseudomonas aeruginosa
atgctgctggtcttcggcctcaacctgctggccttcaccgctctctgcctggccatgaaccgccaccacaagaaccttctcggccacgagccgtcggcttcccgggtgcttctgctacgcggcgtggcgctgctcgacctgggcctggcgctggccttctcgatccaccggcagggcgtggagatcggcatcgtcttctggtcctgcctgctgatgctggcggccggcacgctggtcctgctgctcgcctggcggccacgctgggcattgccttgcgccgccggagtgccgttgctcggcggggtgctggcgctgctgcgctga

SEQ ID NO: 352018 - DNA, 318 bp, Pseudomonas aeruginosa
atggctctgctcgccgccgcgcccggcaaagaagtgccgcaggcatggctcgacgttcaagccgaacgacgccggcaggtcgaggccgagggctggacaccggagcacgacgacctctattgcgccgccgaacttccgcgagccgcagcggcatacatcctcaacggagccaacgacgaggcgccagctatctggccgttctcggcgaagtggtggaagccgagagacgcgcgatccaactacgtgcgtgccagcgccttgatcctggccgagatcgagcgcctggaccgcgccgcgcccggcaaggagggggtgtga

SEQ ID NO: 352019 - DNA, 630 bp, Pseudomonas aeruginosa
atgcctatcactgagcagcagttgctgcatgtcctcccgaacgccggccctcgagccggcgtttttgttggtgcgctgaaccgcgggatgacgcgcttcggtatcacttcgccggtgcgcgcggcggcgttcctggcgcagatcgggcacgagagcgcccagttgacccggctggtggagaacctcaactacagcgcccgcggcctggctgcgacctggccgagccggtacctcggcgccgacggccagcccaacgccctggcgcaacgcctggcgcgcaacccccgagccatcgccaacaacgcctacgcctcgcgcaacggcaatggcgacgaggcgtccggcgatggctggtgctaccgcgggcgcgggctgctgcagatcaccggccggtcgaactaccgcgccgccggcgccgggctgggccagccactggagcaggaacccgagcttctcgagcaaccggagtgggcggcgatctcggcggcctggtggtgggccagtcacggcttgaacgacctggccgaccgcggcgaattcgccgccatcactcggcgcatcaatggcggcacgaacggccaggcggagcgcctggcgctgtgggagcgggccaaggcggtgctgtcgtga

SEQ ID NO: 352020 - DNA, 312 bp, Pseudomonas aeruginosa
atgccgttactgatcggggtactactgcgggccatcggctggtcgctgattccgctgggttggaagctgctgcgcggcttggggttcaccgctgttgccttcgtcggcgtcaaggcggtgatggatcaggccaaggactacgtattcagcaacctgggtggcgtgcctgcgcagtggcttcaggtcctggggcttctgcaagtggacgtgtgcatcaacatcctgttctccgcgtacatcgcccgcgccgtgctgtgggggatggacaagtctggcggcaagtccggcatgcgctggaccgggccgaagtaa

SEQ ID NO: 352021 - DNA, 561 bp, Pseudomonas aeruginosa
atgaaccggatactcgacattctgattccccgcttcatcaccgagcgggtggcgctgatcgacgcaaacggccaactcgaaatcgcctgcgccctctccaacgtgcggccaaacgagcggttcgacgggatcgccaccatacgatccttcaacctggcgggcttcgccttgtttccgaagatggtggacggcccccacgcatggccagtgcaactccacccgagcaacaaggactcggcggatgcaatcaatctcccgccctgcccctggtgcgagggtcctccagtcgtgctggttgctcgcacgttctcacccttcggaacggtccgggaaatgacgacctacgggtgcgagggcctggacgtcgacgcctatgtgttctgccacgaatgcggctgcgaaggcccgaagtgcgaagacgtgatcttcaacgccgaggacttccgccgcgtggaacgcgaaggcgcccgcctctggtctgagcggaccagcaggaaccggcacctatacgactcgaacgcggccgatggccactgcgtctacccgaggagcgcccaatga

SEQ ID NO: 352022 - DNA, 723 bp, Pseudomonas aeruginosa
atgactgaagaggagcaggcgatagaggctagagctatcgccttcgccaaagcaaatagaacccgcatcgccagagaggtggcgtgcgttaggacatatcctggcgacgaccagccggtatcggtttttatggcgggttcccccggagctgggaaaaccgagctgtcgaaggcgttagttgcgtctatggagcggttcgggcctagggcacttcgcattgatccggatgactttcgggtgctgttccctgagtacacgggcgggaactcgcgcctcttccagcgaggggtgaactctatcgttgagcggctgcacgacttggtgcttgagcagcgccaatcgttcctcctagatggcacgctcgcgaacgagaacgtagcgcgccgaaacgttgagcgctcgatgaggcgtgggcggacgatccatgtggtctatgtttaccaaaagccggagttggcttggcagttcgttaaggcgagggaggtcaccgaaggccggaatatcccggttgaagagttcatccgccagctatttgcagcgaaggaaaccgtcttatcgctaaaaaggatgtttaacctaatgattaccatcgatttgattataaaaaatatcgatggttcaaaccgcgtggttgaggttgatgttgacgctcacaaaattgacgaactagtcaagcatgaatatgatgctaacgagcttgctcaaattttgatcgaggtatga

SEQ ID NO: 352023 - DNA, 1185 bp, Pseudomonas aeruginosa
atgagccagcacgaccagcatcccgacgccccggcccaggcctttgcgacccgggtcatccacgccgggcaggcccccgatccctcgaccggcgcgatcatgccgccgatctacgccaactccacctatatccaggaaagccccggggtacacaaggggctcgactacggccgctcgcacaacccgacccgctgggccctggagcgctgcgtggccgacctcgagggcggcacccaggccttcgccttcgcctccggcctggcggcgatctcctcggtgctggagctgctcgacgccggttcccacatcgtttccggcaatgacctctacggcggtaccttccgcctgttcgagcgggtccgccggcgcagcgccgggcatcgcttcagcttcgtcgacccgaccgacctgcaggccttcgaggccgcgctgaccccggaaacccgcatggtctgggtggaaaccccgagcaacccgctgctgcgcctcaccgacctgcgcgccatcgcccagctctgccgcgcccgcggcatcatcagcgtggccgacaacaccttcgccagcccctacatccagcgccccctggagctgggcttcgacgtggtggtgcactccaccaccaagtacctgaacggccattccgacgtgatcggcggcatcgccatcgtcggcgacaacccggacctgcgcgagcgcctgggcttcctgcagaactcggtgggcgccatctccgggccgttcgacgccttcctcaccctgcgcggggtgaagaccctggcgctgcgcatggagcgccattgcagtaacgccctggccctggcccagtggctggagcgccagccgcaagtggcgcgggtctactaccccggcctggcttcgcacccgcagcatgagctggcgaaacggcagatgcgtggcttcggcgggatgatctccctcgacctgcgttgcgacctggccggcgcccggcgcttcctggagaacgtgcggatcttctccctggcggaaagcctgggcggggtggaaagcctgatcgagcatccggcgatcatgacccacgccagcatcccggcggaaacccgcgccgacctgggcatcggtgactcgctgatccgcctgtcggtgggcgtcgaggcgctggaggacctgcaggccgacctggcgcaggcgctggcgaagatctga

SEQ ID NO: 352024 - DNA, 1491 bp, Pseudomonas aeruginosa
gtgttcgaactcagcgattggcaacggcgcgccgcgacacagcgcttcatcgaccaggccctgatcggcggccgccagcgtccagccgccagcggcgctaccttcgacgccatcgatccggcgagcaatcgcctgctggcgcgggtcgcggcctgcgatgcggccgacgtcgacgcggcagtggccgccgcccgccgcgccttcgacgaaggcccctgggcgcgtctcgccccggtcgagcgcaagcgcgtgctgctgcgcctggccgagctgatgctggcccatcgcgaagagctggcgctgctcgactcgctgaacatgggcaagccggtgatggacgcctggaacatcgatgtacccggcgccgcccacgtcttcgcctggtatgcggaaagcctcgacaagctctacgaccaggtcgcgccgaccgcccagcagaccctggccaccattacccgcgtgccgctgggggtgatcggcgcggtggtgccgtggaacttcccgctcgacatggccgcctggaagctcgccccggccctggccgccggcaactcggtggtgctcaagccggccgagcagtcgccgttctccgccctgcgcctggccgagctggccctggaggcgggggtgccggaaggcgtgctgaacgtggtgccgggcctcggcgagcaggccggcaaggccctcggcttgcacccggaggtggacgcactggtgttcaccggctccaccgaggtcggcaagtacttcatgcagtattccgcgcaatccaacctcaagcaggtctggctggagtgcggcggcaagagtccgaacctggtgttcgccgattgccgcgatcttgacctggcggcggaaaaggccgccttcggcattttcttcaaccagggcgaggtctgttcggcgaactcgcgcttgctggtggagcgttcgatccacgacgagttcgtcgagcgcctgctggccaaggcccgcgactggcagccgggcgatccgctggacccggccagccgcgccggcgccatcgtcgaccgccggcagaccgccgggattctcgccgccatcgagcgggcgcaaggcgagggcgcgaccctgctcggcggtggccgccagttgacgatcaacggttcggacaacttcatcgaaccgactctgttcggcgacgtacgcccggacatgcagctggcccgcgaggaaatcttcggtccggtgctggcgatcagcgccttcgactccgaggacgaggccatacgcctggccaacgacagccgctacggcctcgccgcctcgctgtggagcgacgacctgcaccgtgcacaccgggtggcgcggcgcttgaatgccggaacggtgtcggtgaataccgtggacgcgctggacgtcgcggtgcctttcggcggcggcaagcagtccggcttcggtcgcgacctgtcgctgcattccttcgacaagtacacccagttgaagacgacctggttccagttgcgctga

SEQ ID NO: 352025 - DNA, 972 bp, Pseudomonas aeruginosa
atggaagaagctgtaacccgtatcgtagagcggcaattccccgaactctccggcggctatcacctgccgcgctacgcccgcgtcacagctgtggcagacccgccggaagcgaacggcttgtgcgacgatttccgcccgcgcttcgccgtggatctggagatcctggacgtgaacggtgaggccgacccggcattgcctcccatgccgggcgtcccgctaccgctgccgaacggcggcggcgaacgcgggttcctggccttccccgaagaaggcaccatggtggtggtgggcttcgcctacggcctgccgaacaagccgttcattttgcagatcctgccccacggccagagcctgccgaagctgccgaaagaggatcagctgtggcagcacagcgaagccgttctgcagcgcgtagacggcgcgggaaactggacgaggcagacggatgggcggatccgcgatcaggccatggagcgcgagatagaggccctggagaacgtcgaacgctaccaaggtagccgagtcgagatcgaggaccacgcgaccgagcaagtgggcggcgtcaagcggatcgaggcgctgggtgcgctcaagctgttatccggcggatccgccagcctggccgccgtggacgatctacaccaggccaccgggcgcgacctgaacctggttgccggccagcgctacaacgccaccatcggcgccggcatggacgagcgtatccagggaatgcgccggagcgtggcggccgtcgcccagcacctgcaggcgccgaagacatggctggggtctgctgacgtgaatgtcctgcaggtattgtgcgacctgctggacctggtgcagcagatgaacacccagttggccggtcacgtccacccgccggcaggaccaccgaccaatgccggcgacttcaccactgacgcggcccaagcagccgccttggccgggaagctaaagccgatcaccggatag

SEQ ID NO: 352026 - DNA, 276 bp, Pseudomonas aeruginosa
atgagaaatccgggctatgacgacaccctggagatcatgggcagttgcccgcacctgcgcgactgccgccgcgaagtgttcgccaacatcatcttcctcagcccggaggaggtcgcgctgttcttcctctccaccagctacgtgacccgctacatcgagcaggaaggcggcgaagactacgccgaccgcttcatcgccgcggtgcgcgagatcgagagcgcgccgcaggtggcggtgaacttcgacatccacgccttcaccgcgctgaatcgctga

SEQ ID NO: 352027 - DNA, 951 bp, Pseudomonas aeruginosa
atggaagctgagaaaaccccggataacgtcgtgatcctcaaccacgaccccatcgtcgacccgttgcgccagggcctgctgctgctctgccggcagctcggccggccactcggcgacgccgaactggtggacggcatgccgctggagcacggtcgcctgccgttgcacctggtggcccgcgcgttgcgccgcgccgacatcaccgcccaggtcacccgccagccgttgcgccggatcgaccgctacctgctgccggccctgctgctgctcgacgacggccgcgccctggtgctggtgggcaacgacggcgagcacgccgaggtgctggtgccgcagagcgacggcggaagccagaggatgccgctggccgagctggaagcgctgtacagtggcacggcgatcttcgccaagtgtcgctaccgcccggacgggcgggtcggcgactacgccagcgccttgcccgagcactggttcttcggcccgctcaagcggctctggcgttcctacgccgaggtcaccgccgcggcgctggtggccaacgtcctggcggtcgcctcggcactgttcgccatgcaggtctacgaccgcgtggtgcccaacgcggcgttcgacaccctgtggatcctcgccagcggcgtggccctggcgatcgtcctcgacggggtcctgcggatcatgcgcggccacctgctcaacgtgctcggcaagcgcctcgacctgcaactctcgaccctgctgttctcccgcgtgctgagcacccgggtcgccgccaagccggcgtcgatgggcgccttcagtacccaggtgcgggagttcgagtcggtgcgcgagttcttcacctcgtccagcgcggcgctgatcagcgacctgccgttcgtggcgatcttcctgctgatcatcgccgtgatcggcggccatgtggtctgggtgccgctggtgcctgcgtgctga

SEQ ID NO: 352028 - DNA, 243 bp, Pseudomonas aeruginosa
atgccaggcgcggtcgtgacaggagacgaactgggtgatggcgccgtcgcgttcgatgaggaaatgcgcggaaaccgtcaggtggcggatctcctcgaaatagggatgttcgttcgggtccaggcgattctggaagaacgcctggaccttgccggtgccgaactgtcccggcggcaggctgatattgtggatgaccagcagcgacaccgcgtccccttgcggacgcaggttgaaattcggtga

SEQ ID NO: 352029 - DNA, 906 bp, Pseudomonas aeruginosa
atggatatcgtaataaactggatcatcacaaagctgaatactttatatgacggaatcaccccaactttatttatagcagtcctagccctagctgtggcaacaaagaactaccttagaaagtcaaatataatggttagcggaatgtttaccgttagccgggatgaagactgttctcaaaatttcataagtaaggttatgctggagaactgtaaagacaggccagtaataatctattcaatatacttaaatattggccttaattactacataagactagaggatttcaatgaaagcccgatcatattaaagccctacgaagtattagagagatcctacggccccattcttttttacactaacaatatctccctacttaaatgcggcccccttctactgaacaaggacataaaaaagcaaattgttctttctactaatcttggaaagtacactgttccagctcgacctaaaagatgggatgctgttaacgaaaaatttaaaaacaggttggtcgaagtggtccggcccgccagaatgtactacaaggaaagagcgattggtgaccgggtaaaatatattgtggatatagaggatggcgaaaaaagcaagatatttcttctaaaagacaacccggagtttcattttccgcctgaagagatagagcttggcagggagattttaaagagtagcaccaacttggaagaacattatgagtccatgaaggaacaaggaataattccaagctccgcaatagtgaaggttcttagaactgaaccgttagttgagaatggctaccgactgatctatagaaagcgcgtttttgaaccgagggtttttaatagcatggcaaaaatgtcatgggaaaagtttagagctaaggctgctaaatttttttcgaaagcaaaatag

SEQ ID NO: 352030 - DNA, 3240 bp, Pseudomonas aeruginosa
atggaagtacgttactgggagggggggcttcactcgtttgaggtggaggcgatcgaaaggatggcgaaggccttcgcacccaacgaggaggtggcgcagccaggtactcccaccgctaaagggaattctttcgcggtgctcaaacagctgaaaaagcccgacggagtatggccttggaaggggtatgcgggctttcgctttgccaattctcgtggctctgatggggagttcgatctcgtcattatcactcacagcatggtgctggtggtcgagctaaagcactggaatggcaagatcacttcgaacggcagcaagtggtatcaggacggtaaagagcgggatgcctctccggtcgaaagaactcggaggaagatgtacgagctcaagaagagaatgcaaagcatcaaggccagcttgccaaaaggaaaagaaccgtggttcgagttctgcgttgttctcagtggcaagtgcaccctggatctaccagacgcagaaataccgtacgtcatgcaactcgaagacttcctcggtctcgccgacgagaagcagttcaggcaacggtatcccaaagcccacaatgtccacttgaatgaccattttggcgacttcgacagactgctaaatgagggattcgtcaagccgaaggagctcgtggtcgacgactaccgtgcaatagcaccggcggtattcacccacccgaccaaggtctacagcgagttcgacgccgtgaacatccataataaggatgaccacgcgatgcttcggctatgggacttttcaaagctcgatagcacttctgccaggaccaaggagggaaggttcaagatcctctcgcgagagcgggagatccttgtctatcttaagcgcctcgaccaggacttggtgaatcgctgcgccagatttaaaggaaatgtcagccccgactccatcaccgagcagcattccgaattgtttgagatgccggatgggcatttccgtctcaacgaattcataaacaggttcgtggtgcgaatgagcggtggggagcgcctccagctcctcaagattctactggcccaatttgcaggcctgcacggccatagcgtcgcgcatagagatgtcggcgatcatagcgtttggttctcgccagcctccggcattgcactttccaatttcatcagtgcctaccaccaacctattggtacagtaggcgacctgcgtagcctactgagcatcggcgccatttcactgcccgaggaccagggcaacgcaaatctggacacgacgccattcaaacgagatgtgttcgcactcgggatactgtgctgccatttgatccaagctaagccccttccactcaagctcgatgaaacctacatacaaggcgtactgcgcgagacagagggcgccacggagtggttctcggaggtgattcggaaagccatacagcgtaacccggcagatcgctttgaaaacgcaatcgcattcctgcaggcattgagcgaagccactccagacaactcggcaagcttcgagtttgataagcgacagctcgatcgttttgctacagatgtgcggttagcctcggcgtaccgagaagacgaagagcccctggtggactcggcagagaagcttctgtaccgatcgggtccatggatggtgaagtcttggccatcgatcaatgcacgtgagccgcaagataggcagggccccatgctgatgtctttcttcgagacacttgagcgcttgaaggtcagtagctttcatttcatgccgaaacttgagcacttcggatacgatcgcagcggcaaccctttcttggcccaagagcatgtagagggtgtccactggagcgacttgcacgatctccccgtcccccaagccctaatcgtctcacgtcgattaattgaggcggttgagggtctccatgagcagcaactcagtcacggggatttgcaccccgaaaacattatggtcactttgggtagtgactacgagtcaactcatcttcacctgctggactaccctgatttctcgccgactggtgaacgcccctataacaacaggtacagccctatagttgaagacagcactccagctgaaagggacaatttcgcagttatgcggatggtcctcgaactgcttgggatggactgggacacctcccgtgaaggagacaaccaagcccttagggacgctatcgacctagagaagaggagcggttcaggttacctctccctcgaacggttcaacgatgctctggaagttgctttccagtccaagccgaccatcgaaacgatcaatgtacccatcagaggcagtgccaccttcgacatccttccagacaacgaaaaaatttacgtcgttgtccgacctgacccgaataccccaaccaaagcgctcgaagtccttttcgccggaattggtggtcagttcttggcgtgcttcgacccagaaacaaaggtattcacaagagctttcagaccgcatcaggagcagagagtcagcctattctttgtccgaaatgccaaccaccatctgaacgtgcgcttcaccgtgtcgtctgggggggcgagcaatctggcgtccctaggaagcaccggcaacctcgcggccctgtcgagatacctcggacaggacgaagggtttatagcgttagctgcaaaaatccttgaagcagaagtccgaaagcaagccgcattagcggaaagcgatgccgcggaggaatcgatcaccggcgaagacgccgagaatggactagctgtcgatgaccccaaacttgaaggcgttcctgtccaaagcttcccggtaggacagatttggaaaaccatcacatcaacggagcttgaggcgcaaccgtcgttcagggttgcagcagagccgcggttccatcgagacaatctgggacttctcattccttacatgatggagtcgaaggcgcttgaaggcttcgaggctgacgacagcattcgtctgatcctaagggatggggagaaggacatcgatgttggcgaaatcgacttggccaaaagcctccgcgatgcggtctacatcccggcctcgagcaagtcacgacgcgtaaaagctgactcggtgctgtatcttcagagtcagcagaacaaaacgtctatggcccgccgcaaaagtgcaatggatcggatcatcaaccgacaatctgtccagccagatctattggactacttcgacgaaaagtgcaagctagcccggatttctcatgaccgcataaacaaaaacggctga

SEQ ID NO: 352031 - DNA, 291 bp, Pseudomonas aeruginosa
atgaatggcttggaaaaacacccaacgctgactgctgtgattcaaacggatgatgggcaggagcaaaggattttggtgaaagctattgttctttctgaagataaccacgcttatgcactggtcgatgagagtggtgagttgcgtcctgcaaaagcagagatcaaagaaaataatgcgcttaacatcctgttcttcaacgctgtctggatcgaaggcgatcgagtgtccaccctggacatcatcacgaaagagaagaaacttcatatcggcaagctgatcagccttagctga

SEQ ID NO: 352032 - DNA, 636 bp, Pseudomonas aeruginosa
atgcatcaggtgctcccagcggaaccaaatctggcgttcggtctgttcgtcaagttgccgccagcgaccgcggcgcgggtggatctccaggatcaagcgcttggtggcggtgtcctccggcgacagaccgaaaaagctctggatcatcgttgtggtggctcccagcttcagtgcgcgttcgatctgcaggtcttcctgcgcgctgcgctcggctgtggccaggatcttctccatgacgtcgatgttcactctgacgtctacccaagaaaccggggtattggtcaggatgctcatgacagcaggctgttggagctgagccagaatctccggccgcagccccatctcggcacaacgcctgagctggccgttgcgcaggtggttgagcacttgagtcaggaccgcttcattgatcaacgacttcgacatgtcgatctctccccaaatcgtgcgaaatcactggtcggtagctgcttgctcgaaggtggccggcggcagctcaaggtcaaccaggcgtcgggcaagacgaatgatccggaacagtttcaccagggcttcgtcattgagacggcctgcctggttggatggctgatcgcttgtggtgggttggcccagcagcaactgagcgaggccagctga

SEQ ID NO: 352033 - DNA, 258 bp, Pseudomonas aeruginosa
atgaaggcgtcccagacctatcagtgcatcgtcaagttcgatggcgccggcttctggaccaataccattcagaagcagcgtgcgacctgcacctggagcgacaaggttgcagcctcccgccttgccgaacggctgttcggcgaggacaacgcctacatcacccgtatgccggcacaggcaggcgaccacgaaaagcgcatcgagagtcgctgggaactgtcctgcaaagatcccaaggaggtagcgcgcgatgcctga

SEQ ID NO: 352034 - DNA, 1305 bp, Pseudomonas aeruginosa
atgctaccagaaaaactccacttttcacccctctctcgccgcctcgtcgaggcctctttcaccggtggtcacatcacctcggatgcgggcttgttgctgctgcgcgaggtcgaccggcaacatggcttgacccgccgcctggccaaaatcgttcccgatcggcgtgatcctgggcgtgtccagcatggactgcagacactgctcgcccagcgtatctatgcactggccgccggctacgaggatctcaacgatcatgacggcctgcgccatgactacgcgctgcagactgcggtcaaccgcctgcaaccgctggccggcaaatccactctggggcgcctggaacagcaagccgatcgcgaaacggtggtgcaagcccatcgcctgctgtgggagcacttcatcgcccagcatgaccaggcgccggctgagatcgtgctcgacttcgatgcgaccgatgtgccggtgcatggagatcaggaagggcgcttcttccatggctattacgaccattactgcttcctgccgctctatgtgttctgtggtcgccatctgctggtgagctatttgcgcccgagcaacatcgatggcgcccgacacagttgggccatcctggcactgctggtcaagttcattcgccgcttctggccagagacccgcatcgtgttccgcggtgacggcggtttttgccgacatcgcatgctcgactggtgtgaccgcaagcaggtggattatgtggtgggtctggcccgcaacacccgcctgcagcggatggcggcgccggccatgcaagcggtcgccgaggcctaccaagaaaccgggcagaagatgtccggcgtgtatcgcttcctctatcaggccggtagttggcgtaggcgccgcctggtcgtgtcgcgcctggaacatggcgagcagggtgccaatccacgcttcatcgtcgtgtcccgctttgccgaggatgctgcccagcagtactacgaagactactgcggccgtggcgacatggagaatcggatcaaggaccaacagttggatctgttcgccgaccgcacctccagcccacgctggtggaccaaccagtggcggctgatgctgtcggcctttgcctatgtgctgttcgaacggctacgcgatcatctccagggcaccgcattggcgcgcatgagcatccataacctgcgcttgaaactgctcaagatcggtgcggtgatcattcgcaacagccggcgcatccgcgtgctgatcagcgaggcctatccgcatcaggaactctttgcggggctggttgcccgcctcaagccgacctga

SEQ ID NO: 352035 - DNA, 708 bp, Pseudomonas aeruginosa
atgactcaactcaatccgtttattcgcggctatgagagtttccgcatcgagcgaaacctgcagatcactgacgaaggcgacaatctaccgtactaccgcgcactgcatgaaacccagcagcacctcccagacgaatattttcagtgcgagctgtgctacttcaatggcgatttcgccgtggtaacccaagacttagacgatgaaagagttgaaaaatgccctcaccaaggaatagtgagaaacgtactttacagcatctacggtgagcaggacggcagaaaaaagcttatcggagatcaatactcactgaccgaagccgagagtgtcgttcgatacctttcgttcggcggcggttataaccgctgctgggagatcagaaaaacacatctacccatcagggcgtggaatagcctctacgaaaggttctcgaccaagatgccaatccgcttgccctcggtgttggtatcgctcttctggtgtaacgagcacggtgccgtgggctttcgcttgcacaacaccccttggacggatgagtgtctggagatcctggatatgaccgcagccgctcttcgacaagaacagcttgacttcggcctcgacgaacacctggtcgatctgcttcacctcgcgggacaagcagacattcggctcctggtacttgatccattcgcgcccacgctcaagggcctgccgctttatgacgattga

SEQ ID NO: 352036 - DNA, 636 bp, Pseudomonas aeruginosa
atgcatcaggtgctcccagcggaaccaaatctggcgctcgatctgttcatcgagctgccgccagcgaccgcggcgcgggtggatctccaggatcaagcgcttggtggcggtgtcctccggcgacagaccgaaaaagctctgaatcatcgttgtggtggctcccagcttcagtgcgcgttcgatctgcagctcttcctgcgcgctgcgctcggctgtggccaggatcttctccatgacgtcgatgttcactctgacgtctacccaggaaaccggggtattggtcaggatgctcatgacagcaggctgttggagctgagccagaatctccggccgcagccccatctcggcacaacgcctgagctggccgttgcgcaggtggttgagcacttgagtcaggaccgcttcattgatcaacgacttcgacatgtcgatctctccccaaatcgtgcgaaatcactggtcggtagctgcttgctcgaaggcggtcggcggcagctcaaggtcaaccaggcgtcgggcaagacgaatgatccggaacagtttcaccagggcttcgtcattgagacggcctgcctggctggatggctgatcgcttgtggtgggttggcccagcagcaactgagcgaggccagctga

SEQ ID NO: 352037 - DNA, 198 bp, Pseudomonas aeruginosa
atgtgcgactcaatcgtgtatgcccctatggacgaactcgaattcgagcggctgctagggctggcaaccctattcaacgacaacgatgaatggcctatcgactttacggagctgcaggaactgagcgagctgctcggcaagctcaaaagttgcgtcgacgtagcgatagacaacgcccccgagggggccaagagctga

SEQ ID NO: 352038 - DNA, 303 bp, Pseudomonas aeruginosa
atggagttgctggacatcgcgatgatcctcaccgaggaaatcaacgccggaatcgaacaagacagtccagaattcatcagcctcgccattgtgtggtctctcatccagagctggttgaaagacaacctctatcaaccaaacaggaaaggacaggccaagcccaccaccctttacctggccagcgtcagcgctcacctcccctcgcctgcggctcacccgccacagagtcccgccctggagattgagcctgcgcagcagcaactcctcaacctggttcagtcggaaggcgatacgacaccatga

SEQ ID NO: 352039 - DNA, 303 bp, Pseudomonas aeruginosa
atggagttgctggacatcgcgatgatcctcaccgaggaagtcaacgccggagtcgaacaagacagtccagagttcatcagcctcgccatcgtttggtctctcatccagagctggttgaaagacagcctctaccaaccaaacaggaaagagcaggccaagcccgccaccctttacctggccaacgtcagcgctcacctcccctcgcctacggctcacccgccacagagcccccgcttggagattgagtctgcgcagcagcaactcctcaacctggttcagtccgaaggcgatacgacaccatga

SEQ ID NO: 352040 - DNA, 147 bp, Pseudomonas aeruginosa
gtggacaacagaaacgaaaccctggtcgcgctactggtcatcgcgctgatcgccctcggcgttttccggatagtcggggatatgcagaacctctacgagaagaccgagttgaaaggacaggagttgagcagatggagcaagcaatga

SEQ ID NO: 352041 - DNA, 765 bp, Pseudomonas aeruginosa
atgaacccacagaagcattccgcgagcgtcgccgaagagcagatgctggcgcatttccgcgcccacgcgccgcagcagccggcgccggcgctggaccaggcgatcctcgccgccgcgcgacgccaggcggcgcatgtcgaacccgcccggtcctggtggcggcgctggctggaagcctcccgcaggccgcgttggcaggcggccttcgccagcctgctgggcgtggcgctggtgctggggctggtcagccacaacgtgctggacgacgccgagcgccaggcccggcccgaagtggcgttcagcgatgtgcccctgcgcgacggagtcgccggggccgctgcggcgaagcgggccatgcgcgcgccggcggcgccggctccgctgtccagcgagatgtcggagtccccggccttgctggccagctacgcatcgtccggggaggcgccgcaactgatggccgaggccgcgccgccggctccggctgccctggccgaccgaccgccggcccaggccgcgcagcaggcgaaggtccaggcggagctggctggcgacttcgtcgcccaggccaggggcaaggcggttgcggtgaagccggaggtgctcgacgaggcgctcggggcggtccttgccctgcgtgagcagggcaagacggagcaggccgcgacccagttggccgagctgcagaaacgtttccccggagagaacctggtggaacgactggaacgcctcgcgacgatagccgcgagcgccaagaaacggccgtga

SEQ ID NO: 352042 - DNA, 636 bp, Pseudomonas aeruginosa
atgagcctgctctcggtcgcctttgacacaggacaggagtcgaccagcggcatgcatgcctccaccagcgccacgacggccgccggcagcgacgaaacgctgctggcgcgttaccgcaagggcgacagcgcggccttcgaggtgctctaccagcgccatcggcaaggtctctaccgttttctctgcggcctggccggacagaccgaactggccgacgagatctaccaggaaacctggctcagcctgatccgcagcgagagccagccgcagggccgggcgagcttccgcacctggctctaccagatcgcccgcaaccgcctgatcgatcattggcgcaagcatggccagcgccagccgttgcaggacagctacgacgaacagttgcacgcgcaacccgaccagggcgccggccccgagcagcagctcagcctgagccgcgacggcgagcgcttgcagagcgcgctggagaccctgcccgaggaacagcgcgaggtattcctgatgcgcgcccacggagaactggaactggccgagatcgccacgctcacccagtcgccgctggagacggtgaagagccgtttccgctacgcggtgcagaagctgcgccggctgctggccgaggaggtggcggtatga

SEQ ID NO: 352043 - DNA, 1371 bp, Pseudomonas aeruginosa
ttgaacgacgaccagaccccggcgcccctgcccgtaccacgtccgtcaccctgtcccggcctgctgcgtatcgtccaggcgctggacggcggcatctgccgcatcaagctcgatgccggtcgcctggacgccgcccaggcacgcgccgtggcggccgcggcgcgggattgcgccagcggcgtgatcgaggcgaccaaccgttccaacctgcaattgcgtggcgtccgccgcggcgaggaagagcggctcgtccgccgcctgctggacgccggcctcggtccccggcatggggccctggccggcgccgacgacgtgcgcaacctgatgctcagcccggccgccgggctcgatccgcacctgtcgctggacgtgcgcccgctggccgctcggctgttgctgcggctccaggcggacagccgctaccacgcgctgtcggccaagttcgccatccagctggacggcggcgaagacctggcgatgctcgaacatccccatgacatctggctctcgccgatgcccgcggcgccgaccgcgacgctggtcttcggactcgccggctgcccggcccgcgaccgccccctggcggcgttgccggcggagcggggcgagtccctggtgctggcgctgctcgacctgttcctcgaacgcgcccagccgcaacagacgcggatgcgccacctgttgcaggagctggccggagaatccttgctggaggccttgcaggcgcgcctggatttccctctgcggcgtgacgagcgggtggcggcctggcggcgtccgccggggcgtgcgtggagtcatctcggcgtccagccgcaacgccagccgggcctggcgatggtcggcgcggcggcgccgctcggccggctcgacagcgcttgcctggaaggcctggccgagctggtcgagcgccatggcgacggcagcctgcgcctgaccccctggcaaggcgtgctcctgccgaacctggcgcaggccgaggcccaccaggcgctgctcggcctgcgcggactcggcctgctgaccgagcccgacgcgccgttggcgcggctgatcgcctgcagcggttccagcgcctgcgccaggggcttggccgacaccaagggcgacgccttgcgcctggccgaacgcctcggcccgcgcagcgacctgccgcaactgcacctgtgcggctgcgaacggtcctgcgccgctgcccaccgcgcgccgctcaccctgctggcgcgcagcggcgggttctacgacctgtaccggcgcgacccatgccaccccggattcggccagttgctggccagccgcctgactttcgccacggccgccgattacctggcggccctgccttcccagcccacttccggaaaacccgcatga

SEQ ID NO: 352044 - DNA, 627 bp, Pseudomonas aeruginosa
atgattgactacatccgcgatggccaggcgatctatcgccagtcgttcgccaccatccgcgccgaagcgaacctcgccggcatcccggccgacctggaaaagctcgcggtcagggtgatccacgcctgcggcatggtcgacgtggtcgacgacctgcgcttctcgcccggcgccggcgccgccggccgcgccgcgctggccgccggcgcggcgatcctctgcgacgcgcggatggtcgccgaaggcgtgacccgctcgcggctgcccgccgccaaccgggtgatctgtaccctcaacgaagcggacgtgccggcgctcgccacggaactcggcaatacccgctcggcggtggccctggagcactggcgcgagcacctggagggcagcgtggtggtgatcggcaacgcgccgaccgcgctgttctacctgctggaaatgctcgacgccggcgcgccgaaaccggcgctgatcctgggcttcccggtcggcttcgtcggcgccgcggaatccaaggagatgctcgccgccgatagccgcggggtgccctacgtgatcgtccgcggtcgccgtggcggcagcgccatggccgccgcggcggtgaacgccctggccacggagcgcgaatga

SEQ ID NO: 352045 - DNA, 753 bp, Pseudomonas aeruginosa
atgatgagtgtcgtgaagggccgcctgctgggcctgggcgtcgggcccggcgatcccgaactgatcaccctcaaggccctgcgcctgctgcgcgcggcgccggtggtcggctatttcgtggccaagggcaagaagggcaacgccttcggcatcatcgaggcgcacctggaccaggcccaggtgcgcctgccgctggtctatccggtgaccaccgagaagctggaaccgccgctgtgctacgagaccatcatcagcgatttctacgacaccgccgccgaacagctggccgcgcacctggacgccggccgcgacgtggcggtgatctgcgagggcgacccgttcttctacggttcctacatgtacctccacgaccgcctggcgacgcgctacgaaagcgaagtggtgcctggcgtttgctcgatgctcggcggcgcggcggtgctcggtgcgccgctggtgtaccgcaaccagagcctctcggtgctctccggagtgctgcccgaggaggagttgcgccggcgcctggcggatgccgacgcggcggtggtgatgaagctcggccgcaatttcgacaaggtccgccgcgtgctggtcgagcttggcctcgagcgccgcgcgctgtacgtcgagcgggcgaccatggccaaccagcggatcgtgccgttggaacgggtggagccgatggcctcgccgtacttctcgctgatcgtcgtccccggcgacaagtggcagggaggggccggcggtgagtga

SEQ ID NO: 352046 - DNA, 1680 bp, Pseudomonas aeruginosa
gtgagtgacgcccagcaggttccggccatcgtcatcctcggccagggcgcgctggataccgcgcggcgggtccaggcgcgctatcccggggcgctggtccacgggctcgccgggcgggtcgaggccgaccgttcctatacggacttcggcgacaccctgcgcgaactgtattgcgccgaccgcccgatcgtcgccctgtgcgccgccggcatcgtcattcgcagcctggcgccgttgttgcaacgcaagggagcggagccgccggtgctggccctggccgaggacggcagcgcggtggtgccgctgctcggcgggctggccggggtcaaccggctggcgcgggaaatcggcgaggtgctggccgtggcgccggcgatcaccaccagcggcgagctgcgcttcggcacctgcgtgctcaacccgcccgccggttatgtcctggccgacctggagcagggcaagcgcttcgttgccgatttgctcggtggccagccggtgcgcgtcgagggtgccgccgactggctcgacgcggcccgtttgccgcgcgacccggaggcagcgctggcgattcacgtgacgccctcggcgcgtgcgccgcgggccgaggaactgctgatccatccgcgctgcgtgctggcggcgctcgaacctgccgacgcggcggcggacgcggtgcgccaggcgctggtcgatgccggcctggccgcggcggcgctcggcggcttgctggccgacagcgcgcggatggccgatccgcgcctgcaggccgccgccgatgcgctcggcgtaccgctgcgcttcctgccgcagaccgatcccgctgcgcgcctgcgccaggccttgcccgccgccgagcaggtcggcgaccggctggcggtggccgccgcgcccctggcgatggaccgcatcggccagcgtcgcggccgactcacggtgatcggcctggggcccggctgcgccgagctgatggtgcctgcggcgcggcgggcgctggacgaggccgaggacatcctcggctaccagacctacgtcgacatggccggacccttccgcgccggacaggtgctgcatggcagcgacaaccgcgaggaattgcagcgcgcccggcatgccttcgaactggcggcgaccggcagggcggtggtgttggtatcgtccggcgaccccggcgtgttcgccatggccgccgcggtgctggaagccctgcatggcgctggcgagccggcctgggacgcggtcgagctgcggatcttccctggcgtctcggcggccctggccaccgcggccagggcgggggcgcctctgggccacgatttctgcctgctgtcgctgtccgacaacctcaagccctgggaggtgatcgagcggcgcctggacctggccggcgccgccgacctggcgatggctttctacaatccgatctcgcgggcgcggccctggcaactgggacgggcgctggagatcgtcgcccgccatcgttcgccgcagaccctggtggtgctcggtcgcgacatcgggcggcccggtgagcgcctgctgcgcaccaccctgggcgagctgcgtgcggagcaggtggacatgcgcaccctggtgatcatcggctcgtccaccacctgcagcttcccgcgtgccgacggcgaagcctgggtctacacgccgcgctggtacccatcggaatag

SEQ ID NO: 352047 - DNA, 345 bp, Pseudomonas aeruginosa; identical to SEQ ID NO: 321065

SEQ ID NO: 352048 - DNA, 810 bp, Pseudomonas aeruginosa
atgccgggcaaagcgactctcttcgccaccctgctggcctgcgccgcgctggctggctgcgccgaccacaagctcagcgaacagtcgctggccaaggcgcagagcgagttcgaccaggtcaaggaagattccgacgtgctccgcgcggcgcccaaggatgtgattcgcgccggcgaatcgctggcccgcgccgaacgcctgtccagctactggggcagcagcagcgacgtgatccagtatgcctacctgagccagcgctacagcgagatcgctcgccagcacgccttgctcaacctcaaccaggagcgcctgacccgcctgcaactggagcgcgagcgcctgcaactggccctgcgcgaagccaagctgctcagcgtgcaggagcagggccagcgcctgagcgaggagatcgccagtctcagcaccgaggaaaccgagcgtggcctggtgctcacccttggcgacgtgctgttcgacttcaaccgcgccgaactcaagccggcggccaaccgcaccgcgctgaagctggtgcagttcctccagctcaatccgcggcgggtgatccgcatcgaaggctataccgacagcgtcggcgacaggcaggccaacctcgacctgtcgcgcgagcgcgcccaggcggtggccgacgtgctcgccgatctcggcgtggatcccgcgcgcatgcaggtggtcggctacggcgaagccttcccggtcaccgacaacgcctccaaccgggggcgggcgcagaaccgccgggtggagatcgtcttctccaacgacaagggccagctcagcgcgccgcgctga

SEQ ID NO: 352049 - DNA, 1017 bp, Pseudomonas aeruginosa
  misc_feature (5)..(14): n is a, c, g, or t
atgcnnnnnnnnnntgactatgctggaagtgagaagaagtgcaatgaccttgagtcagaagcaaagaacgaccataaggaaattgaaaaaattagtctagaggtcggagccatagaagcggcgctctcgaatgaaacggtcggggcaaaggagttcaatgacatcctgcatcgcttcattggccgctctgagctttgcctgaacttcaatcagaagaagaaaggctatgagatcatcagaaacggggttggtgagcacgatgggaatttgagcgaaggtgagaagactgcgattgcatttgtctatttcatcacgaagctcaaagaaaatggaaataacatcaaggatacgatcgtcgtcgttgacgatccggtctcaagctttgattctaatcacttgtttcacgcctactcgtttttgagaacgcaatgcactgaagccaagcaactttttgtgctgactcacaacttcacttactttaagctagtgagagactggttcactggcaccaataggaatcgagtcaaaaaaggcaacgccgagaattgcttcttttatcgcctggatgcgccacctggctcccctcgtcactccctacttgtggatgccgacgactcactcaagaactacggttccgagtaccactatatcttcaagaagctttacgaatatagggcgcacacgacactcaatcgagatgaggcgttcttgaccgccaacctcgcccgaaagcttgttgaatcgttttttaccttcaaatatccaaggcggcgaagcgacattagtcaattgatggaggctggcctaaaagattgcaccatcacgacaccagagcttaaagaaaaaatctaccgctttatcaataagtattcacatagcgacgttattgagataacagaggaatccgcagaaaacttggcaggcgaaagccacagcgtcatcgggaacatcttccagtggctggaagaggtggacaagaaacattacgacgagatgattcaggttgcgacggcctga

SEQ ID NO: 352050 - DNA, 231 bp, Pseudomonas aeruginosa
atgtacctcaagggcgacaacatcaagtccgggcgcggcgaccagagcgagtgggagcgtgacatcgccctagcctatgtgatcccggacggtaccttcaaagggctgggcttcacctggaagaacgcttcgttccgcaccggtctgccggtgtccggctcgggcactgcgacccagcgcgaccaggacgagaaccgcctgatcgtcagctacaccctgccgctgctgtaa

SEQ ID NO: 352051 - DNA, 360 bp, Pseudomonas aeruginosa
ttgaaacgcaccagctatggtggtctgggcgcgcgcaaattggtcatcaatcgcgcgggtttgagacagaatcgcctcgaagacttgcttggaagtcagtttgccctgttcgccaagcttccggaggtctccaaccgcaaccccgagaccgtttgcgacggcctgggccaagcccggagcctgctcgagtaccgagttcagctcctgacctcggagcactcccgaggcgaaggcctggccgagttgcaccagcgcaccttccgcggcggcagcggaaacaccactggccgacatagccttgctgatgttctgggtaacctggacaacttgctgttgatttaccccgaggtcgccagttga

SEQ ID NO: 352052 - DNA, 240 bp, Pseudomonas aeruginosa
atgatcgactggagcaaggtaaaaaccgctgaacagcaggcgcaagaacgctggcaggctgagtacgatgccgcagccgtcgcgcgggcaaatgcctaccgcctggagagtgacccgctcaagaccgaggccgagttcgacgctatcaaggccggcgtggaaccggactacagcgcctgggtcgccaaggtcgaggagatcaaggccaggtatccgctgccggagacgggcggcgcgtag

SEQ ID NO: 352053 - DNA, 303 bp, Pseudomonas aeruginosa
atgatcatcactctttctccgtatttgccgctccccggcagcaatgaacacctgtcactgagcagagatggcgatgtgctcatcgtgaatggccaggcgttcgacttcacaccgctctcggagggcggagagttgccggccgaggctatcgggtcggagtggttcgctggtcctgtactgcgacgtgccggccagttggagctgatcctgcggttcccgctggctgatgatgccagtgccgccgctcgtttccctgagccgttgctgatcgataccgatggacctgtggagttaccgcgatga

SEQ ID NO: 352054 - DNA, 408 bp, Pseudomonas aeruginosa
atgagcctacgcgccgtcaacctcgcaaaaatccacatcgccaaggcccagctgggcatggacgatgacacctatcgcgcattgctcgctcgcgtcgcgggcgtgcgctcggccaaggacctagggccgcgccagattgaccaggtactggtcgaactccagcgtctgggctggaaaccgaagagcaaccggcagggccgggcgacgccaaaagtgccgcaaaaccggcaaaccgtgctgcgcaaaatcaccgcgctcctggccagcgcccatcgcccctggagctacgccgaccatatggcccggcgcatgttccaggtcgagcgggtcgagtggctggacgacagccagctctaccggctgatgcaggcgcttatcatcgacaggagccgccatgagcaggtctga

SEQ ID NO: 352055 - DNA, 618 bp, Pseudomonas aeruginosa
gtggagtggacggcgccgcgtcggcaccaaggctatcgagtaccacgtttcggccctgccgaaggaaacccgcgccgcgctgctgaacgccgccctgggcgaggtggccaccaaggcggtccgccaggagacgcagctggccctggtcgaaaccaaccgccagcagctggtcgccgatgcccggcagggggtgctgcacgccctggacctgatgatggcccgcaccggctacagccggaagcgctccatcaccctgatgctggacatggcgcgcctcggccaggtcgagccgcagctgctcgcgatgctcaagatggcccgcgatcctcgcggccgcccgagcgcggatggcctgccgagcgtgcgcagcctggagcgtttcctggaccaggccgagcgcggcgccctggtgccgaaggtccgccgcccggacatgagcgttcccgactgggcgccggccttcatgacgatctaccaggggccggagaagcgcagcgcccgcgctgcccatgcactgctggagaagcactggcaggggcaaatgcccagcctggaccaggtctatgcgttcctgcgcaaggtcggcaacgtcagccgcgaggtcgggcgcatgggtga

SEQ ID NO: 352056 - DNA, 423 bp, Pseudomonas aeruginosa
atgcctgatcccgcatccacctcggccggcagcgccgcgctgctgaaaatgtttggcatccatatcagcgcgggcgccctggccgccgccctgggcttcctggtcctgtggcccaggaccatgaaagaggggtttgcccggctgttctgcaccatcgtcgcgtccagcgtcttcggcccgatcctggtcgtttacctgcactccaaccgccccgagctgttcgagtccgcccaggtggtggccgggctctaccagttagagccggcagtcggcctgctgttcgtttccgctccgctcctggtgattgccggtctgcccgcctggtggctgatcggggcggccctgcgcctgtttgagcgggacggcgattcatggctgggcgcgttcgcccagtgggtaaaacgcaaactggagaacacctga

SEQ ID NO: 352057 - DNA, 240 bp, Pseudomonas aeruginosa
atgctcgacgcctggtcgagtcccgcccgagctgatcacaacctgcctttctaccgcgccgccctcctggaggacgtctgcgcgagccacctgctgaccaactggctggtcgatgtgcggggcggccgcgtggcctatggccgagacgcactgctcgccgagctgggccgcttggagcggacccgcgaggaagctggccggcaggcgcgtgagctgaaacgaatcctgggggagccgtga

SEQ ID NO: 352058 - DNA, 312 bp, Pseudomonas aeruginosa; identical to SEQ ID NO: 325389

SEQ ID NO: 352059 - DNA, 282 bp, Pseudomonas aeruginosa
atgaccaagacgttcgccatgtgccgcatcgacggcctgatcgagctgcgggaagagcacccaggcgagggctatttcgcccttgccgtgggcgagctggccagcgtgcgggcagcggtctttgcaaccgctgagccgcaccaggtgggccagaaagtcgcccggcgcgtgccgggtgtgagtcccgaggccaccgaccgcgagaacctgggttccatcgcccgctacatccagaccctgggccagcaggatcggcccggcttccgtgcgctaggggtgtga

SEQ ID NO: 352060 - DNA, 393 bp, Pseudomonas aeruginosa
atgaacgaccgcacactactcgaactggcggcgcgggcggctggaattcctgatgcattgtatttggactgtgtggcacaggatatataccacccgagagacggagaagcaggcattgaagtaaaccatcgggacacgcgatggagttgtttggctattgacggcgtatggaacccgctcaccgacgacggcgacgcgcttaggctggcggtgaagcttcgcctggacattacgttctacaacggttttcaggaggtggccgccgagccatcaaatggtgacgggatgaacccttgccaggaagtgttcacagaaaacccgtatgcggcaactcggcgagccatcgtccgcgccgcagccgagatcggcaagtctatgggaggtggggagtga

SEQ ID NO: 352061 - DNA, 228 bp, Pseudomonas aeruginosa
atgggcgccaagcaaacaccagcgcaactgatcgaaagggccatggaggactatcactcgttctgcgcctcatgggtatttagcgaaaagcatagtctgttctcatctggcggatggatgtatcggggcgtcagccataccgcccatgagaagaacacgaaaattctcgccaagcgccggaagcttgcggagaagatcatccagatcaccaaagaggcacagccatga

SEQ ID NO: 352062 - DNA, 480 bp, Pseudomonas aeruginosa
atgagtaactgccctcacgaagcatgggatttcggcgcccttcaatgcccggactgcggtgccgtgaaggatcacgtcaccgatgccgaatacgccaagctcgccgccgaggcccaggcgctcagggatgagcgagacagccagcagcgcgtcgccatcaaggcgatggaagaactggcagccctgcgcgcaagggtggtggttgtgccggagcgcctgacgaacggcgacagtatcagcaggatgttgcgcgaaatcggttgcgacggtgatgtcagttaccaccatgcgcgcgaaatttggaacgcctgcctcgacggcctggagcgcctcaacggcaagacggtcagcaaggggctgttgcggcaattgctcgacagcgatggcatcgatggcatattcgatgcgcagcaaaattacgcagcgcatcaagagcttcgcgccctgctcaaccagggcaaggagaacggcaatggctga

SEQ ID NO: 352063 - DNA, 258 bp, Pseudomonas aeruginosa
atgagcagcgaagactcgcgctatccgtacacctattcctgcgatttcatccgcaacttggccggatacggagaatgcggcgccaagttgtcgcgtagcgatgccagtctgattcgaaccaacatagctgaaattattggcatgaaggacgaagacctggccaagaagatcgccgattactacctggagaatcaggaggcgatatctgaacaggcagcacaggaactagcggcagccattttcccgaacttccgataa

SEQ ID NO: 352064 - DNA, 297 bp, Pseudomonas aeruginosa
atgaaagaccctctcgccgggaagtaccggaagttctatatgcgtgaatttcaacaggctgaaaaggtcatgaaaggtcgaggcggcaggctagagtggagccagcacgattaccaggccttcacctacttcgagccaggcgtctccctcgtcttctacccgcacaagacaaccgcaggcaatcgccaccttcgcgtgcgcgaccaaggcagcaagaacaagactctggcggcccagcttatggtcgctctcgattcccgtgcaggccatacctgcacattcagcagtaagggctaa

SEQ ID NO: 352065 - DNA, 327 bp, Pseudomonas aeruginosa
atgacaaaccctatcagtgatgatcgtttggcggaccttgatgaactgacagccaagctagcgggagaagattggtgggttgattgggacggttcttataccgtaacggtaagcccttcgaatatccagagcctgatcgtgcgcctgcgcgctgctgaggctgatgctaagcggtatcggtggctgcgtgacagcgggcgtctgctcggcgatagcatggactctcacgcggactacttcttcgtagtcacggctgacggcgaggacgtcatgtggtttgagcaactggattcagccatcgacgccgccatggagcgcacgccatga

SEQ ID NO: 352066 - DNA, 219 bp, Pseudomonas aeruginosa
atgaagatcacaaacgtcgagtggaacgaaggggctcccaagacttacgaggcaggtctgcttgttcagtggcatgacggaagaattgagctagctggtcatgactgcatgtttgaagggtgggagaaagcaaagcgctgggcctggctaatcaagcctcaagaactcgcctggctcgaagacatggcaaacaagcacaaggcgagggcgcggggatga

SEQ ID NO: 352067 - DNA, 732 bp, Pseudomonas aeruginosa
atgactgactgcagtctaagtgaatgtcttcaccttgtctcgcgaaagaccgcaattctattaggttttgacagctattttactggagtgccgtgctccagaggacacatctctcttcgtggaacaaaacggagggtttgtctgtcttgcgaacagcagtaccgtgaagagagaaaagaagatattgcagagtacaagcggcagtactatctgaagaacaaagaaaaactttgttctaccactagaaagtggtattcggaaaacaaagagcgggcatctgaatataacaggatgcactatctgcgaaacaaagacagatatgctgagtggcgtagaaattggatttctgaaaaccctgaaaggaaaagaattcgtgaacagcaatggcgtaaggaaaatcggtccatcctgctaggtaagacaaaggaatggaagaggcgaaatcatgacaaagtaatcgcctacaacagaaacagaagaagccttgaaaaaggcgcttctggaaagcactcagctaaggacattgagagtatctacatacttcagcgagggaaatgtgcgcattgctgtaaaagggtcggcttaaaatttcacgttgaccatatagtccctttagcaaagggtggcagtaattggccgcataacttacaaatcctctgccctccatgtaacctcggcaagcaaagcaaagacccaatagattggaagcagcagcacggactgttgttgtga

SEQ ID NO: 352068 - DNA, 1668 bp, Pseudomonas aeruginosa
atgcagtggtcaaccgcctgcaccgactgggaaagccgtatccagtccggtaaatcgctggtgccggtcaaaccgttgttccccgatcaggcggaagacgcgctggacgtgttctgcaacctgcgcatggtggatgccatcggctcgccgctgatgggtgagacctgccgaccctgggtgatcgacctggtggcggcgctgttcggcgcctacgacgaagccaacaaccgccgactgatcaccaactacttcctgatggtgagcaagaaaaatgggaagagcaccattgccgccggcgtgatgctcaccgcgctgattctcaacgcacgcccctcgggcgagttcatcatcctggccccgaccaaggaagcggctgacaacgcctacaagccgatccgcgacatgatcaaggcggacgacgagctggaggcgcgcttccacgaacaggaacacatccgcaccatcaccgaccggctgaacaaggccacactgaaagtggtcgcggcggactcggcaacggtgaccggcaagaaggccatcggcgtcttcatcgacgagatttgggagttcggcaaacaggccaaagcagcgaagatgctgaccgaggcaactggtgggctggcctctcgtccggaaggcttcgtgttctactgcaccacccagtcggacgaaccgccggccggagtgttcaaggccaagctcgactatgcgcgcaaggtgcgcgacggcctggtggaagacaagcgcttcctgccggtgatctacgagttccccaaggcgatgatcgcccaggggctgcaccgcaacctggccaatgcgcacatcaccaacccgaattggggattgtcggtcgatcaggaagtgctggagcagaagtaccaggaagcgcgcgaggaaggtgagcacgctatccgaaacttcctggccaagcattgcaacgtggaaatcggcctcgacctgcgctcggatcgttgggcggcggcggatttctgggaggcgcgcggcgaccgcacgctgaccttggacagcctgctcgagcaaagcgaggtggtcaccgtcggcatcgacggaggcggactcgacgatctgctgggcctgaccgtgatcggacgcaagcgcggcgaggatcaatggttgacctggtcgaaagcctggatgcatccgattgccatcgagcggcggcagtccgaggaatccaaataccgcgacttcgagaagcagggccacctgaccatcgttgagagcctgccggacgacgtctccgaagtcgccgaactggtcaagatgatcgatgagcgagatctgctggcgaacgtcggtatggacccagagaaaacccacaaggtgatgctggaagcgctgctgaacaagcagatcgacgagaagaagctgttcggcgtcagccagggctggaaactctgcggcgcgatcagcatcgccgaacgccgactcgcccagggcggcgtgactcacgccgcacaaccgatgatggcctggtgcgtcggcaatgcgcgggtagagccgcgagccaactcgatcctgatcaccaagcaggcatcgggatcggcaaagatcgacccgctgatggcgatgttcaacgccgtcacactgatggcacttaacccgccagcggcgaccaagaagtttcagatgttcgtattgggctga

SEQ ID NO: 352069 - DNA, 2067 bp, Pseudomonas aeruginosa
atgcaacgagcgtattccgccctgcatgtgaagcaggtgtccgaggatgctggcgttgtccgcatcaagggcattgcctccacgccacgcagtgaccgcgacggcgacgtagttaatccgatgggcgcgcgtttcaagacgcccatgccgctgctgctgcaacaccggcacgaccagcccgtcggcacggtgaccttcgccaagccgaacaagaacggcatccccttcgaggctgagctgccgcgcatcaaggaggctggccggctgaaggatcgcgtcgacgaagctatccattcgctgcagtacaagctgatcggcttcgtctcggtcggcttcattccggacctggagaagaccaagcgcatccctggcgctggctaccagatcgacgagtgggactggcacgaattgtcgttggtctcgattccggcgcagcccgatgccgtgatcacctccgtgaaatccctgggcgatgacgacaccgctgatgagctcagcgccgaggttgtcgccttcatcaaatccctcgatccgggcgagcctgccgcgattggcacaaaggctgtcccggtcgttcgcgtcacccctgccggcgcttcggcaatcaagaccaaaaccatcaaagttccgaagccccaggagggcaacgacatgaagactaccgctgaacaaatcgccgagttcgaagcaactcgcgtgaccaaggctgccgaaatggaagccatcatgaccaaagctgccgaggcgggtgaaaccctggatgccgagcagtcggagcagttcgacactctgcaagccgagatcgccgccatcgacaagcacatcggtcgactgaatcagatgcagaaggctcaggccgccaatgccaagcctgtcactgaagaggctggcgctcagcgaatggcaaacgtgaaagccctggacttcaaagaggttcaagttcgcgccaagaacacccagaagttggagcccggcatcgcgttcgcccgcgccgccaagtgcctggcgctcggtcatctggagcaccgcgacgccatcggcatcgccaagtctctgtacgatggccaagactcgatcatcgccgccactcagcgcctggtgaccaaggctgccgtcgccgctgctaccacctccgacgctacctgggctggcccgctggtcggtgacgagacaagcgtattcgcggatttcgtcgagtatctgcgtccgcagactattctcggtcgcttcggcactaacggcatccccagcctccgccgtgtgcccttccgcgtcccgctgatcggccagacctctggtggtgacggctactgggtcggagagggtcaggccaagccgctcaccaagttcgacttcgagcgtaagaccctggaaccgctgaaggtcgcgaacattgcagtagcaaccatggaagtcattcgtgactccagcccagccgctgatggcatcatccgcgatcaactcgctgcggcactgcgggagcgtctggatatcgacttcatcgacccggccaaggcggcagtcgctggcgtttccccggcttccatcctcaatggcgtagccggcatcccgtcgagcggtaacactgctgatgatgtgcgcgctgatattcgtgcattgttcaacgccttcatcgcagcgaacaacgctccgacctctggcgtatggctgatgcccgctaccaccgctctggctttgagcctgatgcagaatccgcttggtcaggcggagttccctggtatctccatgactgggggcgaactgttcggccttccggtgatcgtttcggagtacatcccgaccgcttcggcgggcgccgtagtggcactggtgaacgccagcgatatctacctcggagacgaaggcggcgttgatctgtcgatgtccaccgaagcgtcgcttcagatggacaacgctcctgacaacccgactaccgccagcaccgttctggtctcgctgtggcaacgcaacttggttggcttccgtgcagagcgcgcaatcaactgggcgcgtcgtcgtgcttcggctgttgcctatctgaccggcgtgaactggggcgctgcataa

SEQ ID NO: 352070 - DNA, 219 bp, Pseudomonas aeruginosa
atgaagcctgcgctgaagaaagctagacaagcactcaacgcagccttgcagttcgtcgttagcgctgtggtgtggatcgtgctgctattcatcggtggcattggttctatcgtctatggcgtttatctcttggctggaaatggtccgagcgcaatcgtgcttggggtattcctgctttgcgcctgtgtcattctgaaaaaggctgtcgtaaatggctaa

SEQ ID NO: 352071 - DNA, 1404 bp, Pseudomonas aeruginosa
atggctaactcgttgagcattttcgcggcgacgaaagcagttgtcagccaagaggctaagtcgctatcgaatgtgcctgtctcacgcggctggtggccgctgattcgagagccattcagcggtgcgtggcagcggaataaggaagagcggatcgacacgctgctccagtatccgacgctctatgcgtgcgtttcgcggatcgctactgacattgggaagatgccattcagcctgaaggccaaaaactcgaatggcatttgggaggtgattgagagcccggcattcagccccgttcttcgcaagcccaatcactaccagactgcccagcagttccgcgagcattggtcgctctcgaagaagactcaggggaacacctacgccctgaaaggccgcgatatgcgtggcgtggtcatcggcctatacattctcgatccttgccgcgtgatgcctttggtatccgactccggtgaggtcttttatcagctctatactgacaatctgaatcttctgccggatggcgagacggacctcatcgtcccggcaacagaaatcatccatgaccgttgcatctgcccgttccatccgctgattggtcttccgccgattgcggcggcatactggcctgcgttgaagaacatgcgcatcctgcgctcttcgtcggagttctttgcgaacaatgctcagccttctgggattctctctgcgcctggcgctatctctgacggaactgctgatcgcctccgggcttactggaacgagaacttcactggcgccaatgccgggaaagtggcagtggtaggcgatgggttgcagttcgtttccctggcatctaagtctgttgattcccagatggttgagcagctccgctattcggatgagcagatttgccagccgttcgggattcctccattcaaggttgggctcggttcgattcctgccggcctcggtgtcgacgcgatcaaccagctctactacgacgatgctttgcaagccgatatccaagccatggaatgcctgctcagcgaaggcctgaacacatacccatacaaagtcgatctcgacgaatccgtgctgatgcgaatggatgctggcaagaaagccgattatcacaagacgctcatcgacggcagcatcgagacgatcaacgatgcgcgtttggctttcaatctcgctccgctcaatggcggcgatatcgtttatatgcagatgcaggatatgccgcttgatcaggtacggaacaacacgattgtacgtgtcagcgaagagtccacgcagccggttatagaacagtccgaccaacaagcgaatagcgaaactgcgcccgaagatcaaacccaaaaggctatggctgagctgttcacattgaaggccatccaggccatgcgcactgaggccattcaatga

SEQ ID NO: 352072 - DNA, 1062 bp, Pseudomonas aeruginosa
atgatcgacccagtagagttcggtaaggcgatgggcgccatcgtccgtgaagccacggcgccgctgattgcccgcatcgagcagttggaaaagaccctggccgatcaggtgattccatccgccgaagaggttgccaccaagatcgacctagatgccttggcgaggtccgccgcagaaatggtgccggctcccaaggacgctgacatggaagcgctaaaggcccaccttggcgaactggtgaaagctatccctgcgcctgctgacggccagagtgtgaccatcgatgacgtggcgccgatgattcgggatgaggtggcaaaggcagttgccgaggttccgccggcgaaggacggcgaatcggtcactgttgatgacgtgcgcccggtcctggctgaactggtcagcaaggccgtagccgatctgcctaaacctcagcctggcaaagacgccgacatggatgcgctgcgcggctacctcgacgacttggtcaagtcgctggagcttccgaaggggccaagcgttgatgaagtcgctgccacctttgagcgtcgtttctcagatctcactctgtcctgggagcggcaggcccgcgataccctcgaaaaggcggctgaccgtatgccgaaaccgaaggatgggcgtgatgcgctgccgttggagtcgtttgacctcgcgcttggcgaggacggtcgaaccgtcaccgttaagatgcaggccggcgaaaccgtgatcgagaagtcggtgaagattgcttcggtcatggaccgaggcgtctacagcagcgaaggcagctacgagaagggcgacggcaccacttacggcggctgctactggatcgcgcagaaggatgcgccagaaggcgttcccggcggttccgctgattggcgtcttgctgtgaagaaaggtcgcgacgggaaagacctgcgcgacagtgcgtcgaagtatgacccgagcaagggcgtgagcatcaaggcaaatcagtttgacggaacccacggtaatggttaccagcccattggcaatgacggcagcggcaatgctcaaccgccgagggctcggtga

SEQ ID NO: 352073 - DNA, 363 bp, Pseudomonas aeruginosa
atgactgacttcagcctagacctgatcaaatccactggggcggtgattggcgctccggtggagaaggaaatttccttctatgttggaggtgagactcataaggcaaaagtttatgtgcggctcgcgtcttatgatcaggcccttagagaattcgagcttcaaaagcagggcagtgacgtacttgtctcgcgacttatggcttccatcgtcgacaagaaaggggatccagtgttcacggaagaaagtcagatcactggcgatccagagactggcgacgggaagctttgcgcaagcctcttcttctctttgctaaaggctgtaagtgatgcgaatgggtacacggaagacgaagtaaaaaactaa

SEQ ID NO: 352074 - DNA, 2754 bp, Pseudomonas aeruginosa
atggctactgattcccttggtacgctgacggtcgacttaatagccaatacaggcggctttgagcgtggcatggatgcagctgagcgccgaatcgccagtactactcgcgcgttccagcgacaagaacaagctgctgagcgcctggttggccgtattgaccccgtagctggggcgatcaacaggctggtacaggaacagactgagcttgagagacatttcagagctggcatcattcctgctggagagtttgagagacttaacagaattcttaatgaccagttggatgcggtccagcgtggaaacagggaaatggcatcgggtgcaatgagcgcccgtcagtaccaggctgctttacgtggtgttcctgctcaatttaccgatatagctgtcagtcttgcgtctggtcaacagcctctaactgttctgctacagcagggtggtcagctaaaagatatgtttggtggcgtagttcctgccgcacgcgcattaggcgggtatatcgctggtttgatcaatcctgtaaccggccttgccgctgctgttggcgtgctcgggatatccttcattgatgcagaacgagaagctgcggcattcaacaaggcaattttcgcaggtaataatgcggcaggtgtgagcggttctggcctttctcagatcgcagagcaagcatcggcggtaactggctcgctgtcaaacgcgaataaagctaccatcgcgttggcttctagcggaaaggttgctgcaagccagcttcagagtctgacagaagccaccattgcgatagctcaattcacagggaaagaagttgatgatgtagcaaagtccctatcagcgatgggagatagtgctactgatgctgctgcaaaaattagtgagcagtatgggcttttgacctatgaacagtaccaagtaatcaagtcgattgacgagcaaggaaatagtcaaagagctttagacgtacttggagaagagctaaacagaaatgcacaggagcgtctgaagcagtaccgggaatctctctctgacattgagcgtgattggatcgatataaagacggcaatcacgaacacatatgcagccatcagatcagagattttcccaaaccagaatcagcagattgatcagatccagagaattcttcggacccgtcaagaaggaggtgttctaggaactatatctggtgcttttgggtttggtgataactctacggagtcactccagaagcagcttgattctcttgttaagcaaagggatgcttccgcaaaacaggcagaagagcaagcgaagatcaccaagtctaaccaggaccgtattgaggcatcgcgagcatgggaaaaggagagcgaaaagtacctatccagccggtcaaagatggagaaggaaatctccgctgctcgcgaactcggaaggaaggcaggtctcaatgagattgaaatagaagaccgcattgctcagattagaaagagctatgaagagaagccttcttctcgttccggctcattagatgctggccagcgcatgcttgatagtctgcgtcagcaatatgcttcgatgcaggcgcagcttgaagcaaccgagaagctcggcacacaagctcaagctttggtgaagtgggagcaacaacttgctgatctgaaatctcgcggcagtctttcggctgatcagaaagcgcttcttgcaaatgctgacctgatcactgcgcaacttaagcggaatgctgccctggaagatgagctgaatacgcgtaaggaaattcagaaaactctggatgactacaagcggctcaatgagtcattgcgtacagatgctgaaaagcagttagacctaacccgtcagcgcttcgagattctggacaaagcgcgtcaggccggaatatctgatgatgactaccgtcgaaccgcagaacggatcgtagcttcttctaccacaaaggctccgactttttcaggtgttgatgctgttgttgcagggcctcaaggtgaacttgataagcttgacaaggctcaggaagatcttgaggcctggtatgagcagcaacttgaaatcctgaacgagaacagagagaagcgggcagagttgaacgcttcttgggatgagcaggagctaaagttaaagcaagagcacgaagatgctatggctgccattgagcaatctcgccaacagatcacgcttagcgcaaacgaacaattcttcggaaatctcagcgggttggcgaaaacgttctttggcgagcagtccggcctgtacaaagcggcgttcgttgcggaaaagtcattcgcaatcgcaaagacactgatcaacgttccaaaaaccgcatcagatgcttactcagccatggcgggcatccctgttattggtccagcactggggattgcggctgccgctgcggctgttactgcacagcttgcccaggttgcagcagtgaagaacgtaaacctatctggcatggcccacgatggaattgactcagttccggagaccggcacctggttactccagaagggcgagagggtgacgacggcagagacgagcgcaaagctcgacaggacgcttgatgacgttcgttcaaatcagagtagtggtggcgcgccgaccataaacctgattgaggatcgcagccgcgcggggcaagtcaatactcgccgccaggatgaccagtacatcatcgatgttgtggtggcagatcttttcggtgatgggcgcacgtcgaaggctattggcagttcgtttggcatgcgcaggagcggaacatga

SEQ ID NO: 352075 - DNA, 1272 bp, Pseudomonas aeruginosa
atggccgattggcaaaacctcgatcccgaggccgctcgcgaagcggaaaagtacgaaaaccccatccccagccgggaactgatcctggctcacctatccgagcggggcgctccggcgactcgctcccagttgctcgacgagttcgggctcgccggcgaggagccggaagaggccttgcgtcgtcgcctgcgcgccatggagcgcgacgggcagcttatctatacgcgtcgtggcgcctatgcgccggtggacaagctggacctgatccgcggccgcatcagcgggcaccgcgacggcttcggcttcctgatccccgacgatggcagcgacgacctgttcctcagtcccacccagatgcgcctggtgttcgacggcgaccgcgccctggcccgggtgtccggccatgaccggcgcggacgccgcgaaggccagctggtcgaggtgatcgagcgggcccacgagatcgtggtcggccgctacttcgaggaaagcggcatcggcgtggtggtcgcggacaacccgaagatccagcaggaagtcctgatcccgccgggcaaggccggcaaggccaggcacaaccagttcgtccaggtgcgcatcgagcaatggccgagcatccaccgccaggcccagggcgagatcgtcgaggtgctcggcgactacatggcgccggggatggagatcgaagtcgccctgcgcagctacgatatcccccacgtctggccggccgcggtggagaaggaagcggccaagctcaagccggaagtggcggagaaggacaaggaaaagcgtatcgacctgcgccaggtgcccttcgtcaccatcgacggcgaggatgcccgcgacttcgacgacgcggtgtacgccgaggccaagcgcggcggcggctggcgcctgttcgtggcgatcgccgatgtctcgcactacgtgaaggtcggttcggcgctggacgaagaggcggccaggcgcggcaactcggtgtatttccccgagcgggtgatcccgatgctgccggaggtgctgtccaatggtctctgctcgctgaatccgctggtcgaccggctggccatggtctgcgagatgaccctgtccaaggctggcaagctgaccggctaccagttctacgaagcggtgatccactccccatgcccgcctgacctacaccaaggtcagccagttgctcgagcatcccgacagcgtcgaggccgagaacctgcgccagcagttgcccggcgtggtgccgcacctgcagcagctgtatgcgttgtataa

SEQ ID NO: 352076 - DNA, 765 bp, Pseudomonas aeruginosa
atgatgctcaacgtgatagctggcacccacaaggagagggccaacgcggcttatcactggacaccagagactgcggaacgggccctgtccgtgttgcaccccaccggcatccccttcctcgacatgtgccttgtccatggccgattcccatcgaccaaggtcaagttctgcaccatcgaactcaagattcagccaatggagcaacaggtgcaaaacccgctgctggccgagggtcacgacattgtgtcgtggcaaggagttagggctgacgagtctccggcgcgcgcgaatctggtggaacaggaatggatgctcacccatccggaaagtggcgcagagctgtggcactaccgccccatccataaatggaccgcagagcaagtgttcgccattgcgaagcgccatggggtcaagccaaaccccctctacctcatgggcatgggacacgtcgggtgcatgccgtgcatcaacgccggcaaggacgaaattctggaaatcagccgccgctttccgcaggtgatcgaccagaaggaagcctgggaggccaacgtctcaatggccagcaaaacctgtgcagccaccttcttcccagcgcgcgacctgggcgctgggaatgcttcagcgatcgacccaaccaagcacggcattcgcggacgtgtcgagtggtcgatgacctcccgcggcggccgccaatacgacatcacccgcgtggtgtcgactgagcctaccaccgcctgctcgtccgtttacggcctctgtgaataa

SEQ ID NO: 352077 - DNA, 183 bp, Pseudomonas aeruginosa
atgacggagcacaacatcaccagcctgtccggaggaaaggacagcctggcaaccgccttgctcatgaaagaacgagaggtcaagaacggcatgctggtgttcgccgacaccggcaacgagcacgacctcacttatgaatacctcgattatctggagcaggtcctgcccttcccgctccggtga

SEQ ID NO: 352078 - DNA, 537 bp, Pseudomonas aeruginosa
atgggctactacaagaccaactcaccgaaggtgctgaaggcctgggccgattatgtcgcccaggccgacgctctgcaggctgaggccgacgccttcgccgcccgttaccccggtgcgaagccgctgatcagtaccagcatattgagcgggcggcgcttctacgggctggcattcgatccgccgatgcccgacaccctctggacgaagccgaactacaaggccgggcgtgagcagtcaccgcgccgcgcgccagccggcgtaaagggtgaggagcggaagaagctcgctgaggaactgaaggcgatccgcgacgagtacaacgcgcacaagccaaagatcgatgcacctctggacccgttcctcgaatcgttcggcctctccggcagcgcgctgttcttcagcgactacaagcagttcttcggggccgacggcttcatctacatcgagactacggccaagccatccggcgagatgaccgaaatccttggcagcgagttcgctgcggcgaaaaaggcttccgaccaggctgcggcctga

SEQ ID NO: 352079 - DNA, 330 bp, Pseudomonas aeruginosa
atggctgcgcagaagaagaacaaccaagggaaaggacaggtgtcgccggtggagaaggttcgtctacgggtatcagcgatgatcagtagcccgcgagctcaggcggagcgtcgggcgtcgatctggaaggcgcagggggattcggaagaggcctggcaccaggtgctggaggagttggccgagacggaaggcctggagatgacgcggaacgaggacgggactgtgctgctgacatggcagccttcagacgaggaggacgccggcggggaggaggcatataccgaggagatggtggtggagcgcctgcatgaggagccggcgccattctag

SEQ ID NO: 352080 - DNA, 1146 bp, Pseudomonas aeruginosa
atggaacggattgatttcaatcatggacgaatagcatggtgctgccaggacagcggtatatcgctgcatgagctagcccttgaaaccggggtgagcgaagtcacgctcaataaggcccttgacggtgaacgaggccttacctacagccagttgaaaaaaattgcagacttctttggaagaggcgtgcttttcttcatggaagagggagaagttgcgccggaaaacgtacataccgctgcgtttcgtagtatcgcaaatcaaaaacccaatatttctcataagctacgggcgttagttgagcgaactgagaggcaacgagacatctatctagagttacgtgaagatgttgatggtgacaacgtgcccctcttccggcatccgcaaatcgatcaaaatccgttgatcgcagcaaagtatgcgaggacttggctaggcctgacgacccagtcgacatttgaccaatatcgaactgctatcgagagaaaaggaatattagttttccgaagcaacggttatcaggggcagtggcaaatcgcaaaagaaaaccccatccttgggttctcgatttatcacgccgaatgcccactaatcttcgtaaaaaaacaatactcagagacattgcagactttcactctgatgcacgaacttgggcacatactaatacacaagcacagttcgattgatgatgatggcgacctatataatttgagtggaccagaaagagaagccaacgagttcgctggccatattctagtgccggatgaattcttaaaatctataaatatccgagacatacctctcgacgccagcgaatatgatgagtggcttgccccccagcgaagaaggtggggagtaagcggggaggtaatacttagacgattgctggataacaatcgcatcacacaagatgactatatggcctatcgagcatggagaggaagcctaaagattcccgagcttgataaggggggtaatcgagcctataggcaccgagagccaatgcacattttcggtgatggctttgtgaaggttgtcttagactctctgctggcaaagaatatttcgctagccaaagcgagcacttacctagatggaattaaggtaaaggacatacaggacctgaagggatactatgtgggcatttga

SEQ ID NO: 352081 - DNA, 570 bp, Pseudomonas aeruginosa
atggagatgctccagcgtcacggtaaagggctgagcggcgaagctaaggagaaaatcgcgcaggcggtagccgagtctcttgatggcgatcaatcgacgacatcgaacgtgattcgcgcagatttctcacggccagggttagtcggcgacgaaatcagcatcgcccactacgatatccgcggcgccatgggtggcggccaagtgccggccgactacgcggaaatgctccgcgacgtgaaggttagccagcagcacctgcgcgagctgggcgtcacctatgacgatccgaaccacctcaagatggtgcacggctggggccagtctatggaacccaccatcaaacaccgcgatcccctgatcgtcgatatcagcatccagcagttcaccggcgacgggatctatctgttcacttggcaggggcatctctacatcaagcgcctgcaggtccaagatgtcgatcacttcgagatgatctcagacaacaagaagcacaaggaccgttccatccgcatggacgagacctacattcatgccagggcattgctggtgtggaatgcgcatctggtataa

SEQ ID NO: 352082 - DNA, 1377 bp, Pseudomonas aeruginosa
atgactgacacccgcatcgaacgcgacagcatgggcgaactggcggtcccggcgaccgccctctatggcgcccagacccagcgcgcggtgaacaacttcccggtcagcggccaacgcatgccccaggccttcgtccgcgccctgctgctggccaaggccgcggcggcgcgggcgaacgtctccctgcagcaactggatgcaccgatgggcgaggcgatcgccgagacctgcctgcaactgctgcaggaggacttcatgcagcatttcccggtggatgtgttccagaccggctccggcaccagttccaacatgaacgccaacgaagtggtggcgaccctggccagtcgtcgcctgggcggcaaggtcaatccgaacgaccatgtgaactgcgggcagagcagcaacgacatcattccctcgaccatccacatcagtgccgccctcgagatcagcgaacgcctgctgccggcgctgcgccacctggagcagactatccagagcaaggccggcgaagtgcatgcctatgtgaagaccggccgcacccacctgatggatgcgatgccggtacgcatgagccaggtgctcggtggctgggcgcagcaggtgcgacaggccggcgtgcacatcgagagcgtacttcctgccttgcagcagttggcacagggcggcaccgcggtgggcaccgggatcaacgcccatcctcggttcgccgaacgtttcagccaggagctgaacgacctgaccgggctggcgttccgccccggcgacgacttcttcgccctgatcggttcgcaggacaccgcggtcgctgcgtccggccagttgaagaccctggcggtgaccctgatgaagctggccaacgacctgcgctggatgaactccgggccgcttgccgggctcggcgagatcgagctggaagcgctgcaaccaggctcctcgatcatgcccggcaaggtcaacccggtgatcccggaggccaccgcgatggtcgccgcccaggtgatcggcaatgacgccgccattgccgtcgctggccaatcgggcaacttcgaactgaacgtgatgctgccgctggtggcggacaacctgttgcacagcatccagttgctggccaacgtcagccggctgctggcggacaaggccatcgccagcttcaaggtcaaccagggcaagctcagcgaggcgttggcgcgcaacccgatcctggtcactgcgctgaacccgatcatcggctaccagaaggctgcggaaatcgccaagcaggcctatcgcgagggacggccgatcatcgatgtggcgctggaaaacaccgatctggaccgtgcgcgcctggaggtgttgctggatccggaaaaactcacggctggcggcctctga

SEQ ID NO: 352083 - DNA, 396 bp, Pseudomonas aeruginosa; identical to SEQ ID NO: 320862

SEQ ID NO: 352084 - DNA, 780 bp, Pseudomonas aeruginosa
atgggctacgcccgcgaggccctgcgccaggcactggtcaacctcgaggcgattcccgcgccggccggcaccctgccggtggtgatgggcgcgggttggtccggggtcctgctccacgaagcggtcggccacggcctggagggcgacttcaaccgcaagggcagctccgcctacagcggccgggtcggcgaaaaggtcgcctcgagcctgtgcaccatcgtcgacgacggcaccctggccgggcgtcgcggctcgctgagcgtggatgacgaaggcacgccgagcaactgcaacgtgctgatcgagaacggcgtgctcaagggctacatgcaggacaagctcaacgcccgcctgatgggcgtggcgcgcaccggtaacggccgccgcgagtcctacgcgcacctgccgatgccacgcatgaccaacacctacatgctggccggcgagagcgatccgcaggaaatcatcgcctcggtggagaagggtatctactgcgccaacctcggcggtggccaggtcgatatcaccagcggcaagttcgtgttctccaccagcgaggcctacctgatcgagaacggcaggatcaccaccccggtgaaaggcgccaccctgatcggcaacggtccggaagcgatgagccgggtgtccatggtcggcaacgacctggccctggacagtggcgtgggaacctgcgggaaggacggtcagtcggtgccggtcggcgtcggccagccgaccctgaagatcgatgcgatcaccgtcggcggcaccggcgcctga

SEQ ID NO: 352085 - DNA, 594 bp, Pseudomonas aeruginosa
atgagcgagttgttgtcatccgtcagccagcaattgctggcccccggtggtctggaactggacagcctgcccggcattcttcatgaactgaacggcccgggcatcgatgccgccgacctgtatttccagagccaggtctccgagtcgtggatgctcgaggacggcatcgtcaaggaaggcagcttcaatctcgaccagggcgtcggggtacgcgcgcagtcgggcgagaagaccggcttcgcctatagcaatgcgatcaccgccgaggcgttgaaacaggccgcggtggcggcccgttcgatttcccgtgcgggacagaacggcagcgtgcaggcgttcaaggccgtggtgccggctcgcctgtacgccggcgagaacccgctggacgtgctcagccgtgccgagaaggtcgagttgctgaagcagatcgacgccgctacccgtgcgctcgatccccgcatccagcaggtcacggtgagcatggccggcgtctgggagcagatcctggtagcggccagcgacggttcgctggccgccgacattcgtccgctggtgcgtttcaacgtcagcgtgatcgtcgaacagaacggctga

SEQ ID NO: 352086 - DNA, 3831 bp, Pseudomonas aeruginosa
atggcggatgtgggaagcctcggaacgcgactgctacggatcgtcctgggtctgtgcgccctggtactggtgctgctggcgctgtacgtcagccttggccggcaactggtgccgctggtggccgaataccgccagcagctggaggacgaagctggcaagcaactcggcataccggtgcggattgccgagctgacgggctcctggcgcggcttcgagcctctggtggtagcgcgcgacattcaggtcggcgacggcgaacagagtctgcgcctggcgcgggtgcggctggcgccggacctgctcggcagcctgctggcgcgccaggtgcggatcggcagcctggagctggagggactcaagctgaccctgcgcgaaggcgaggatggccagtggagcctggatggcctgccgcacagtgacaagcccagcgatccccggaaactcctgcaattcctgctgcagacccaacgcatctcgctgctggacagtcaactggaggtggcgccgcggggaagcgcagcgttgtcgctcagcgcggtcggcgcgaccctgcgcagttcatcggttggtgggcagagtctcgatgcccgcctgcaactgccggatggccaacccctggcgctgcacgccgaagggcggatcgacagtgaggactggccgcgcagcagcgccaggttctatctcagcctgccgcagagcgactgggcgcaatggttgccggccggtctgacccaggaatggaagatcgcccgggccaaggccggcggcgacttctggttcgactggcgcgacggcaaggcgcaacggctggtggcacggctgctggcgccgcagttgaaggcgtcgtatgccgcgcgcaagccggtggaaatcaacgacctgggcatgaacctgttcttcgatcgcgaagcgcagggctggaaggttcgggtcggcgacctggcggcgaatttcggcgagcagcgctggggcgaggtggagttgctgttgcgtcgcgaccagcagaacaacgagccacactggaagctgcaggccgaccgcgtcgacctgacgcccctggtgccggcgatagaagcgctggcgccgctgccggacgcggcggcggagtgggtggcgggcctgaagccgaagggcatcctgcacaacctgaacgccgatttctggccgcagcgggaggtgcccgagcgggtcagctacgcgaccaacctggaaaaggtcggtatctcggcgttccatgaggtcccggcggtggaaaacgtcagcggcaccttgaccggcaccctggccggaggccagctcgacgcatcggcgcaggatttcatgctgcacctggccaaggtgtttcccgagccgtggcgctaccgcgaggctcgcacgcggatgttctggagcctggacgaccgcgccttcaccctcggcagccacctgatgcgggtcgagggcgaggagggcagcctggccggcgacatgctgatccgcctgatgcgcgatcccggcgctgaagactacatggacctgcaggtcggcctcagcgacggcgacgcgcgcttcaccgccaagtacctgccgacccagttgccaggaatgaacaaaagcctggcgaactggttgaagacggcgatccgcagtggccatgtcgagcagggctacttccagtggcagggctcgctgaaccgcggcgcggcggccgaagcccacgtcatgaacctgtacttcaaggttcgcgacggcgagctggcctaccagcccggctggcccgccctgagcaaaacggtcggcgaggtgttcgtcgaggattccggagtccgcgtgctggcctccagcgggaatctgctgaattcccgggtcagcgacgtcaaggtcgacattcccctcggccgtccgggacagacgccgcacctgtatgtggatggggccgtcgacagtaacctgaaggacggcatcaagctgctccaggaagcgccgatcccgacccgcaagatcttcgccggctgggagggcgatgggcccttgcagggccacctgaagctggatattccgctggaccacgacgaggccggcaagaccggggtggtcgtggatttctccaccgtgggcgcgaccctgaagatgcccagtccgaagctggatatgagcgaagtgaagggcgacttccgtttcgacctggccaagggcctgagcgccccggcggtgcaggcccgggtgctgggcagcgaggtacgcgggcggatcgtcgccgaggggcgcggcgatgcgcgcacgcgcttgctgctcaacggccaggtggcggtcaagtcgctgagcgactggctcggcgctggccagcgtccgttgccggtctcgggacgcctgccgttccagctcaacctgctgctggatggcaaggacagccaattgcagatcgattcggatctcaagggcgccgtcgtcgacctgccggcgccgttcggcaagacggccgcccaggcgcggccgacccaatggcggatgaccctggatggcgccgaacgacgttactgggcgcgttacgacggcctcgccagcctggcctatgcggccccggcggacaagccgctgaacggacgcggcgccctgcgcctgggcggtgacccggcgttgctgccctcggcacaggggctgcgggtgcgcgggcgtctggcggaactggactgggacgcctggcaggccaccctgaagcgctacggcaacggcgaccaggccgccagtagcgctgcgggcctgctgcgcggcgccgacctgcgcatcgacagcttcaagggcttcggccaggagctgaagaacctgaccgtcgacctggcccgccaggagcgggcctggcaactggtgctggtcagcgacctcgcatcggggcgcctggtcctgccggatgccaggggcgcgccgatcgtggtcgatctggaccgcctgaacctgccgaagtcgacccttcccgacgagaacaaggtggaggactcggacccgctggccgccgtcgatccgcgcagcctgccggcggtagacgtgaagatcggccaggtcgccctcggcggccagccgctgggcgcctggagcctgaaggtacggccgggcagcaacggcgtggcgttcaacgacctggacctcgacctgcgtggcctgcacgtcaacggcagcctgcgttgggacggcagtccgggcaatacccgcagcacctatcagggccggatcgagggcaagaacctggcggatgtgctcaaggcctggaatttcgcgccgagtgccaccagcgaacgtttccgcatggatatcaacggccagtggccgggatcgccggcctacatggccctgaagcgcttcagcggcagcatggatgcatcgctgcgcaaggggcagttcgtcgaggtcgaaggcagcgcccaggcgctgcgagtgtttggcctgctcaatttcaacgcgatcaaccgccggctgcgcctggatttctcggacatcctcggcaagggactgagctatgaccgggtgaagggggttctctccgccaccgacggcgtctacgtcacccgcgagccgctgaagctggaagggccgtcgagcaacctggagttgaacggtaccctggacctggctcacgatcggatcgacgccaagctgctggtgaccttgccattgaccaacaacctgaccctggcggcactgatagtcggcggtccggcggtcggcggcgcggtcttcgtcgtcgacaagctgctcggcgaccgggtctcgcgcttcgccagcgtgcaatacagcgtcaagggcccctggcaggatccgaagatcagcttcgacaagccattcgagaagccccgctga

SEQ ID NO: 352087 - DNA, 399 bp, Pseudomonas aeruginosa
gtggaattcgtcgactggctgcgcgagcgcttccaggtggtgatcctctccgacaccttctacgagttctcccagccgctgatgcgccagctgggcttcccgaccctgttgtgccacaagctggagatcgacgacagtgaccgggtggtcggctatcaattgcgccagaaggatcccaagcggcagtcggtgatcgccttcaagagcctctactaccgggtgatcgccgccggtgattcctacaacgacaccaccatgctttccgaggcccacgccggcatcctgttccatgccccggaaaacgtgatccgcgagtttccccagttccccgcggtgcatacctacgaagacctcaagcgcgagttcctcaaggcttccagccgttcgctgagtctgtag

SEQ ID NO: 352088 - DNA, 138 bp, Pseudomonas aeruginosa
atgcaggctgacctgctcttgcaggatcgcctggccgagaccgcgcgagccactgtgcaccagcagttgcaggcggccggcatcgaggccgagggcgtgcagggcggcctggtcgaacacggtctcgacctgctgtag

SEQ ID NO: 352089 - DNA, 840 bp, Pseudomonas aeruginosa
atgctaagaaagggatatagaatatttattagaaccataaacccaagaacaaaaataaatttcaggccgttatattacctattcttactagcagcgctctcaatagccttggtccttttaataaatcttctttcaatatctagaactaactcgctcggtgaatggggagacttttttggcggcgttctaaatccaatcttgacctttctcacatttatgggactactaataaccatagtgattcagcagactgaactaagggagtcaaggcaagagttaaaacgttctgctgacgcactatcagaacaaacaggcagtactaagcgtcaaatttttgagtctactttcttcaacatgatgaatatgcacgcatcaatattagactctatcgaccttacgagtacgaatggtagggtcacgaaaggaagagactgctttgttgttttctatagacgactaaaacaacattacacccccaataaattcagtatacataacgaccaatctgagttaaatcttctgcgggaagtttacaaaaaattctgggaggaaaaccagctcgagcttggacattattttagatttctatataatatttttcgctttattaaatattctggattttcggacggaccgtattcccgcttaattcgcgcacaattgtcggaccaagaattactagttattttttataactgtatagcttctatccacggcgacaactttaaatcaatcgccgaggaattttccctttttgacaacatgcccagggagcttttactctcacaaacacacctgtctcacattgcacccagcgcttttaatagagagaagaattaa

SEQ ID NO: 352090 - DNA, 1725 bp, Pseudomonas aeruginosa
atggacaaaataacaagctctctacttacaactttttccaaacaaaacgaattactcaaaagagatacttcagtccagtttgaacattttgtaaatttctccttaacatcaaaactatttcgcggaagctttgagctggacgacattcatgtcggatcgggcggggactgtgcgatcgacggaatggctataacagtaaatggtcgattaattaccaccgaagatgcacttagagagattgtcgaaaactccggatatcttgatgcagacataatatttatacaagccaaaaccagctcaaacttcgacggttcagcaataggctccttcattcatggagtcaaagactttctttcagactccccccaacttgtgcagaatgatagagtaaaagaaatgaaagatatttgggaatcaataatccagatgtctgacagcatggtgaatcgccgcccaaactgcaagctcttctacgcctgcacaggtaagtgggtagaagacgcaaacttagtggcaatcataaacagcggaagaaaagaaatagatcagcttgagcttttcaatagcacaacagtagaagctctgggtgccgccgaagttcagaagctataccaagaaacaaaaaatcgcctatccgtcacggtgaattttcaaaaccgcattacccttccagacattgaaggcgtcaccgaagcatacctgggtgtaattccattcgaggaatacattaagctaattcaagatgaccaaggaacaatctatagcatatttgacgacaacgtccgagatttccagggcggaaatgctgtgaacgcaaaaataaaaagcacattagaaaaagggaagtttgatcttttctgcgtgctaaataatggtgtcacagtagtggctagttccctgacccccgcaggcaacagatttacaatcagagactatcaggtcgttaatggatgccaaacaagccatgtactgcatgaatgcagagcaatagatggaataaaaagcgtctatgtcccgatgaaaataatcgtgacagatgatgaagacattaagaccagtattacgctcgcaaccaacagccaaaccgaagtaaaaaccgaacaacttgaagccctaagtcttttccagaaaagattagaactatactatgcagcagagaaaggggcattccagctgcactatgagcgccgatcccagcagtacaactcttacgcagaagtcaaacgcacgcaaataatatctatcccaacacaaataaagtcctttgcatcaatgttcctaaactcgccgcacttagtttccggctactatggaactatcgtaaatcgtttctctggaaaaatcttcaacgaagaccacaaatactcgccatattatgtaagcggcctcgcctactaccgaattgagcaaatgtttagaagcggcgaactacaaacaacctataagaaattccgattccatcttatgcttattgttaggctcctaacaatgggcgaaaaactcgacccctttaattctaatgcattcgaaaaatcctgtgagcgattcaaagcaatattgctagacgacaagaagtccagcgaaatatttaagcgagcgaaggacgtatttgacagctccaaactagacaagacaaaacgacagtataagtcagaatccgatacggaaatggttatcgaagcttttagactatatgaagctgcagaaaccactgaaaccgtataa

SEQ ID NO: 352091 - DNA, 255 bp, Pseudomonas aeruginosa
atggtctgtcagatgagccacgacctcagccaactgcgtaaattcgtctcgcccgagatcatcttcggcgccggctgccggcacagcgtcgccaactacgtgaagaccttcggtgcgcgcaaggtcctgctggtctccgaccccggcgtgctcgccgccggctgggtcgccgacatccaggcaagcctggggggcagggcatcgactactgcctgtataccgacgtttcgcccaacccccgggtcgacgaggtga

SEQ ID NO: 352092 - DNA, 807 bp, Pseudomonas aeruginosa
atgaaagcgaaagcgcgcaatcaacgggaaaaaaaagcggccagcgtcctctcggtagacgagtatgagcaggagctgcgtcttcttcagattgagttggtaaagctgcagcggcatttcctctgctgttgcagcgaaaagattttggtcatttttgaggggcgtgatgcttcaggaaaggatgggaccatcaagcgcatcgttgagcatctcagtccacgggatacgcgtgtagtcgcacttgggaagccgtcagatcgagaccgcggtgcctggtactttcagcgctatgttgcggagcttcccactacaagcgagctcaccctgttcaaccgtagttggtacaaccgagcgggtgtggaacacgttatgggcttctgtaccgatgaggagtacgaggagttcttgtcgagtgtttcggaatttgaaggcatgcttgtgcgctcggggattcacttggtcaagtattacctcgacatttccaaggatgagcagaagcgccgtcttgagtcgcgccgcagcgatcccttgaagcagtggaaggtcagccctatcgatgaaagggctgtgagtctgtggaagaagtacagcaaggctcgaaacgaaatgttcgctcgcagtaacgatgtggtgccttggagtgtcgtacgggcaaatgaaaagcgcgttgcaagactgaatgtcattaaagacttgctaagccgtttacattacgccgaaaaggataaaagtcttgtccagcccaatccgcagattgtgttcccctatgcagaagcgcaccttgttagtggagcgatagcaaagtga

SEQ ID NO: 352093 - DNA, 363 bp, Pseudomonas aeruginosa
atgatcaacatccctcccgcttcgtttcgcgtcacgccctatggtgaggtggatgccgctgcactggatcagctacgcgacagctttgacacgtcccaactccgacgcctagtagaaggtctggatgcgtgcctcgctgaaatggggggtgtcatcgcactgcgggacgggctactgagacttcacgcaatggcgctgaccattgtcgaaggtgctgccctggccgtatcgaccgagaacgcatgcatctgggctgaagcagactccgtgcagctggacctcgatgctctggcatcatgggttcgtgatactcaggattgcctcactcgcttagtcgaactcaggccagaccacgagcattag

SEQ ID NO: 352094 - DNA, 474 bp, Pseudomonas aeruginosa
atggacgccgcaaccattacacgttggatcaagagcttggggcgtccctacgatgcattggctgccgaagggatcattcctagccagccgctacaggaactctacaagggccgggactggctcgacatcgagccagcggacgggctggagttgagtttctgggcagagaccaaacgcctggagagcatctacatcactttgatccagacggtcgatgaccagcctgtctaccagggagaactgcctcagcccttcgtcctggagatggaccagaccagcgtgcgcgccaccttcggcccgcccagggagtcgaaaggccccatgaagctacccaacctcccgccaatgggcggatatgacgcctacacgctgaatgcggcgacgcacccaaacgcgcagacgatgtttcagtacacgccggacatgcgagtgaagacgctcattttcaccctgatcgacacaggccacgactga

SEQ ID NO: 352095 - DNA, 1554 bp, Pseudomonas aeruginosa
atggcttttgtcatcagggagggcgaccccaccaccacgggcggtatcgtggtagccggctcttccacgcataccgttgagtttcgtaaagccgcccggatcagtgatccggtgtggtgtccagcctgcaagagcatgggcttcatcgccgagggcaatcccaccgtcatcgacgaatacttggccctggccactcacgggcacgccgtgcagtgcggttgcccgttcggcagccaccggctgatcgccacgcagagcaccgtcatggttgacgtgcagggctcggttggcattgccccggacctggcagtgcgggccgaggccgcgacccaggtatgggccaaggcgatccgcgagggttcctatgccagccagttcaccagcggcattcctgtccaccaggtgcgcgggctgccgcccgccgattcttgcgtgttcgccaagtcctgcgtctcggcgccggccggctcgaccgaggcgggcactaccaccgaaccggcgaagaatttcggcaccatcaccctgctcggtaccacaggcaccgtcacccctggcggggcagcgctgctcggtcgtgtttccggcaccatggccggcggcgtcgccgagagcctgggcagttgggccattcgcggcctggtgggagcggctgaggccgtgggcgctgccgccggcacggttaccggaaccctgctgctggccctgtggccccgcgacattggcgactcgacgctgtacaccgccgagcagctgacgatgatgagcgccgcggctacgcgggtgcgcttccagttccgcaagaccccggatggatcgatccgggtctacggtcttcacaccagcgctctatccggcctggccagcgtgcctacggtggaggcgagatggaacccgaacacaagtgccatcgaggcccagctcgacggcggcatcaccatcacctggacgccgaacatcggcccactgcccagcgaaccgctgatctttccgattcccaccgagccggtggagacgctgctggtccatccgatccccgaccggctcgacaccgagatcgaggtgtacccgaccggcgacgacatcacctggcaagacgtcatcctgaccttcccggacaatccgggcgtgccgccgctttatctggtgtttgccaaaccagcggtcaatccactggaggtggggccggcgggcgagttgcaatcgcgcagcaggaaagacggcctggacatcgatcacatccccgcgcagagggcgctggaagtggccttgctggcaggcccggtcagggtgtccaagcgagagatccgcgaggccttgcgcaattcgcccggcattgccattccggcgactgtccaccagaagtacagtgagacctacggtgggcgcaacaccaaggccaagcaggcccaggacgtcgccgacttgcgggcagcgatcgacagtaacttcaatgcgatcaaacgcggactactggaagaaggctatgccgagagcgacatcgaggcggcccgcgaccaattacatcaactcggccaggaacaggggtggtactga

SEQ ID NO: 352096 - DNA, 300 bp, Pseudomonas aeruginosa
atggacaacaatcgcggcggccactcgcatgtaaagaagcgagccaataatcctcacaaccttgccggcaaacgccagattagggtgcacaattacgctaacgaggtcgtgcccttcatcgttcacggcaaaaaggccttccgcgaaaagcatgtgaagaaagatttcgtagcgaatggcggcgtttcaaaggatcacacacgaactctttctcgccaggccaagcgcagcagcgtccccaaatgctctttggaaaggcccagcgctttgttgcgggctcaccaaataggccgttggtga

SEQ ID NO: 352097 - DNA, 216 bp, Pseudomonas aeruginosa
atgtgcaagctgaacgcccaggaccgggcgaccctagagaaagccaaggcccaggctgcagagctggttgaggccctgaccaagctcggctcagcgaagaacggactgctcggctcagcgaagaacggactgctcggcctcgagggcctggatctccagcagcaagcaatttccattgaaaagcgactgggcgcgatccagtccgtaacggagtaa

SEQ ID NO: 352098 - DNA, 459 bp, Pseudomonas aeruginosa
ttgggcctaaagatgggcgacccatacttcaaagtgaagcggtttctcgaccagaggggagtgacagccttttcgagcaactatgcgctatacgccgacgtgtcgaatcgtgtgatgcgaaccattagcactctggtcgccagcatggaggtctactcagttgacgaatgttggtgtgaccttactggaatgcccggcgacctggagcagttgggccgggatattcaggcacgagttcgacaatgggtgaatattccagttggggtgggcatcgggccgacaaagacgttggccaaactcgcacagtgggcaggaaagaattggccggcaaccggcggcgtggtgaacctgatggaccctcagcgccagcaaaaactcttgaaactcgcgccggtgggggaggtgtggggtgtaggccgtaagctctccagtcaactcgagactctagggaaactctga

SEQ ID NO: 352099 - DNA, 453 bp, Pseudomonas aeruginosa
atgaaagctcaaaaaggctttaccttgatcgagctgatgatcgtggttgcgatcatcggtatcctggcggcgattgccattccccagtaccagaactatgtggcgcgttcggaaggcgcttcggcgctggcgacgatcaacccgttgaagaccactgttgaagagtcgctgtcgcgtggaattgctggtagcaaaattctgatcggtactacagcttctactgcagataccacctatgtaggtattgatgagaaggcaaataaacttggtaccgtagctgtaactattaaagacacaggcgatggtactataaaatttacttttgcaactggtcagtccagtccgaagaatgcgggcaaggaaattactttgaatcgtactgctgaaggtgtatggacttgcacctctactcaggaagagatgtttattcctaagggttgtaataagccttaa

SEQ ID NO: 352100 - DNA, 714 bp, Pseudomonas aeruginosa
atgtctctcgaccccaaccgtatcgccgtcggcgcacaagaacccatcgccaatctcaacccagtaccgctggaggacgcccatctggtccaatgctcatgtggctggttcggcccttcatcgcagcggaccagtacttcggcctgcccagcctgcggtggcgagagcttcgaaagacctgatgtcgaacacatctaccagactcttgctggcttgctgctgcgcgcccgaaaggagttggccgagcgcaccagggtaagcttggagcttcgcagcctggccgacaagtcagtgcagaactgccgagcgcttcaggatgcccaggccccgctcatggccaaagcgggcgccttcgacgcggtaatgaagatgcttggcttcccggcagaagcaggcccggaacaactacccgaagccgtgcactggctgatgctggaccagatgcggtatgcgatgcatcgtgacgtactacgcatggaccgctcggcttgggaagggatacaggacatcccgcaacacaaggtcagcgccaccgaatacgaccatgcaactgacaggcgaatagccagatggcgccaggcccagcaaaccgaggcccaatgcagagcgagcagtactgacgaccaagccgcggtccaagcgcaagaagagaggattgagcagctcgaagcagaactgctcgatgctcgcagcctcatcaagacgctgatctga

SEQ ID NO: 352101 - DNA, 1311 bp, Pseudomonas aeruginosa
atgatcgagtccttcatcgagattccggatcaacttgccgatctgctgaaatcagccggcagcgcaccgccgccacggccattgaaccgcaacatcgcggtctatggcgacagtcgcgctttccagtgcaccaagggaaacgtggggttggcgttctgggctagcgctctgtccggcgggttggcggcgttcccgaccgcgttgaacgccggcgtcgatggcgatacgactgcgcagcaggtagcaagaatgcccttgatccttgcccaggcagcgaacttcgacgttctgatccacttcgggaccgggaacgaccggctccagggcatgagcatcgcccagacaatttccaacctgaatttcatctatgacaccctgctggcgagagggaagaccattatcaccatcgccgagacaccggtgcatggacctggcattgggctcggggcctcagtgatcgccgaccactacatggtgcaccagtggttgctgaacgaggcgccgaagaaaggaatcttggtggccaacccctgggacaagatggtggatccggcgtcgggtgcctcctatctgcctctccctggcatggtgggggatggtgtacacccatccccgatgggcggcgaggtgatcggcgctgcagtggcggaggtcctgggtaagatcttcagcaaccgggtcactctgcccacagcgaacctcccgttcagttcttcgccggcggccaccgccaacctcagcggtagccttatacccaacccgctactcactggcaccactggtaccgtcacagccgggagtggcggaacaatcacttccagcggtattgctgcgaactgcgtgctctctggcactaatctggccggcttgaccgtcaccccgtcgaagttggccaactcgactgcgggtgatttccaggtgctgaaggtgtccggtactcctaccggcaacaatcccaccctggtgctggaacagtcgatcccagttgcgtctctgttcgccaatgaggtgatcaaggcattcggcaagtgggaactgaccagcgcgagcaacagcgtgctgcaggtggcgctgcaactgcaggcggtgaatggcgcgggcaccaccaccctttaccagtccgggcagaatcaggagttggctcacccgatcgccgcgggacagaagtcggggatatttgaaacgcaggcgctgaccattaccgagccactgaccagcctcaaggttcgcctggttgcctcgttcgtgaaaggagcagcccaggacgtcaccatcaagctggcccaggtcgacgcacgtcaggctgcataa

SEQ ID NO: 352102 - DNA, 279 bp, Pseudomonas aeruginosa
atgtccggatcgcttcctgacgtgattttgaacgccaatgaatggaccaacctgtacgccaaaagcgggatcgccgttggcaaaaagctggttctgctgaacaaaggcagcctggatcttctgattttcgaagcggccgatgcgcctgctacgaatgcgcgtgatggtgatctgcgcaagccgggagagcgcgccaccgttcacgaagggtcgccaggcgtatgggtgctttcgccgatccagggggccagggtattcgtgcaggaggcagtgcaatga

SEQ ID NO: 352103 - DNA, 1008 bp, Pseudomonas aeruginosa
atgttgccgccggcggacgagcaattgcccgatgtggagcctgcacaggacctggagcgcatcccaggcatgatcgaggctggcaacatcgacctgcatagtcgtccgatcgtccgaaacgaggatggatcgatcagtaccgtgcgttctatctcggccaacttcgacggccgggaggtgctgatcccgaccgtcagcgacgacggacgcatcctcaccgacgggcaggccattcagcagtacctgaagaccggccggcacctcggtgtcttcgacagtccgcaggatgcaaccgcctacgcacagcaactacacgacgaccaggcgaaggagtacctgcctcaagctgaccagccggtgcttcgtgctgacggtatgcctttcgatggtgcgggctccgcccgggcgagccgggcctatcgggaggcgctggcacagggccgccggccagaagtggtcaaggtcgatggcgggttcgcggtgaggacttcgggcggagacctacagccgggatctgcggtggatcgcgcagcgagtgatgcggcgatgtcgccggacaacgatctgccggagcccaccgatgcccagaaggaagcgggcaactaccgcaaggggcacgtgcgtttccaggggctcgatatctcgatcgagaacccgcgggggtcggagcgcaagggggtagggaagaacgggaaggtctggtcgcacacgatgtccgatcactacggctacatcaagcgcaccagcggggcggatggtgaacaggtcgacgtatacctcggtccacaggaacatagcgaccgagtattcgtcatcgaccaagacgaccaaaagggagggttcgacgagcacaaggtgatgctcggctattcggatcgagcggcagcggtcaaggcctaccgctccaacttcgacaggaggtggaaggtaggaaaggtgactccgatgtcgatggcggagttcaagcgctggctgaaggaagggaaaacggatcggccgatgtcgtaa

SEQ ID NO: 352104 - DNA, 633 bp, Pseudomonas aeruginosa
ttgctcggttcgcgtgtacgggacagggccaacagtgtccaactgctgttcaatccgaccgatcctctcacctgccgcacggcggcgccgaccgacgttttccgtcaaactgtccatcaactgatcttggtccggctgggggtagcgtcttcccagcccctcgactgcagctacgcgagcgtcctgctgggcctgccgcgcccctccggtccccgcgaacggaatccgctcgccggcaatctgggcactccgactcatgaacgtctggggtggaaagacatccgacgtcatcagcggcacgttgacctgctcagcctgctgaacgagttgcgcgttcggaccggccgccgggtttcgcgcagcggccagcaccctccgtccggtatcggcgacaccaccaatagcactggcgacagccggggttgcagcgcccagggcgccagcagcagctatctctcccccatcaacatccccaccagcttcctgctgcagcccttcgattccagcctgagtcgctgcagatcccgcccccagggcaatggcctggcgccccagtccaccaccaacccaggatgcccctcgcgctgcgggggtgaacgcggccccaataccagcggcttgcgccacgtctag

SEQ ID NO: 352105 - DNA, 1545 bp, Pseudomonas aeruginosa
atggcagggcttgatagtcgcggggcgatggacgggttcgcccaagggtatgggctggtgatgggagcgttgggccagcgcgatcagatggaactgaggcgtcagcagatcgccgaccaggcggaggaacgccagtatcagcggggcattgatgcgcagcggctcgacatgagtcgtgagcagatgcattaccagcgcgagcaagatcagcggaacttcgatacccaacaggcgaatctccagtacgcccgggatcgagatcagcgtgagttcgacatgcggaatcagcagttccggcagaattatgggctacggaccgcagagctgcagtctgccaaccgacgcgccgaggcacaggcacagttggtggagcggcgcatgcaacgggaggacaaggcgcagcagagagaggacgatcaggtccaactgaagtccgcctacgcacgcctggctatgggggagcaaccgtctgaggacgacctggcggccttcaagcgcaacccgtgggctgatccaactcatgtcctgagcccacagatgcagggcgacatccagctcgctggccaggcgttcatgggggaggcggatccgaacagtcccgaggggctggcggcgatgaaccggatgttcggtcctgaggtgaacaagggccgtggagggaagaaggccattgcgggtgtttaccctggccgcaccccgggaacggtggtgttcgacctggccgttacgcgagacgacggcagcacccacaacgtccctttgacgaaaggccgcggaactgccgatgacgacgaccacgacgttctggaggttccaattgagcgcctggttgaccgtgtttccggctaccgcttgttgaacggggcgctcaccagtacgccggaactccagcagcgggtcgcacagttcggccggcagatggggttgctgcccgatgccggcgggaagccgttgccgtcgttcgtccagaagtccgaggacaaagacctcgaggcgctggccgggtcagcaggtatcaacgagcagctcggccgaattgtcggacagatcgattcgggcgcgcttgaactggggccactcagcaaccggctgtcggaagcccgaaactacctgggaagcagcaccgatcaatctcggaactatgcctcgctgaactccacgctcgagacgctgcgtaatgccagtctgcgcctgaatgcgggcgtacagaccgacggagatgccaaacgagcgtggaacgaactcatcaccaacatcaacgacccggcgctggtgaagcagaggattcaagagatcaccgcgctgaacgaccttgcagtggaactcaagaccaacatgatcaatctgcggcgccggaacgcccaggcgccggagttggatgtcacctcggttgtcccccaactgggcattccgaaagaacagagccggccacagccgacgcctgctcagcagatcgtgcgcgtagcctcggatgaagactacaaccggttgccgtctggcgccgtgttcatcgacccccaagggaatcagcggaggaagccgtga

SEQ ID NO: 352106 - DNA, 249 bp, Pseudomonas aeruginosa
atggcatacggactgatcggactgaagcagcagatgcagggcgaagcgatgcaggggctatccagcctcgcgcaacagcagcagcaggcgaaggcggcagaggatgccatgaaccagcaacagcaggcgaatcgtcgacagggccaggtgggcatggcgacgaccggggcaatgatgggctcggcattcggccccgttggcactgcggtaggggctggcatcggcttaatcgccggttcgttgttctga

SEQ ID NO: 352107 - DNA, 417 bp, Pseudomonas aeruginosa
atgccttactacgtagatccgaacgcggcttttgccggaaatcaaggggcttcgacggtccttggtcaactcagccgagcacaatgggatgactggaaagcccggttccagccctacgtcgacaagttggcgaacctggcgacaagcgaaacctacgctggtgagcaggctgcccaagctgccagttccgtcaacgcctcctacgacaacaccgcgcgcggcttgcgcatgcagcaacaggggatgggcctttcgctgactccagcgcagcaggccgcccaggatcggaagctgcagatcggccgtgcagcggcatccgtggatgcaagcaacaacgcccgcatctccgcccgtgacctgcaggagcagatcatggctggcggcctgggtctttctggcctgacaaagcaagggtga

SEQ ID NO: 352108 - DNA, 699 bp, Pseudomonas aeruginosa
atgagcggaagtaaaggcaagagcagcaacacagtttcggacacgcccgaacagcgctatgccgcgcaggtagccgctgaaaagtggaactacgcccaggagcgtctggcaccggtcgagaacgcctatatgggccgggttgaccagatgggctcgggcgggaacatggcgtacgtccgaggtaaggccaacgccggcacgcagcaggcactcagggccggtatggagcaggtaacccagggcgtgacgcaacaggcgggggtcaatccaaatagtggccgctacaccggagccatggccgatcttgccgatgctgcgggagctggtggcggcgacacgatggcgcgagcccagttcgagcagaaagctcagcaggttggagggctcagcaacctggcagccatcggccaaggacaatccggacaggctcaggctggcctgaacaccgtagcgaaccaggccgcccaggatgcccagagtgcggccttcaaccgcttcaaccgaaagagcgcgaacctccaacttgcaggtgctgcgctgggggccggtgctgcaggggctcagtacgggctacagaactggaagtcgacgccggccagtaccagcgttgctcgttccggtgtactgaaccccgaggggctcaacggcaagcagttcgacaccacccagtacggggttaacttcgggagttatgcgtga

SEQ ID NO: 352109 - DNA, 477 bp, Pseudomonas aeruginosa
atgatcgactcgcgcgaaacgcaggagcaactcctgcaccgggtgcttcagggaaacctggatgcgatccgattctgcgaaaccctattcgagatttcgcagaccctggacgacatcgtcgatggcgataaggctctcactccacaggaggtctacggcgcattctggttggcgttggtcgaactgcccgtgaaccctttttaccgccacttcgagcacttcatacgccccctgatggcggctgccctgcaggattggcgcgacagcgttgtgcttgagcgcagtggtgatgaacacgggcagaccttggcgttcgtcctgcgggaccaactcaccagtctggtggtgcagtgtgcgtatctcatcggtggggctgcctggatggtccaagtgtccgaaggcatccgccggcacttccacgacgaaccgctggcggactacatccaagacctgagtcggaaccgaggtgctcaatga

SEQ ID NO: 352110 - DNA, 1809 bp, Pseudomonas aeruginosa
atggcatcccatatctatcgtgctgggacggtgtctattgctgccgggacaaaagtggttaccggtaccggtactgagtggctggcgaatgccgcgcgaggtgatgtcctcgtggtcgccagtggccagtgcttcgagttggtcaccgtagagtcgaacacgcggatcactatcgatgcaccgccggcggcagaggtggccagcgccccgtacgtcctgctccggttcgtcaccaaccagggcgtgctggatctgctggagaagatcgaggagttcctggccgatcgccaggtgagcctcgatgagttcagtgcgtgggcgactggaaccgccgacggggggccgaacagcgatggcaagtacccgctgacggatcgctacggaaacgtcacgctggcggagtgtccggccaaactggcaaaaatcgcgggcgagggagccggcggtggtggcacgggcaccgtcaagcagttgaatgatgtcattccggacgctgatggaaagctgacggtgactgctggcgatgtcggcgcagcaaccaaagagcagggcgaacgcgctgattccgcagttcaggtcgcgacggccaggctgtatcgaccgctgctgaccgatgtcttggtgctgggggacagtcgcgccttccagtgtacgaagggcaatgtcggcttcgcggactgggcggtgatcgagaccggggggctggcagcgtttccgctggccctgaacaaagggatcgatggcaacaccaccgcccagatgctcgcgcgtctccagaatgacgtgatagccaactccgcggcattcgacgtgctagtgcatttcgggaccgggaacgaccggctccaggggatgtcgctggcccagaccattcgaaacctcgaatacctgtacagcgcgctgattcgccgagggaagatcgtgatcgcgatcgcagagactccggtgaatggggccggtatcggaatcaccgagcaacaggtggccgatcacttcgcagttcacgcctggtacatgaacgtcgctcccagcttgggagtcattgtagtgaatccctgggatgagatggtcgaccccgcgtcgggagaccgctactggccgaaggaggggatgacgggagacggcttgcacccagctccggtgggggctcgtatcatcggtcagcatgtggccgctgcgttgcgccgactgttcaccatgccggcgcctctcccaaccgcgaacgtcgcctatcacgcaacgctcgccccaggtggcagcctgatcgcaaattccctgctcgatgggacaggcggcacgctcggagcgggaagtaatgcctctggcacgctggccaatggttgcacgttactgggctccaacctcaacgggctggctgttgcagcgtccaaggagactgccaccgtcggcgccaagcaggtgctgaggatcacaggcacgccgactggcacccagccgacgctgacgctcgagcagagcgttgatgtcagcaaggtcgctgccggacagaaattgcgggctttggccggctgggagttcagcagtgtgaacgccagtgtgctgcaggttgcgctacagatcgttgcggttgtcggtgggaatacggtggtggcgcagatcggccagagccaagaactgacgcacacgctgcccatcggctctatggcggggactctggtaacgcaggtgctcacgctttctgcgcaaccaagcagtctgaaactgctggtatccgtggtgttcaagaccgggcttggccaggacgccaccatcaagctgcgccagatggatctggcgaaattgttctga

SEQ ID NO: 352111 - DNA, 843 bp, Pseudomonas aeruginosa
gtgagcataggctttcgtgtggtcaatgattggggaaacctctctgttgacgagaacaaccctatcttcattgccgtggacgagggagctggtgctgttacaaacgggggatggcacaacgtccaactgttcgaagatgagggggacatcgggggcgaggggatatttttggagtacacgttcttcggcacctcgactagcccaaccccgccgcttgttttcgccagacctagaggggttcgggctgagtctccgacctgcataggctactgtgccgcaaagggggctcctggtgcatggactggcgtggtcatcgcatttaccgtgattcacctacctggcgagggttcgtcgcttccgcagatatacaaccggcttcgcgactccatgtgcgagttcctggtggtttcgcctgatggctacatttcaggagagacccacggcatacgtgtttgggctccgggtgctggatcggtggtctttgactctggcaacaacgcagtcagctacaagcgttccagtggatcctggcaataccttggtcgagaccaggtactgcgagatcagtatttcgagcactggatcggtacggacggtttcagcgccagtactcgaaacgagtgggtgctcgtcagttctatcgggactggttacttcatgcgttacaacggcgagatcgctgggagccgtatctatgtacctggtaatccctccatgccgatggagcggaaaattcttaccgggcgatccggcaccctgatccacatgccacttctctatatcgaaacccggcgaccaatagagcagggaattatcctgcctcctggcaacggaccctcctaa

SEQ ID NO: 352112 - DNA, 276 bp, Pseudomonas aeruginosa
atgaccttcgtgattcgctgctacgacaagaacgggcagattaccttcgacagcacggttcggaccatcaggaagatgcttgcgatccgaacgcagtcgaatgtcgctggaacgctggacttggccccctatgccggtatgaagcttgatatctgcctcatgccggcggagaaccccgggctttctccggttccgttggtggtgatcgaggggaatacgctccgttggtctcaggcgcccgtgtcctgtttcttgatgctgggtgtgtcgtcgtga

SEQ ID NO: 352113 - DNA, 1764 bp, Pseudomonas aeruginosa
atgaccgtcaaacgctcgagcctgccgaccccgggtagtcaggtcccggcccagttgcgtccgtttttctccgccctgaccgagatcatcgagacaggggagggaaaccgaggcgaccggctggacaagaaggtgacctaccgcgatctgctggagtcgggcgcctttcaattgcggccgggctggcgcccaggtactggtggtgggctgaccccgaagccggggattccagacctggccataccgccgaagccggtaggtttcggtgcggctggcgtcttcggcatgatcacgctgacctgggacaacccctacaagctctatcgcaaccactcgctgacgaacatctaccggagcgaagtcgacaacttcggcgaggccacgctgatcagccgcgccacgggcatgatctacagcgacccgatgcgacaggatgcagtcgaccccaatgacccgtccaaggccatcggttactactactggatcacctgggtctcgaacgcaggtatcgaggggccgccgaacagccccaatggcacctacgctgagtcgctgctcgacatcgagtacatcatcggcctgatcaccaacgagataaacgagggggaactcgccaaagccttggtcaaggcgatggacctggaggggttgcaacagcagcttgcggcactcgatgctgcggcaaaggctgccaagctattgacttcggctgagcgctacctgcgcgacgacgagaacgtcaacatccgccgagaaatctccgacctccgagtgcagaccggcgacgacatcacggcggccattacccaactgcaggaggtgatcacctcggaccagcaggcgatcgctcaccagatcgacctgatgcaggctagcatcggccagaacgccgcagacatcgtctcggagcgcaccgcacggatcacgttcaccgaggtcggcactcgcgcgctgaccagcatgtcgtcacgtcttgaaacggcggagtcggtgctgacccagttcacggaaaccgtctccaccgccttggaaacccaggcgcggaacatggaggcgctggtctcgcggatggacaccaccgcggcgcagtacttggaggaccagcagaccatcgccagcgagttcgaggcgacggccaacgcaatcactacgctccagagcaacgtgaacgatcagtcggcagccatccagcagacgctctcgacccacacgaccgcgctggaggggctggcggcccagtacacgctgcgtctcgacgtgaacgggctgatcagcgggttcggtgcgtacaacgacggcaccacggctgatttcgcggtgctggcgaatcggttctggatcgcgacacctggtgcgcaggcagcgaattacctgcatccattcatcgtcgagaacgacaaggtctacatcaacaccctgatggtcaaggaggcatcgattcagcaggggcagatcggtcctatcagcatcgggaaactgtatgccaacgacggggtcacgccgatcaccactatcggtgggcagatacgtgccgaggctatcgatgtcgccaacatcacaatcggattcggccaagtctacggccaactcaccagttcccaggtcggcgccggaggcttgccgcgcttcgtgattgaccccaacggcgggatcttcatgaacggcctggttggaggaacccgcatggtcatgaccgatagctaccagcgctggtatgaccccgcaggaacccttcgaatcgagatcggagagcttctgctatga

SEQ ID NO: 352114 - DNA, 1617 bp, Pseudomonas aeruginosa
atgacatctatcgctattgccagcttccgcggtgagttgcctgccctgactccgcgcctgttgcagccaacaaatgcccaggtcgcccgaaatgtgaacctgcggaaggggtcgctgcaatccgagaccggacccgctccggtaagcggtatcggcggcgtcgccaacccctcatcgatctaccggtatccgttcggtaacaacggagcagggtattggttcgcgtggggggctggccaggtcgttgatgccgcgaagtctccgctggctcgcgatgcgtggtcgagggtgtactggacgggagatggatttccgaagtatgcgccgatcggcgtcgcaacacagggcgcagggccttacccttctgccttctacagacttggcatccctgcacccgccagtgcgccgctcgcgaccgaggcgaacggtaatgggacaccaccgtcgacgcaggtgaacgccgtctatgtcgtgacctacgtttcggcctacggcgaggagggtccaccgagcgctgcctcgaacatcatcactaggtgggatggtgctgaagatcagccagtgggcaaggtcaacctgcagttgccaccagcgccgacggggccgtacaacatcgtcacgaagcggctgtaccgctcagaggggggcggcgagtacttgtatgttgccgatttccctgtatcccaggcttcctgggttgacgaggtgaacagcgatgggcttggtgttccttgcccatcagtgaactgggatatgccggatgccaacatggttggcctggtcgaaatgccaaacggaattttcgccggctatttcgacaacacgctatgtttctgcgaaccctactatccgcacgcctggccggtggactaccagatcagttttcccgacaagatcgttggtatcggcgtcacctcggcgggacttgtcgtcgcgaccactgggcgaccgaggctcatcaccggcacgactcctgcagcaatggcagactccgcccctgatgcggatcgcgtgtgcgtcgcgcgccgttcggttgtcgatatgggcgagtacgtcgtatatgcctcgaccgaggggctggtggccgtttccggcggtgagccgcagttgatcacggatggcatcctcacgccggaacagtggcgcgcgctcaacccgtcgtcgatccatgcctgtcgctacgaaggccgatatctggccttctacgatggcggctgctttgccttggcgcccggtgaggggatcgagttcctcgatgtcagcgctgccggctcctactacgacatcgctgcggcaacgctctacctcatccagggcagctctatttccgcgtggcgcaaaggcgcgccgctgagctaccgctggcggtccaaagtgttcgagtttcctcccggcgcggccaacttcaacaccggcaaggtcatcgctgccagctatccggtccagttccgcgtttatgctgacggcagcctggtgctggatgccgccattgcaggcccgcagatgtttcggctgcctgccggttacagcgacgcccgggagtggcagcttgaggcggcgggtaccgcggaagtcttctccctgcagattgcgaataccccatctgagttgacctga

SEQ ID NO: 352115 - DNA, 696 bp, Pseudomonas aeruginosa
atggctgtgacaacggtaggaagcctgatctcgcgggtgaagttgatccttcaggaggtgaccagcaacggtactcgctgggcgaacaccgagctgctgggctggctcaatgaaggctatgccgctatttgtaatgtcaagccctacgcaagctctgtcacagccgaactcacctgcaaggccggaacccggcagacgattcctgccaatggtttgcgcctgctcgaggttatccgcaacaccgccaccggcactgatgggcttagcatcacgcagaccacgcgcggtgcgatcgattcgactcggcgtagttggcatggggagactgcagcgctggcggtagaacagttcgttttcaacgagagccagccgaaggagttctacgtctacccgccggcgttggctaccagcaagatcgagatcgtctactcggtcgtgccggaggggcatgctgcatcggaagcgaccaacacctcaaccgaagtgattcggctcgatgactcctatgccccggtgctggtggactacatgctcgccagggcctatgccaaggacgccgagcatgcggcgaacctcaatcgatcgacgatgcactaccagatgttcctcacggctctggggtcgaaggcgcagatcgagcagtttgaagttccccgtcctgggctcgtggcctcgcagcagcaggtagcgcaatga

SEQ ID NO: 352116 - DNA, 597 bp, Pseudomonas aeruginosa
atggacaagaaagcgattctcgatctgatcgagcaggccaagacggccgataaagacgccctggtcgcgatgctgaaggacctggggttgccgatcgacaaccgaaagggcgaggagaagcttcgcggcgagatactcgcaggtcttgaggcagccttcgacagcctgcccggtggtggggctgaggctgcgagtgctggcgtggacagccaggcggctccggatattcaaccccccgaagcgcagggtggagatgccggagccaccgaaagcggtcttgatgaggccgctggtggaggcgcgaacagttccacccagcctgctgcggcaccggccgtagctacggcgccgtcccacgtcgaaggcgaccaggtgcgcatcagccaacaaactgtgagcgacgcggctgtctcggcggctagctttggcggtgccgggactcccttgccatcacttgatgaggaggaagaggaggcaccggaagacgatgatccgaccgtggaggagaagaatcgcctgatacgcaacaccgtgacgggcgtcaccttcatctggaccccggaactggcgaagctcaactacatgcgcgaggtgtga

SEQ ID NO: 352117 - DNA, 939 bp, Pseudomonas aeruginosa
atgtccggtccaactcgtgctgctggccatcccgactacagctccaccggaaccgccgggttcattccggcgctctggtcgggcaaactggtcgagaaactctatgccgccaccgtcttcggcgagatcgccaataccgactacgaaggcgagatcaagaaccagggcgataccgtcaacattcgtaccgtcccgtccatcaccatccgcgactacaagatcggcggtggcctgacctacgagaagcccaccagcgacaaggtccaactgcagatcgaccaggccaagtacttcgcattcgaagttaacgatgtcgacgcctaccaggctgatatcaagctcatggacgagttcagcaccgacggtggcgagcagatgaagatcgccattgactcgcagttgctcggcaagcattacgccgatgccgctgcggcgaacagtggcgatgccgccggcgccaagtctgggaacatcaacctgggtaagcccggcgtaccggtccagatcactaaggagaacatcctggacgtgattgtggactgcggaacggtgctcgatgagcagaacgtgccggagcagaaccgctggatcgtcctgcccgcctggatgaacggcatgctcaagaagtccgatctgcgcgatgcatcgatcatgggtgactcgacctcggtgttccgcaacggcaaggtcgggatgctggatcgcttcaccgtctacatctcgaacaacctcacggccgtgaacgatgcgaccgccggcaagaacgccaacaacgtgatgttcggccacaagaaggcgctgaccttcgcaagccagatgacccagatggagaccctgcccaacccgcaggacttcgggaagctggtccggggcctgaacatctacggctcgaagtgcatcgaccccaacgcgatcggcaacctgtacgccagccgctga

SEQ ID NO: 352118 - DNA, 993 bp, Pseudomonas aeruginosa
atgagcaatctgccccgttccgttcaggcgcaaatcgacgctgccgaagcgatccaacaggacctgatgaaggccggcgagacgcccgcacccgaagcggattccgagtctgcagtacctgatgccgcgccggctgtcgattctgcgcccgacaaaacggttgaccctaacgcgcaacccgccgcacagccgagtcctgcggccttggagcgcgagaacgatgccgcctactggcagcagcgtttccgcgtcattcaaggcaagtacgacgctgaactgccggcgctgcgcaaggagatcaaccgcctgaccgaggcccttcagcaagcccaggccgccaagccgcaagagcccaccccgaccaacgacgtgcagcgtgctgctgccgacctcacggaagaggaactgaagagctacggtccggaactggtatcgatcatccgtcgcgtcgctgccggcatgaccgccggcaacccgaccgacctggcatctgtccagagcgaggtagcgaacctgcgtgaagccaccagccaactggccgccgatcgcgttcgcgaagcgcaggaacggttcttcgaggacctgcgccgcctggtaccggacgtgctggaggtgaacagttcgcaggacttccacctctggctcagccaactggaccagatcaccggaaaggtccgccagcagttgctcgaggaagcccaggaagcgaacgacccgcaccgcgttgcggcgatgttccaggcattcaagaacactctgtcgcagaagtcccccgaccctcagccccgccgggaaatcccggcggatcaaattcagccagcaccgaatcgcagcacggcagcacctgtaccgcagggcgaacggtggtggacgaattcagagatcaaccagttctacaaggacaaggccttgggcaaggtcgactcggcgaaggcggcagaaatcgaaaaatccatccaggcggcggtgcaagagggccgtatccggcaataa

SEQ ID NO: 352119 - DNA, 2307 bp, Pseudomonas aeruginosa
atggctgagatgggcctgctgcaattcaagagtgctgcccagctcaaggctgaacaggatgcggctgatgctgaaactgcggcagcccgccgccgcgaccaggtggaaagcaacctggcagcccatatccgaaaagcctttgagtctgcgaagactgccaagcgggagatcgagggccggctcctcgactgcgcgcgccggcagaaaggcgaatacgacgcccagaaactggccgcaatacgtgaatcgggtgggagcgaggtttacccgaagctgacgaccaccaagtgtcgagctggcgctgcgtggattcgagacatcctgatgccggtcactggtcgtccctggggcctggacccaacgccgatttccgacatcccggacgagcttctttcgcagttcgagcaggcgctacagcagcgcatggctgccgaggcgcagcaggatgaacagggcccgggccagggcgatcctcagttgttcagcagggagcagatgaaggccaagctccgtgaaatgattcagcagaaggccaaggaggcatgcgaggcgcacgaagccttgatcgccgaccagcttgccgagggcggttgggaggaagcgttggaggacttcgtcgatgacttcgtcacctacccggccgcgatcctgaaaggcccgatccttcagaaggttacacgcttagggtgggggcctgactggcaggtggaaaaggtcgaagaagttcagccgatgttctttcgggtgtcgcctttcgacgtgtatccatccccggactctgcggatgtcaacagcggctcctcgctgatcgaacggatccggttcacccgggcagaactcaacaagttccgtggtgtgccggggtacaacgaccaggcgctcatggaggtcctgcgcgagcatggcaccggaggtcttcgtgaatggctggcgacggacgccgagcgtgccaggttggaggatcgtcctcatgagtggatgctgggaggggagaccatcgaggcgctgcagtactggggaggtgctcagggcttgatgctgctgcaatggggggtaacgcctgatctggtgccggacgccctggcggagtacgaaatcgacgcagtactgatcggtcggcatgtgattcgctgcgtgatcaaccgtaacccgctgggcgggcgcccgtacaacaaggcgtcattccagaatgtcccaggcagtttctgggggcgtagcgtccccgaactgatggaggacgttcaggacatgtgctgcgcagctgcgcgagcgcaggccaacaacatggcgttcgccagcgggcctcaggtcgaggtcgacgaggatcgcctgcagccaggtgagaaccctaacgagatgttcccgctgaagcgctggcgcgtgaagtccgggcagactccgggagcgggtggcggggcggtggccccagtgattcgcttctaccagccggccagcatggccggcgagctgatgggcgtatacgacgcctgggagaagcgagcggacgatgccacgaacatcccgcgctacatctacggcagcgaaaaggtgggcggcgcaggcaacaccgcatccggcttgtcgatgctgatggagtcggcgaacaaggggatcaaggacgcgatccgccacatcgaccgcggcgtggttcgtcctgtcgtcggcgcgctctggctgcacaacatgcagtattcggacgacgagtcgatcaagggcgactacaacgtggtcgcgcgcggggccaatgccatgcttcagcgggagcagacgctgcaggcccgccagcagttcctggccggcaccaataacccgatcgacatgcagattatcggcatggaggggcgcgccaagcttctgcggaaggttgcggagagcctggacatgccggacctcattccgacgccggaggagctgaaggcgcgcaccgagcagcagcagaagcagcaggctgaacagcaggcggccgtcgcacaggcagaacagcagcaggcccaggccgagacccagcgcaccctcagccagtccaccgagagcgaagccaaagccgcgaagacgatggctgaggcacagcgcttgggcttggagaacggtgccgccgtagcccagcttgcacacgcaggaggtcagacccttgaaactctcggaacggcaactgcaagccctggcgaacctggccagcagcccggacttccaactggtgctggacctgattcggacggacctggcggagtcgcgccaggtgctggagacggcggaggtgccgctgctactccaccgcagccaggggagggtggcggtctgctctga

SEQ ID NO: 352120 - DNA, 360 bp, Pseudomonas aeruginosa
atgagccagcatttcaccgtcacctggaagcaggtcgccgacatcatcgcgcgccaggtcgtgccgtttgctgtgcctggcagccgcttgcgcaaggacatcgggaatgtacaggtcggcggaccggtgatcatcaaggaggtctccggcgaagtacctgccgtgcttctggctttcgagatggagggcgagtacggagtagagctgcaggtcaaactgcctgaattcgctgctgaccctgccgcctatatccgtgacctactggagaacttgcgaggcatccgctacagcgccgaccgtcgccgactcggtcgccaggcggagatcgctgctgtctacgaggggcttcccaatggctga

SEQ ID NO: 352121 - DNA, 1677 bp, Pseudomonas aeruginosa
atgaccaggagtaacggcgtgatcgtcgccgagggtgatcggctgcttgcgctgcacaaggatggcaggctgaacagtcgggctgacctgatcctggcgctggcgaacaagtggtaccggctcaacgcgctgtacaagatcaaggacaagcacggaaaggtgcgccggttcaggccgaacgccgcgcagcgccgtcgcttcactgaggggcacgtccgcgacatcatcctgaaagcccggcagctcgggttcaccacgttcgagatgatcgatgcgctcgacgactgcctgttcactgcgaactacagcgctgggtgcatctgccataccctgccggacgccaaggacatctaccggaacaagatccgttttgcctatgagcaactggtgggctcgccctggatggccatattccagcgtatcggtatgcgcttgccgcgcccgcggtcagacaaggatcagggctacatcttcgacaacggatcgagcatccaggtctcgacctcgttccgaggcggtacgttgcagcgtctgcacgtgtccgagttcgggaaaatctgcaagctcagcccggacaaggcgcaggagatcgttaccggtgcgttcgaagccgtagcactgggctgtcggcttaccatcgagagtaccgctgaaggccgggagggctactttttcacgtactgcgaactggcgcgcgcgatcaaggatgccggccgccggcccacggtcatggactggcagttccacttcttcccgtggtggggcgatcagtcctaccggctggaggaaatcgcagaggtcatcgttccccagtacctgcatgagtacttcgccgagttactggcgaagcatggtgttcgtctcgaccggcagcagcaggcctggtacgcgaagaaggccgagaccctcggcgaggacatgaagcgagagtatccgtccacgccggacgaggcgttcgaccagggggtcaagggcgcctactacctcacccagatgcgctggctgcggcagcaggggcgtatatcccagactgtcacatataacccggcgctgccggtgttcacggcctgggatcttgggatgggggacgcgatgtccatcgtgttcttccaggtccatgggctcgaggtacgagtcatcgactacctcgagcacaacggcgaggggatggagtactacggccaggcgctgaagagattgccgtacaactacggcggtcacttcgcgccgcatgacatcgtggtgcgcgagctcggtaccgggaagtcgcgaatggaagtcgctgcccagtatgggatcaagttcacgatggttccgcgtgtgtcgcgcaatagcgagggcgttcaggcggtacggcagtttctgccggcgtgctggttcgccgaggatcctaccgccgctgacgctgatgtctacgccgccgacgatggcgaacctgtgtttcgcaccaccggcgtgtcgcgcttggtcgactgtctcgacaactaccgcaaggaatgggacccgaagctgggggtgtaccgcgaccagccgcgtcacgactgggccagtcacggcgcgaaggccttcgagacgctggcgcggtgcggtgtattcgagcaactgcggaccacggcttcatctaactccacctccaacactgagaagggccgtcgagcctggggcgcacacacatga

SEQ ID NO: 352122 - DNA, 582 bp, Pseudomonas aeruginosa
atggcaagccagaaaaagccacgctcccgctttgattgggaggcggtcgagcgcgattaccgcaccggacggttctctaaccgcgaactgagccggttacacggcccatccgaaggcgccattcgcaagcgcgccgctgaccacggctggcagcgggacctgtcggagcagatacgtctccgcgtccaggcgttgaccgggcgcgccgcggctgaagccaccgaagcggcccgaacggacgcagaagtagttgagcaagccgctgaggccggcgcagagatcatccgcggccaccaggtgctgattcgcagggcgaaggatgtgacggaggggtacttggggcggctgggggagcaggtggctgccggcaagctgttgatccagatccgagacaaggtcgttgaggtggatattcctcttgactacgtcggcaagagcctggggtacgccaccgcgtcactcgagcgcctgatccggctgcagcggcaggctcatggcctggatgccgatggcagcggcgatgagggcaagtcgctggaggacctgctgaaggaggtcggcggagacgatgaccaggagtaa

SEQ ID NO: 352123 - DNA, 231 bp, Pseudomonas aeruginosa
atggcaatcgctgcaacctccatcatgttcgccttgctgctggcttggccttggctacgcccgcttctgccccgttgggcagcggtgctactgcccctgcttgggctcaccgccggagcgctgaccctcggtgcctggctgcacagggataacccctcggacggcgtcgaccagtccttggtggagccgctggcaagcccggtactcgccggccagttcgacgtccgctag

SEQ ID NO: 352124 - DNA, 381 bp, Pseudomonas aeruginosa
atgcaggttgacgtcatccgcgccggcgcgctgttgctggttgctgccattggcctggctgtgggctggcaggtgcggggctggaaggaggttagcgacgcagccattcgcctgcaggccgagcaggatcgccaagctctggcccgcagcgtcgtcgcccaagtcgccgagatcaccaacaaggcaatcgccggcatccgcgtcaccaacaccaccatctaccagaccgcccgccgggagatcgtccgtgaaccgatggatcctgcttgccgcctgcctgctggctggatgcgcaacatcaacgccgcccgcgccggcaagcttcgaccagagcctgctgcaactgtgtccggatctgccgccggtgccggtcgccgctga

SEQ ID NO: 352125 - DNA, 192 bp, Pseudomonas aeruginosa
atgaagggggctgcggatccgcgcgtagctcggaccatcggcgaggctgcggccaatggtgatggcacgttcaatggtattcggctgctttcctggctttccgaagtgctgcatcccggacacgggctgtccgtggaggaggttgaggaactgcaccagcaggttcgacaggagcagcagaatgcaggttga

SEQ ID NO: 352126 - DNA, 513 bp, Pseudomonas aeruginosa
atggctcgaatttcttcagaagaggccggcggcgcgaacgtggtcgcttttctcgacatgctggcgtggtcggaggggacatccacctcgccggcaaccagagcagacggttacgacgtgatcgtgactggacacgatggcaagccggaaatcttcaccgactacggtactcatccgttcgccggcgggcggccatccaagcggattaacagcaagggcctgacgtccaacgcttctggccggtatcagcagatgttgagggactggccgcattaccgcgtgaaactgcagctccctgacttcgggccaatcagccaggaccgtctcgcgattcagcatatccgcgaatgccgagccctggacgacgtcaagtccggccacatcagtcgcgccatcgaaaaatgcgctcgcatctgggccagtctgcccggcgccggctacggtcagcgggaacactcgctgcagcgcttgctgcggcagtaccagaaggccggcggagacctggtggcatga

SEQ ID NO: 352127 - DNA, 180 bp, Pseudomonas aeruginosa
atgaagttcagcgaattccgacgctggctgagggcacaaggtgtgaccttcgaagccggcaagggcagtcacttcaaggtgaccgccccgaacggtaagacaacgaccttcgcagatcacggcgccaaagaaatgccggagccgacacgcaaggcgatcatcaagcaactggggctctga

SEQ ID NO: 352128 - DNA, 432 bp, Pseudomonas aeruginosa
atgtacaacttcgcaatccgtttcgagcaagacgacagcgctcctggcgttgccgttttctgtcgagaccttccagagctgaacagctacggaaacaccgtcgagcacgcactcggcgaggccgttgatgccatcgaaaccacattgtcgctctacgttgatcagcgccgaccaattccagcggctagcgctccagaaccagaagagcacgtagtgcatcttccagcggtgaccgtcgcgaagatcgctctatggaacgagatgatgcggcgcgacatgcggaaggctgatctatgccgggctctaggcgtcgcccaagtacaggtcgaccgcctcgtcgactttctgcatacctcgaagatggagcagttggagtccgcgttaggggtcttaggcttgcgtcttttcgtgagtgtgcagcaggctgcctga

SEQ ID NO: 352129 - DNA, 888 bp, Pseudomonas aeruginosa
atgaagttgaacagcgcgcgacaggcttggcacgatgcgttccatgagagccgtgactccgtgctggcggtggccgccgagaaggccatgctgggcaagcgggggcgagtcgtcaacgagacccacccgagccgccgggacacgaacggaaggtcggcgcacatgctggctgcggggctggtgcaggccgcgattaagaccttgccgaagccgctgcagcacttcgggcatacgctgtattcgcccctcgctactggccaggatctgaacatcgctcacgccctggtctggttcacggttgagttgccgacctgctccgcgaagcgcagggaggtctcttattggatggctctggccgcggtgaggagccaccaggcggcggtctacgggcgggaaccttggtcgcaggggcagatctgcgagttcgtcagagactggttcggcaccgcgccgagcgtggcgcactgggcccgagactgggcggtgatctggaacagcctggcggctacggtggatagcctggacgccaaggcgctgcggccggtcgccgaggtcgtccgtcgggcatcaggcgcggatctacgactgcgggccggctggcgctgggttgaggttgatcgccggcgggtgctggagcagcgcgcggctggctatctggcgaagcgggaggcgatgcaggccagactgcgctctcgactggaggcgatggatgagccgatgctgctgacgtggtttgaacggatgcgccgatacaaccaggcataccgggaggagtggggcgaggacacctttctgcggaaggaggctcacgccatgtactgggatcggatcgatgcctactggtcgcagcggcagcgacttaagaagctcaaaaaacaggccgcttga

SEQ ID NO: 352130 - DNA, 708 bp, Pseudomonas aeruginosa
atgaagcccatcgttctcgacaccgaaaccactggcaccgaccaccagaccgatcagatcatcgaagcggcctggctgtccctgccggaacgcctggaggatttccaggctgccgccctggagcactacccttgcttccgcagcctgtacaggccgagcgtggagatcagtctcggcgcgatggctgttcacgccatcctgcccgaggatctgatcgacgctccagacagcagtgagttcagcctgcctcccaacgtctcgtacctgatcgggcacaacgtcgacttcgactggcgcatggccggagcgcccgagattccgcgaatctgcaccctggcgctcagccggtacctgttccccgaactcgacagccacacgcaatcggcgatgctctaccacttccatagggcggaacgcgagcgctgccgggagatggtgcgcaatgcgcattccgcgctggacgatgtcgtgaactgcacgcggctgctcgggcacttactggcacacgtgggccaggtgcagcccggcctactgggctcctgggacgccgtgtggcgcctgagcgaaaccgcgcgagtcccgacagggatgccctacggcaagcacaaaggcacgccgatcaatcaagtcccgagcgactacaagtcctggctgctgcggcaacccgacgtcgatccgtacctggtccaggccctgcgccagcggtag

SEQ ID NO: 352131 - DNA, 237 bp, Pseudomonas aeruginosa
atggaaaccccatctgagttcctctcgaaggaggagttggaggccatgatcggcgccaagtcatcgaaaaagcaggtcgagtggctggcatctcatggctggaagtacgaattgaatgccgtgcgccggccggttgtcggccgcatctatgctcgcctgaggctggctggcgtgaagcccaacagcacggttgctgttgaggaaccatggacccttgatctatcgcgagtcagttga

SEQ ID NO: 352132 - DNA, 1071 bp, Pseudomonas aeruginosa
atgggacggcagaaacgaccagaggaccggcatctgccgatccggatggtggcaaggcgtcggacctcgaagtccggcaagctctggattggctactactacctgggtaaggacgaaaccgggaagagaaaggagatcgctctgggctctgacctgaacgaggcaaggactgagtgggcccggctggagcgaaccaccgctccgaaagttatgcgcttcatgcgggagttgttcgacaggtacgagcgcgaaatcatcccgaccaaggctccgcgcacccaggcggataatcgggccgaactgagacagttaaggagggcattcgatagcgcaccgatcggtgctattacgccccaggtggtcgcccagtaccgcgatgccaggacggcaaaaactcgtggaaaccgggagattgcactgctctcgcatatcttcacactcgccagggagtggggctatatcgacggtgagaatccatgcgcacgggtgcgacggaacaaggagaaggcccgggactactatgcctccgacgatgtctgggaggcggtctacacccatgcctgtcaggagcttcgtgatgcgatggacctcgcctatctcactggccagcggcccgcggacacgctgaaggtctccgtgggcgatctggcgggcgagttcttactggttgcccagggcaagaccacgaagaagctcaggatccgattggttgatggcgaccagcaaacgggcttgggcttgttcatcgacggtctgctggaacgtcggaagctggctggaatcaccagctcgcgcctcatcacgaacccgactggtctgcgcatgagctacgccatgatgcgaaaccgctgggatgaggctcgggcaaaggcctcagcccaggcaatggccgcccgcgacgagccactcgccgagcgaatcaagcaattccgcttcagcgacattcggccgaaggctgcaagcgaaatcgacgacctggccgacgccagcaagctactcggtcacacgaaagagcagatcacgaagaaggtctatcggcgtgtcggagaagtcgtcaagccgactcgctga

SEQ ID NO: 352133 - DNA, 981 bp, Pseudomonas aeruginosa
atggctcgcggcggcatcaacaaggcagtcgttcataaggcacggcaggccatcctggcgcgtggcgaacaccccagcatcgatgccgtgcgggtcgaacttggcaacaccggttcgaggaccacaattcatcgctacttgaaggagctggaagaggctgagcgagggcgtagctcagcagcaattccgctgagcgagcagttggccaatctggttgcgcagatggcgggacagttaacggaggaggcgcaagcggcggtagccgaggagcgggagcagctagcccgcgagcggcgcgactaccatgagcgcattcatcaggcggagtaccgcagccagcaattcgaggcgcaatgcactgcccacgcggagaagcttcaggccttagagcagaacctccagcaagagcagcagcaacgccagcaggccgacattgagatagctcgcctacggcaagccaatggcgatctggaaacacgtctgcaagatcgcgacgggcagattcgctcacttgaagagaaacatcagcacgcccgcgatgcccttgaacattatcgcgtggctagcaaggagcagcgtgagcaggagcagcgtcggcatgaggcccaggtacaacaactgcaaatggagctgcggcagttgcagcaaaccctgatgatcaagcaggacgaactgacacagttgaatcgtgacaatgcgcgcctgctcgccgagattcgtcagcagcagaaggaacagcgcgcccagcagcagctcttggctcaaactaaccagacactggccaatgccgaacgcacgaacgcggctcaggaacatcggcttcagtccctgcaagatgaagcaaacagccttcgcaatacttccacggaacaggctctacaagcgcagagtctcagggagcgcttgatcgaggtcaccacgcaattgaagttgcttgatcagcctgcggcaacgagcagtggcgttgctgacggcacataa

SEQ ID NO: 352134 - DNA, 393 bp, Pseudomonas aeruginosa
atggacgaaaactacatcatcgcccgttcaattaaagaggcaaacaagtttattcaaacttgggaagaagccgacattgaaaaactaaccgacgatcaaacaagagctgcaattggctttgccagcaagatcaattcagagcttcgcgaatggatcagaatgcacctggatggtgagggcacagctcacgaagaaggatacttaaaggaacaacaggctccttggaaaaaagccaacactggtgatcttttcacagatttcggctggtggcaccgcatagcaaacctcatgctacacacggcgtatataaatcatgcgatgctcggcggcgatcagtatcacagtcgactgatgaagattttccgggatagattctcttatcccgaggaatga

SEQ ID NO: 352135 - DNA, 339 bp, Pseudomonas aeruginosa
gtggagagctacctgatcgcggcggcctatacgacgctggtcttcctcgtgcggctgctggtgctgtgcctgaccctgccgctgttcctgatggccgccttcgtcgggctggtggacggcctggtgcgccgggacatccgccgcttcggcgcgggacgcgagtcggggttcatctatcaccgcgccagggccagcctgatcccattggccgtgctgccgtgggtgacttacctggcactgccggtcagcgtgaacccgttgctgatcctgctgcccagcgccgtgctgctcggcgtggcggtatgcattgcggcggcgacgttcaagaagtatctgtag

SEQ ID NO: 352136 - DNA, 3276 bp, Pseudomonas aeruginosa
atgagaatactgcaggtacgcttcaagaatctgaactcactggtcggcgaatggcaaatcgacctgatgcacccggccttcgcgtctgatggcatctttgccatcaccggccccaccggcgcggggaagaccacgatcctcgatgctatttgcctcgccctttatgggcggacgcctcgcctgaacaaggtcaccaagagcggaaacgaaatcatgtcccgccagaccggcgaatgcttcgccgaggtgaccttcgaaacccagactgggcgttaccgctgtcactggagtcaacaccgggcacgcaagaagccgtatggcgaactccagccaccgaagcatgagattgccaatgctgattctggggagattttcgaatccaagatcagaggtgtagccgaccagatcgagtcggctaccggcatggactttgtccgtttcactcgctccatgttgctggcccaaggcggctttgccgcgttcctccaggcggcaccggatgatcgggctccgatcctggagcagataacgggtacagagatctacagccggatatccatccgtgtccatgagcggcagcgcgaagagcgggaaaagctgaacgtgctccaggctgaaacggcaggcatcgtgattcttgagccggagcaggaacaagagattgggcagtcactcgagacaaagcagaaggaagagacagaccttgccgccaaatccgctgacaccgggaaggccattgcctggctctccaccattgatgggctaaagaaggaaatcggcaacctggctgacgaggcgagcaagctgcaaatcgatatcgaggcgttcaaaccggatcgtgaaaagctcaaccgggctttgagtgccgcctcactggacggtgcatacgcaacgctcaccgccacccgcaaacaacaggcggatgacagagcagcgttgaaaactgaggaagaggcgcttcctggactggaatgctccgccaaggaacacaccgaggcactgaaatcggctgagcaacaaaccgctcgggccaaagaagagctgaaagcggccgcgcctacattgcagaaggttcgctccctcgatcagaaacttgccgatcagaaaaaagctctttcggaaggtgatgagggctgtaagaaggatgcggcaaagattgatgtagacaaaaaagcccggctcgaagagcaggaaaaacgatccaaggctcatgagacgctggatcttgtgggcggctacctcaaagagcatgcacaggatgaatggctgatcagcggactggctggcgttgaagaacagttcggaggcctgctctccaagcaaaaagaaatcgttcaaaaagaagctgtccaagaaacggccacgacggctttggaactggcgacaaagtcactcgacgaccgtcagaaacaatcaggcattcggaagcaggaactggaggaggtctcaaagcagattcagcagggcaaaaatgcattgagccagcttctgggagaccgcttattgcgagaataccgcaccgagaaggaaaccctgctgcgtgaaatggccttcctgacgaaaatagcggagcttgaagatcaccgggcaaaactggaaggcggcaagccctgtccactctgcggcgcaaccgaacacccctttgcggaagggaatgtccctgtccccgatgaaaccgaaaagaagattgacgccctgaccaggatgatcagcaaagccgaggatcaggaagccgccatcaagagacttgaagaagctgaaagcctggcccgtaaaaacctgacggaggctgaaaagctggagtcagcagcggctaatgacaagaaggctggcgaaaaagccatagtcgaggtgaaggacggcctggtgaaactccgtgctgattttgccgaacgcaggcaggccgtctctaccaaactccagccgcttggtattgctgaaattcctgaaacggacatttcatcactgatcgaaaccctcagagtgcggctgaaagcgtggcaggcccaggtcaagaaaaaggcggacatcgagaaacagattgccgacatcgacagcgagctgaagcggctggatgcggttatcgaaactcaaagcaccgccctggccgaaaagctggagcgcttggagaccgtgaaaaaggaactcgccaccggaagtgatgagcgtaatgcgctttacggagataagaagcccgacgatgaggagcgccgtttgaacaaggcgatttctgatgccgaaggtgccgaaaagcaggccagagaactgaacaatgagttccaacaaaggcggaataccgcgaaggcccatgtcgaatctctgaagaaacgcatcgaccaacgagagccggaactgagaggtctggaaaccgaattctccgcagcgctcgcgcccgttggtttttcaaatgaagaacagtttttggcggccaggcttccctctgaacggaaggctgaattggcggctacggccaaggatctagatgagcgccaaactgatctgaaagctagacagaaggatcgggaaacgcgcttgaccacggagatggccagcaagatcaccgacaagtcgctggaagagcttgagccccaattcaaggagcacgaggaagccttgaaagagctgcgggacatcattgccggtctcaagcacaagctaagtgagaatacggctgcaaaagagcggataaaggaaaagcagacagctatcgaggcccagaaaaaagagtgtcgcaggtgggaaaacctgcacgaattgatcggctccgcagacggtaagaagtaccgcaattttgctcaggggctgaccttcgaaatgatgattggtcacgccaacgggcaactgcagaagatgaccgaccgctacttgctggcccgggacgacgctcagcccctggagctcaacgtggtcgacaactatcaggctggggagattcggtccacgaagaacctttccggcggggagagctttatcgtcagcctgtccctggcactggggttgtcccatatggccagcaagaatgtccgggtggattcgctgttcttggatgaaggcttcggcaccctggatgaggaagccctcgacaccgcattggaaaccctcgcgggcttgcagcaggacggcaagctgatcggcgtcatttcacacgtacccgccttgaaggagcggatcagcacgcagatccaggtaacgcctcaaaccggcggcagaagccagatatccggccctggatgcggcagattgagcgctacagaacgggccgtagaagcaggttag

SEQ ID NO: 352137 - DNA, 1230 bp, Pseudomonas aeruginosa
atgagagttctccacacatccgactggcacattgggcgcactctttatggcagaaaacgctacgaggagttcgaggcttttctgacctggctggcggagacgattcagcagaatgaaatcgacgcgctgctggtagcgggtgatgtctttgacaccagcgctcctagcaatcgtgcccaggagctctattaccggttcctgtgccgggtggccgcctcgtcctgtcggcatgttgttgtcgtcgcgggaaatcacgattcaccgtccttcctcaatgctcccaaggagctgcttaaggcccttgatgtccacgttgtcggcagtagtacggaatccctggaagacgaagtgctggtgctccgtaatgagcaggacgctccggaattgattgtctgcgccgtgccctacctccgcgaccgggatatccgcgtggcggaagcaggtgagagtgtcgaggataaggagcggaagctgattgacggcatacgcactcattacgccgctgtcgccgctctggccgaacagaagcgcgaggaactcggggttgatattcccatcgttggcacggggcatctgttcaccgctggcggacaaaccgtcgatggcgatggcgtgcgcgaactctatgttggcaccctggctcatgtgacggcggggattttccccgcgaactttgattacctggcacttggacacctccatgtcccgcaaaaggtgaacggctccgaaaccatacgctacagcggctctccactgcccatggggttcggagaggcaaagcagcagaagagcgtttgtcaggtcgaattccacagtacgtctgcatccgtacaactggtcgacgttccgatgtttcaaaagctcgaacgcgtcaagggagactgggacggcatctcaagccgcatcctcgaattgtcggcaacggactcccaaggctggctcgaagtcatttacgacggcattgaggtcattggcgacctgcgagagcgcctggaggaagcgatttcaggcacccaaatggaaattctccggataaagaacacccgcatcatcgaccgcgtgctgggacaaatccatgaagaggaaacactcgacgatctgaacgtgaacgacgtgttcgaacgatgcctcgccgttcatgaggtgcctgaagaccagcggccggaactgcttcgggcctaccaggaaacggtctcgtctctctatgaagacgatgtgcaggcggaatag

SEQ ID NO: 352138 - DNA, 2577 bp, Pseudomonas aeruginosa
atgagcgggatatcggcatcactgacgaaatggttttcagagcgcccccagtggctccagattgcggctactcggctacttcagcagtccgagcttaccgaaagagacgtctctgatctcgcaaccctgtgccagcgggaagccgacggaaagttgcccaaaacgacttgttcctttcccgctaccgcgttctcccagggcgctgcaggcaccttgcgtttgtgctcaatcagtgatgtcgaaggagtaaacgcccttgctccaaaaaaaccacttgagtttggtaagggtaatatcacgattgtttatggcaacaacgggtcaggcaaatccggttacgtcagactcctcaagcatgtatgcggtgcccgcgagacgggtacccttcaccgcaatgtctataagcccggctctgccgtacagaaagcctgcatttcgtttgagcaggacggcattccgaagagtcatacgtggtcaggacaagggatctgcgatgacctcaatagcgttgatatttttgacacctcctttggcaaggtctttgtcagcagcgaagacgaggtgagctacgagccgccggtattatcgtttttcagctcgctcatcctcgcttgtgaaaaggtcgcctccgccctggacgccgaaaccaatcggcaccagtcaaaaaagccgaatatcccggctgacaagaaggtcactcctgaaggcatctggtacgaatccatcagcgccaagaccaccacccaagacatcgacaagcgttgcgcatttggcagcgctgacgagaccgagatgcaaacgctgcagcagcgccttgccgaacaggcaccggcggaaaaagcgaagcagctgggaaagcagaaacagcatatcgacactctggtccaggatgcccaaaagtatctggagcaattatccgacgagaattaccgacggataattgctgccaagaagaaatcgatcgtcaagaagactgcgtcagatacggcggcggaaaaggtgttctccggcagcgaattggaaggcatcggatctgatgtctggaaagaactttgggaagcggcccggaactactccgtatcggctgcctacaaagaagccgagtacccgaatgtttctgatggctcccgttgtgtcctgtgccatcagaccttgacccaggaggccaaggagcggttggtctccttcgaaaatttcgtgaagggcgaaatgcagaaagccgcaacagatgcggccaaggaatacgagaccgccagtcaaactatcgaggcgataccgacatcggagacgctgaagacacgtatcgatgcggctggcattccacaggatgaggtcgccagccaggtgacggatttctttgctcaattgcaggccaggaaagaccaactccctgggatcgattccgaagaagccattcccgaccctctgctctcaccgaaatggatcgaagaagccaacacccgctcgaagagcctcggtgaactcgcggcaaaatatgacgaagacgcaaaaagcgacaatcgagaggagatcaggaaaaagctaaacagcctgcaggccagaaagtggttgtctgagcaccgcgccgccattgatgaagaagtcacccgattgaagctgctaaaccagattcaggaagccaagaagtcgaccaacaccaaagccctgtcccagaagaaaggggagctggcagaagccttgatcacggatgcgttcgtgcaaaggttcaatgcggagctcaaggccctgggcgcgtctcaggtgaaggttgagctcgtgaaatcaaaagtctccaagggccgcgtccttcataagctccagcttcgaggggcctctcagaatgggctcgccgatgtcctgagcgagggagaaaatcggatcgtttccattgcggcatttttggccgacgtcaccggcaagagcaaccaggccccatttatcttcgacgatccaatatcttcacttgaccaaagctatgaagaggccgtggttcaaaggctgatcgagttgtctcaggataagcaggtcattgtctttactcaccgcctgtccttgctgggaacggtcaggcattttgccgagaaaaagactatcaagcccgatgtggtgagcatccgctctgcggactgggggaccggagagccagctcccattccactttcacagagtgacatcaaatccgccctgaacacactcatgaatcagcggtatcaggatgcaaagaaggcaggtgagaacggcgaatttgaacatgccgaaatcttgctgaagtcgatatgcagcgactttaggaccttggtggagcgctctattgaaaatgatctgctgtgcggggtggttcaaagatttcagcgaccggtccatacgttgaagctcaaggatctggctaaattgaaggacgcggattgcaatctccttgattcgctcatgaccaaatactccgggtttgaacactcgcagccaacagagtcaccagtggagctgccgaagccagacgatcttctggccgacatgagttcattaaaaaactggcgtgaagaatacgcgaagcgccccgcctctgcggtggctgggtaa

SEQ ID NO: 352139 - DNA, 2103 bp, Pseudomonas aeruginosa
atgagcttgtcgcccctcgcctatgctgactcactgcgcattggcaccattgacttcgtctcgcccgacgagatcaaggtgctgctcgacatcgaggcacccgatggcgtggcgctcaataccggcacgccgcgtcccttcccacgtatcaacggctatgtgctgattcccagcgacgatgggcatttggttgcccaggtcgagtggatcaccattgagcgttcgcaataccccaagcgcaagggcatgcaggacttcggtctggtggatttgccctatcccctgcgcaagatgagcctcaacccgctgggggtgctggcctatgagggtaaggacacgaagggcaatgacgcctatcgtttccggcgcggcgtcgagagctatcccaccgtcggcgatgcggtgctgctgcctacgcaaaaccagctgcgcgccattgttgaatctggcgacaaccgccatgtgttgatcggcagcagccccttggccgccaacgccaaggtaatggtcgatcccgaccggctgttcgggcgccatctggcggtgctgggcaacaccggcagcggcaaatcctgctcggtcgcaggcttgatccgttggtcgatggacgaggcacgcaaagcccgtgacggtgcagaccccaacgcccgcttcatcgtgctcgatcctaacggcgagtacgccaacaccttccgcgacatgagcaaggtgcgggtgtttgccgtcgagcccagcgcaggcgtggagcaactacaaatcccgctgtggttctggaacagcgtcgagtggggggcatttacccaggccagcgccaagacgcagcgcccgacactggtgcaggcgctgaggtccgtccgtgacggcgtgttcaccgcaacagtcacgcccagccatgagatgcgccgctatctgcgcacgctcgtatcggcgattcaagttgaaagaaactcggggaacccttggaaaggtgccgggcctgcaaagggcttccgagatcgattgatcaagtggaaagaaggcttggcggatagcgccagcttcagccagacggaaagcacggcacttagtgagttgatccaacacatcaccacgctcttagctgcacatccaggtgattggccaccaattttcacccctcaagagatcagctcactgatcggcgagctgagcagcacgcattctatttttggcggtagcgacaccgacatcctgcccatcgacgccgatgtgccgcgcccattcagcggcgaccaactgctgagaagcgtggaagccacggctgaactgttgggggtgtccgagtacgtcgagaccatgcagatgcgcatccgcaccctgctatcggacagccgcatgaggatcgtctcgggcgctgcccaagacctcactttggacgactggctgcgcaactacatcggcgacaaccaggcatccaacggctcggtcaccgtcatcgatctctcgctggtgcctgccgaggtggtgcacatcatcaccgccgtgatcgcccgcatgaccttggaggccctgcagcgctatcgcaagctgcaccacggcaagaccttgtccaccgtgctggtgatggaggaagcccacaccttcatcaagcgctaccacgacgacgcggaaaaccagaactcggccgctatctgctgccaggtgttcgagaagatcgcccgcgaagggcgcaagttcgggctgggcttggtgctttcctcccagcggccgagcgagctgtcgcccaccgtactgtcccagtgcaacagctaccttctgcaccgcatcagcaacgaccgcgaccaggaactggtgcacaagctggtgcccgacaacctgcgcggcctgctgcgcgatttgccatccctcccatcgcgacacgccatcctgcttggctgggcatcggaactgccggtgctggtgcagatgaacgcgctgcccgagcagcaccggccgaaatcggacgatccggatttctgggcggtgtggtcagggaaggacagcaaagaccagatggtcgagcgcagtgtggattggaaaacgattacggacgactggcagcagatcaatgcgctggcgcaagatttggagagtgatgatgagtaa

SEQ ID NO: 352140 - DNA, 327 bp, Pseudomonas aeruginosa
atgaatcgcatcagttcgccctccctgagcatcaagctcaaggcggctttgtcccgtccaccgaagatcgtttccgcttacctggatgccagttacatcggcgttgctcagggcgccggcgatacagtcccgatcggttcgccggccggaggctcgttccgcggctggtggagcaatggctgctacctgatttacaaagaccaggccgtcgccttgcgcgacaacgtccagcgaaccctcgccgttctgccggagtaccaggatctgttcagccgctcgagcctggtcaagggcctgcgcatcatcacaaccccgtcgttcgactga

SEQ ID NO: 352141 - DNA, 858 bp, Pseudomonas aeruginosa
gtggctaaaacaaagttagacatcatgagaaacacagtgcccgccgagatttcggtacagttatcacaggcactcaacgtcatcgagcatcatctgggatcgacgttgctggccatgcatttgtatggctctgcactcgacggtggcctgaagccatacagtgacattgatttgctggttactgtgaccgcacggctcgatgagagtgtgcggcaagctctgttcgtcgatctcttgggggtttccgttttccctggtcaaagcagagttctccgcgccttggaagttaccattgtcgtgcacagtgacatcgttccttggcgctatccggccagacgggaactgcaattcggggagtggcagcgcaaagacattcttgcgggcatcttcgagcctgcgacaaccgatgttgatctagccattctgctaacaaaagcaaggcaacatagccttgccttggccggttcggctgcggaagatttcttcaacccagtcccggaaagcgatctgttcaaggcactggccgacaccctgaaactatggaactcacagccggattggataggtgacgagcggaatgtagtgcttactttgtctcgtatttggtacagcgcagcaaccggcaagatcgcgccgaaggatgttgccgccaactgggtaatggagcgtttgccagttcaacatcagcccgtgctgcttgaagcccggcaggcttatcttggacaaggagaagattgcttggcttcgctcacggatcagttagaggcgtttgttcacttcgtgaagcatgaagccactaaactgcttggtgccacgccaatgatgtctaaaacaaagttagatgcactaagcacataa

SEQ ID NO: 352142 - DNA, 504 bp, Pseudomonas aeruginosa
gtgaccgacccgcggctgaaacagaagctgcgagataccacaggcatcggcaccgaggcgacacgcgccaacatcatcaacggtctgatcggtcgcggctacctggtcaagaaaggccgcgccgtccgcgcttccgacgcggcattcacgctcatcgacgcggtgccctcggccatcgccgaccccggcaccacggcggtgtgggagcaggcgctggacatgatcgaggccggccagatggcgctggacaccttcatcgagaagcagtccgtgtgggtcggtcagctcgtgcagcagtaccgcggcgcgacgctctcgctcaagctgccgccgacgccggcctgcccgcagtgcggcgcaccgatgcagcagcgcacgggcaagagcggcgcgttctggtcctgctcgcgctacccggactgcaggggcacgttgccgatcgagtccccgacgggccggcgcagcgcaccgcgcaagcggcgcgctgcctccaaggcgtcctga

SEQ ID NO: 352143 - DNA, 1605 bp, Pseudomonas aeruginosa
atgcaccaccgtttccgaccggaagcagcagtccggccaggccagcagcacgttgaggaccacaccgagcagcgtcgtgtcgcgcttcgccagggcctgcttcagctcctgggtcaggcgacccgccagatcgcgataggccgcagcttgcgccgtgtccatcgcgacttcgcggaactcctcgtcgtagggcggcagcacatttccgccgatgtccttcaacttgaggaagaccgtgaacggcaggacgcaacgcagcacgcccttgggaccgaaacccggcgccttgaccgtgcgcaccgataccttggtgcccttggctgtcttgtgcgccgtgccggtgctctcggaatagatgtccttgagcaccccgtgatcgcgcatgaacgccatcgcggccgacgtcatgctgccgctcttcgtcggccggtagccatcttcgatcatccgccccggcagggctcggaacagcaggtggaacaggtcgtcgccgtagccgcccatcagtgtgccggtgagcagcagcgtcttgcgcgccttggccgccaacacccccatggcctggccctgagcggagccgccgttcttgtactcgtgcgcctcgtcggcgatgagcaggtcgaacgtgccttggggaagctgcctcttgatgaactcggacggctggtagccgccctcgccgaagccgaactccatgttggccatcgcacgttccatgcgatgggcttgccggtccgagaagaccagctcgccgttgccatccatcaggttgatgaactcgtggatgttgtccccgagcatcgacgcgaggaaggcgtcaccgaacttttgcatcagcttctgcgcggtgacttccccgatggttggaatacgcttcagtgccttgagcacggtcgaggactggtcgctggcggacaggcctctcggacggatcaacgaccacagcggtgcacggcagtggctgcacttgcggcgggactcctcggcttccagctcgaccgggttgatcggctcgccgtcgaggtcggtgatgatgtggccgcaagccgggcacgcacccacgtcgccgtgaggcgtgcgccgccgaacgaagacaggtttccagtggaagcccatccgcatccgcacgcggcccaggacgaagaactcctggccctgggccggcacgcccaactgctcgcgcagtttcagcagcttgaccagcgtgtccgggccattgagcacccagaccttggctccagccaccgtctcctggatttcgcgccgccacttgtagaccaggtggggtggcgagagcaccagggtgcggcggtagccttcggcgttgagcacggcggcggtggcaatacccaccgtcgtcttgccgcagcccatctcgccattgacgatcgcggcgcgttcgccgcgatcgaccaacagctcggtgacggcgtggaccacatcggcttgcgccgggaacagcttgcgcttgagcgcggcgaggatcagttgccgatgcacccgcacctggccggtgtagaccggaggattggcgcggttcagcgaatcgagcaactcgtcgccgaactccgatacgaagtcctgcaggctgagcgtgaggggtga

SEQ ID NO: 352144 - DNA, 246 bp, Pseudomonas aeruginosa
atgcagcgccggcagaacctggctgcgctgcgcatcctcgccatcggcatcgtccggccccggcgtcgccagcacctcgcgccagccggtgacggcgatctgcttgcccacggccgccagcgactgactgccgcacgagaactgcgctaccgtccggtcgaactcatggtgcgggaggaactgcgcgaggtaatgagcgcggatcagccggtagacggccagttccttctcgttcatggccgatag

SEQ ID NO: 352145 - DNA, 486 bp, Pseudomonas aeruginosa
ttgccgccgccgacccatggcacgccgttgttccctttgttggactcggcccgctcgatggcggagacggcgtcggtgctgctgaccgcatcccgcagcgccatcccctcggcgagctggtcccagccggcctggccgccggccatgtccgccatgcgattggcgatggcccggcaggtcatcttcgagcggtcgaaatccaggcgcgcctgcaggatgccgttggtgagcaggttgtacaggcccgggtcggcgcgctggatgatcagcgccggcagcgaggccacggcgctggtggcgttctggatcacgttgctcatgatcgtctggaagccgttggtgatgccgttgagctggttctgcagcgtcgtggtgatgctcatgtcgccgcagatcaggttgctgttccagccgacgccgacgccgatgctctgcatgttgccggcaccacccatcgacacggcccggccgccgccgatgctgtag

SEQ ID NO: 352146 - DNA, 429 bp, Pseudomonas aeruginosa
atgcacgagccggccgcgactgccggggcacgcctggcggagtgcgcgggcgagacggggggacataccacgttctggcaggccgtggcgtggctctacgcgaacacccgtggcgacgggcagggtgtgccggcgagcctgcactatcccgagctcacgccagccatgcagggctgtctcgagagcgatcgccccgatgccgtcatccgtgctcaggcggtggaagccgcggagcagggcatcgcggccacaccggccttgcaactgcgcgaccgcgagaccggcaagaccctcctgctgcacgggcctgtcgaaggtgatgccttgctgtcggccatcgacctgctcgccgccagcggtacgaccgttgccgaacctgcccattccgaagacatgcccaccggcggtgccggtgacatgcccaggtag

SEQ ID NO: 352147 - DNA, 429 bp, Pseudomonas aeruginosa
atgcacgagccggccgcgactgccggggcgcgcctggccgagtgcgcgggcgagaccggcggacatgccacgttctggcaagccgtggcgtggctctacgcgcacacccgtggcgacggccagggcctgccggagggcctgcgctattccgacctcacgccagccatgcagggttgtctcgacagcgatcgccccgatgcggtcatccgtgcccaggcggcggaagcagcacagcagggcatcgcggccacgccggctctgcaactgcgcgaccgcgagtccggcaagaccctcctgctgcacggccccgtcgaaggcgatgccttgctgtcggccatcgacctgcttgccgccggcagcacgaccgcagccgaacccacccattccccagacatgcccgccggcgttgccggtgacatgcccaggtag

SEQ ID NO: 352148 - DNA, 438 bp, Pseudomonas aeruginosa
atgagtctgcacggcgtttacgattcccagaacatcttcgccaagatcattcgcggcgaagctccctgctacaaggtctacgaagacgaggacgtgctcgccttcctcgatctgttcccgcagtcctacgggcataccctggtgattcccaagcacgccgaggcgcgcaacctgctcgagatcgatgcgcagaacctggccaaggtcatggccgtggtccagcgcctgacccgcgccctggtcgaggaggtgcagccggacggcgtgcaggtcgcccagttcaatggcgcccccgccgggcagacggtcttccacatccatttccacatcgtcccgcgcttcagtggcgagaacctcggcatccatgcggcgaagcagggcgacccggaagtgctcgcacaacttcaggagcgtttggcgcagcgtctgcaaggctga

SEQ ID NO: 352149 - DNA, 1329 bp, Pseudomonas aeruginosa
gtgactcaaaattcaaatacgaatgatgcgccagtcccaccacctgctcacgtcgtgcctacaaaagcacctcccttacccgccatacatgacgctgcgcagcaggcacgaaatcttcggctggtacttcaagacgacaaacagcgcataggttgcttccttggtgctggctgccctcttggcgtttacgacgcagaaggaaaagaaagcatcgtgctgattccagcggttgtggaattgaccaagcgtattgctggtgggctgctgtccgcagatgaagcccttggagctacgtcgaagttcaagaaacactgggacgcattgtgcgaagaatgcaaaccagcagatggcaaagaccctaccgtagaggacgtgctgacggaattgcgtactttggcaaatcgccgaggaagcgcggaaattttggggatgacaaaaaaggacttgagcgaccttgacgagaaagtttgcgcgttaatcgcaacggaaatacggaagccattgcccgtgtatcgcaacgcgtacaaccgttttgcgtcttggatcggcggggtatatcgaagctcacctgctgaaatatttactccaaactatgatgttctcttcgagcaagcatttgagcagcatccgctcccacacttcgacggatttgttggttcgcacaagccttggtttgatttggcctcgatcgagcacgacgttatcccctccagatggacgaggttgtggaagcttcacggatcaatcaattgggagaaaagcgaagagatcgtaaatggggcgaaggtaacccgcgtcgttcgtgtgacccgtgaggcagaggcgggcaaggtcatgatctttccatctcatctcaagtatgaccaaagccgtcgcatgccgtacctcgcgatgcttgatcgactaagagccttcttccatgggaaggatgctcctagattggtggtgtgtggatattcttttcttgacgatcacttgaatgaagtcttgcttgatgggttgagggggaatcgcaatgcccagtgctttgcgctgatgtattctggacttggacagcactctagagctgtggactatgcagtaaagcaaagcaatctcaccgttcttgcttgggacggagcggtcgtaggaacacgagtaggccgatatcgacccggaaccattggtggcaatgagcacactccttggctcactgaagaagagaccgaggttggggatggctctaaagagcagcaaccgcgcagtcgtttaggcgatttccactactttggcctttttcttgaacagctttgcggcgggggcactcacgatgcacaaccagccgggtaa

SEQ ID NO: 352150 - DNA, 651 bp, Pseudomonas aeruginosa
atgaaagagaaaccaaatgaatgggtatctatttctgacttgatggccggggtgatggccgttgtcatgctgctgctggtgctctcggtgctgcagaacaagtttgccgcactcaagcgcgagcaggagaaagctcaaggcgcgcagactgagcagcagcgtgtggtggacatgctcaagtcgatgcgcagcaccatggacgacgaaggcgagtctgggctggtatcttttgatctgactggctcgaaaatcaccttgcgcgaccgcgtttttgctcgcggcagtgcatgtgtaactgatgaagcacgtcacgccctttctagcctggggccaaaaatagccgagtttgtgaatggttcggcgcaagcccaggtatttgtggaggggcatacggacaacgtccaagtgtctcgtccggtgacggactacagcaagttctgcacggtgtatgacgacaacttcacactgtcggcagcccgggctcgcgaggctcgcaaactgctgattgcactgctcgacgaacagcaagccaagcgggttattgttgccggctttggcgactctcagcctttgccgggacttgagccaggcgacgagaaaaatcgtcgggtggaggtccagtttcttacccgtcctgcgccacgcacctga

SEQ ID NO: 352151 - DNA, 2445 bp, Pseudomonas aeruginosa
gtgatcaaggatatcgtcgagttcctgacgcctgctcaggaacctattcagatcgtgttcttcacggtcattgctctgggggtggtgctgtcagtgctgctggtcagcctgagggccaatcccgtgtcctggcagcgcaagtgggagggcgaggattttgatgctactccctccgggctcgaagtcgagcatggatcgatcagcgagttgagtcaggcggtggcaacacccgccgagaaactggccggcatgatgccgggcctgctgttgatcgtcggcttgcttggtacttttctggggctggggctggcgctggacaaagcgtcttcgattttgcaaagcagtggttcatccgtcggcgcgatggatgactcgatgcagaaccttatggccatgatgcagggccttggcaccaagttcaaaacctcgacctggggcatcatcgcattcattctgttgaaggtatgggagtcctggagtggttttgaagagcgtcgcttgaagtggtgcatcaacaagatgaagggcgagctcggccaggcgcgcgagatgcgcgagcgggaaaaactagaaagtgaagaaaggcagcatcagtcactgatgggctcttcgcaactgattgtcgacgcgctggctgtgcagacagacgcgatgaaagtggcgatggagcaacagaacctgcaggcgcggcagattcacaaggtctgggggcaaaagtttgaggccgttgagaccgggttgggggcgttgcaggccggcaataaagtgctggtcagccaggcggtgaagttgaatgaagctcaggtcgagtcgctgaaggaacgctttgcagagcttcaggcgctgcaacagcaattggcatcggaggctgatgctcggcatgccgagcataacgctgagcatatcaaagcgatgaaggagtccttcgctgaactactgacggactgtcactcccttgcccaccaggctgaacagcgcgacaacgcgcaccttgaggccatgacagttgcatttgccgggttgcaggacagccatcaggctgccgccgacctggcgaatgaacagcagaaatcgaacaccaaagccttggcgcatggtttcaccagcctcgaggcgctgcatcagcaattggcatcgaacgctgatgggcagcacaccgcgcgaaacgcagcgcatatcgcagccatgaagcaggccttcgctgaactgctgacggactaccacacccttgcccatcaggctgagcagcgcgacaacgcacaccttgaggcgatgatcgctgcctttgccgggttgcaggacagccatcagactgccgccaatcgggcgagcgagcagcaggaactgcataccgaatccctggtgcaaggcttggctagccttgtggcgggcaacaagcagctcgcgcaggaggccgccgcacacagtgccacgttacttcaagctgtggagccgatcgctgctatcgagtcggccactcgaagcacaaacgaattgcttgccggttttaccgagaaaagccgtgagaaccaggaggcgatgcaaaaagccggtgaaacaatgggcgaggccgcagctcaggtgggtagcgctgccggcggtctggcagcggtggtcgacgacttgaaccgtgaaatgggcgaggtgctgcaaagcgtcaagactgacctgaacggcgttctagcgaacatgaatcaggactttacgcagaacctgaaagcgatggctgagcagatgggcggggctacccataagctttcggaaatcatggagtcggtgaagcatgatctgggcgggactatccaggtgatgagcgagggcttcaaggacagcatggtcggcatggccagtgatctgcgttcagcaactgacaacatatcgatctccatcaacgggatgtcggataacgtcaattccgccatgcaggaagttgccaagaatatggagcatgcctcggtggtccagaaggctaccagcgtgcagttctccgccatgagcagcgccctgagcgagaacgtcacggtcatgagcaacaacatggatgcgatcggcaatagcgtcagtggtgggctggaatcggtatccagcagtaaccagcgcatcggcaagttggccagtaacttcgagaagatagcaacatcccttcaggagcttccacaaaacctggaactggttgtaaaagcgctgggtaacagctcgaatgatgtttcctcgcaacttgagggcattcaccgcaccctgacacaaagtactcgctatgccaacgccgccgatgccattatgaaggttcccgcctccatcaatgagctctccacccaactgctgaagccaaaagacgagatcctgaaggtccaacaatcgttggcccagttgctggaagtggccactggtatcaacgacaacatccatgccctcaaaccagttgaggtcttgcaggaagcatga

SEQ ID NO: 352152 - DNA, 1245 bp, Pseudomonas aeruginosa
atgggatggttcagttcgattgtcaacaaggttgtttcggtcgcttcggcagtagtgaaaaagggcaaggagatcgctgccaaggcgattggctggcttgctgacgaggcagagacttttgtaggcgatgtgcagaaggtctggcgcacggtgcaaccatacatcagcaaggctcgagcggggttgctggcggtggcgggtgccgtgccgtggccgtgggtccggggtttggccattggcctggagcgtgtactcgctttcattgagcaattggacaaacaccccattgccgagaatctgcagaaggcgatggactgggtcatcaagatggcccgtgacctgaaggccaagatgctcgatgaagccgagattgccactgctgaagctaacgccaagcactttgccgaagccatgacactggtgcccgaggcagagaaggacgcgcttaaagtcagcgagctggtaaacaactacctgctggtaaaagccaaggtttcccgtgccgtggcccaagactcggtgcagaacttcgaacacttcctacgtattcgcgccgcgcaaaagctattgggcggctaccagcagatgatggaagatctgaagtctattgagaacgttgacccggacctgttcttcatcattgaagcggcgaacggcctgatttccgacaacccccaactcagtcaggaacaaacgcagcgcctggatgtggtgaccgtcaagttgttcggcaagccgctggtgccattcgtgttcgaggagatgatcattgcctgggcgctggatgtggaagcaatcgagcagcaatgggcggtgctcaacaaggaactggccaaggacaaggtactgcgccgccgcctggaactgaccaaggacatcgagccgctgagcgccgaagaacaagtgctgttgagcaacctagtggttagcactgaccgcgataccgcgacgttgcaggctttggataccgctggccgcgagaagcgcaattacgtatacgcctccgaaggtttcctgcagttactggaaaaggacgaggccaccctgatcgaggaagaccgcgaatacctggccgaagaaggtggcgaggttggcatgctgttgatagcctgcgcccagcatggccgcccgtgggcttcgctgagcgccgatgagcgcgcgttaatcactgacttcgcgaacatcttcaaggccgactgcaaggctcgcggcgctgcgttcaaggaagtcgaggtgacggtgtga

SEQ ID NO: 352153 - DNA, 948 bp, Pseudomonas aeruginosa
atgtcttcaaaggattacctgctcggccgtattcgaccgcatctgaaggaaggcctcgagactgaagctctccccgcgccgcagcccgtgctgcaagcggtggccgcgcgctatacattggatgacgtggtgctgggcccctctattcggcagcagttgaacgaggcgctggccaagatcaactattttcagaccatctacatggactggggtttcgctgcagtcgacccggccggcaagggcgtggtactgaactttttcggaccgcccggcaccggcaagaccctgaccgctgaagccctggcaggtagcttgagcaagcctttgatgttcatgagcatcgccgaccttgaaagcaagttcatgggcgacacctcgaagaacattgcccaggtgttcaagacggccaccgcagagggggctgtgctgtttttcgatgaggccgacacgttgctgggcaagcgcctttcctccgtgacccaaggtatcgacaacgaggtgaacgccatgcgttcgaccttgttgatcgaactggagaagcacgaaggcgtggtgatcttcgccaccaactttgccaagaactatgactcggcgtttgtcagccgtatttcacagcatattcagttcgccctgcccggtgcgcttgagcgtcatgcgatctggtcgcggatgctggtgacgggcatccctattgcgcaagaccgcgagacgctgttgtcgacgctcaccgagctgtcggaggggttctctggacgcgagattcgcagctgcctgcgcctggcgctgcccaagccgctgctggagccgggccagccggtgttgctactgcggcatctggaagaagcaatcagccaaatgcgaactactcacgctgccttggctacagagcaacgtgcaaacgcaaacaacaatttggacgcggcaagaaagctgctgggcgtcaactaa

SEQ ID NO: 352154 - DNA, 711 bp, Pseudomonas aeruginosa
atgcgcaatctaatggcagaaaccatcattaaccagccaggactaaaacaaacaatcgaaaaccaaaatagaaccgacttcttacccgagcagagccttcagtggataacaaacaaaaaaagacagaacgcttttctgatgaaaaagcttatcgaaaaaaacggattcaactacacatgcgtccccgacaacctaaccggcagagatctaaccattgcagcaattgacatatggcaaatagacaaaactaaaaaatcagaaatcatcaaccaaataagatccgaatgggaaatccatacagaatctgaccacttattcaaatggttcgacgacccagacgagaaggaaaaactgaatacagcatgggaaataaccaaagacaaatactcattcctggtcttccatcaaaaccaacctcaagaaagagatgactttatcattctgcttgactctatacttataaccacatcagaaaaaatactgctcatgaactccatcaagaaacgatggagccagaataaatatcgcgctaaaaatactggaaaaaaacagtacaactttatcctatccgacaaaaccatcaagcgccttgacaagctagccgacaaacatgacctaaagcgaactcaagtcctggatatactgctaaaaatggaggaagagaaaggaatttacatccaagaaagactaaaacaactgatcgacagctaa

SEQ ID NO: 352155 - DNA, 873 bp, Pseudomonas aeruginosa
atggcattgaccacgcctacccttatcgcctccgtcgggtcgctgcagtgcctggagtaccgagtcgtcggaatctgctactggctgctctgcacgccgttcggctgcaccgtgcgtatctcaccgaagatccgtcacttcattcccgagctggtagtgtcgagctatgccgataccggcgccaatccttggagcgaaatgtcagggctgtcggcaccgacgccggcctcgcaagggggtggcaacctgattacgccctcgccgcagcgcgacaacctgcccaggttcaagaatgtcgacggcattggccatcccggcggtgcagccctcacagctttcgcgcatacattcggttatgcctgcccaagcggagccgtgccctttgcgccctactacctcagcacgctcgacccgctggcttggcgccaggccgttcccgaatccgtatacccgcaggcgctggttccgggaatgcgcgagatcggcaaccaggcactcggggacatgtggggcagcgtgtatccgcgccacggttttctggtgcagcccgatgacttcaaggcagctgccgtgatggcccagcgcgccagcgacttcattacccgcgtcggccagccgcacgtttatctgccgctgcagccgatgtcggctcctggctactggccgccgcagccggtgatggagaacaacgtcaagaaccaccgctggcagttgctggtcccggtgatccagaacacctgcgccatcttccctagcccaacgatccagagcgccgacggcgcctacgcctggtcgctgtggcggccctaccgctgctgccagcgtatgggccagacgtttctgttcagcatcgactttgatggaggccaatga

SEQ ID NO: 352156 - DNA, 807 bp, Pseudomonas aeruginosa
atgatgcgtgtcttgatcatgattctgacggttgccgcaggctggtgttctgcagtcggtgcggtcgaggtcaaatactgggaccgcttgccgctggccgtaccgcttacggtgggccaggagcgggtcctgatgctggatgaggatgtccgcgtgggggtgccgggcacgatcgccggcaagctgcgtgtgcagtccgtcggcggcaccgtgtatctgcgagccgcggaagcccttccccctacccggctgcagctgcaatcggtgaagtcaggcgacatcatcctgatcgacatcgaggcgcttgagggaagcgaggcgctggagccggtcaagattgtggcccaggcctcggcaccggacgtggaggctgcgaaggaggcggcacctgcagctacgccggtaccggtggtgctcacccgctatgcggcgcagaacctctatgcgcccctgcgtaccgtggccccactgcccggtgtgcgacgggtgccgctgagcgactctgttgcgttcagctcgttgctgcccaccgagcgggtttcgatcaaggcactcgccgcctggcggctgggcgattactgggtgaccgcagtgaagatcgtgaatcgcggtcccggcaaggtagtactggacccgcgccacctgcaggccacgctgttcgccgcaacattccagcactcggacttaggtttcaccggtacgcccgaagataccaccgtggcgtatctcgtcacccgtggcggtgacctgaagcatgcgctgctgttgcctccgccaacgccggaggctgccgatcatgaaagctaa

SEQ ID NO: 352157 - DNA, 378 bp, Pseudomonas aeruginosa
atgaacctcgcccgtcgttgccatcgcccgctcgctctgttgcgggagtcctgttcccgagccctgttcggtggcctggggctgctgagctcgacgctggtttgggctgatctgccgaccatggaggcgccctcccgtggcgaaggttcggggctgatcgacaccatcaaaaattacgcctacgacggcggcatcctcctcggcctattgatcgccaccctcgcctttctcggtgtagcctggcattccctgaccgtctacgccgacgtgcagaaccagcgcaagacctggaaggacctgggcgccgtcgtcggcgtcggcgcgctgctggtggtggtgatcctgtggttcctcacgaaagccgcaacgatcctgtga

SEQ ID NO: 352158 - DNA, 126 bp, Pseudomonas aeruginosa; identical to SEQ ID NO: 329847

SEQ ID NO: 352159 - DNA, 414 bp, Pseudomonas aeruginosa; identical to SEQ ID NO: 340719

SEQ ID NO: 352160 - DNA, 891 bp, Pseudomonas aeruginosa
atgtgccagcagggtcaacagggtgccctggctgtgcccgacgacattgatggtgtcgtcggggtaacgcttgcggatgatcttgatcaacatggccaggcgcatggccgcaaggaccatgtacttgcgccctgccgccgaaaacagcggatgggtcatggtgccgccgaaccagtccagcgagatgaaaccgaacagcttgccgttgaaaccctggccccacatgtccggcaggttggtggtggcattgacgaactgcccgccttccttggtggcggacttgtccagccggttgccgttgcggtccagccattcgccgtgggccgcggtcttgttgatgtattgctcttcctcgcggaagccccagtagaaaggtacgactacgctgcgtacggcggccccgccggcgccactggcgaacttgcgccggtagtagacggcgtcggggttctccgccttgccttcgtcgtccgccggcaggctgtagcccgccggcgtcaggtagccgggattggcctgcccgccgggcaaggtcggcggcatgtccaggcgttcgttgagcccctggcagagccctcgctcgatccgttcgtagcaacccgcgagatcgttgacgccatgcaccacgatggtcacgcaaggcttgggcggaggcggcaccaggtgcacgtcgccgcccttgggcaaggtgatggactgggcagagacgatcgtcctcgaccgaaccctatcgttcatggcttctctccttgccgctcctcggcgttgcgtcgtgccaggcaggtcgcttcgtcgagcagcatccagttgccaggttcgccggccaggcagaattcgacggcaatgctggaaaccgtttgccggtgccgacggctacgctcgttgaaatga

SEQ ID NO: 352161 - DNA, 957 bp, Pseudomonas aeruginosa
atggccctccgccgtctgcaggcgcagccgggcctcgtagggagtttccgcgcgggtgaccagaaccatgccggtgcccagttcacgagcggaaaacacatgggtctgctgggccaattccttgccttcgttcaacgccctctccacgctgcgcgcgtcgcgcccgtagcggtacgccagcgcggcgtccacctgttgcgcgacggcgtgcccgctgtccttttccttccagccgccgttgcttacgccgatggcggcgtcaatcggatcgagggtatcgcgcacctgatagacgccgctggcggagttctctcccggcgccgtgacggctccgtcgaaatcgaatcgcgcttccgtcggcaacggcagacgcggcgcggtcagcagcacgctgtcgccctggtcgaagttcgcccggccgaatctgtccttgccgcccagcccggtgtcttcccaggtcttctcgccggccagcagaagaggatagacatggggaggggcgtgcccgccgatcttttccttctcgccattgcgcttgcgtacggtgaagatgcgctggtgaaaaccctgcggcagcccggtccttcccgggagccccttgacctgctcagcaatgccgcgccagccgataccctggacgttggcaagtcccaccgtctggtcctggggcgtgaaatacaggtagacactgccgcgattgtcgcgctcatcgaagctgagccgttccccgtcgatggtcgtctggcagccctggccacccacccagccggggccgcctatcgcgccgtagccttggcagttgcgcaacgcgacgctgctcagcgcggggaccggatggcgtcggccgcagatgaactcgaggatacctttgagcgtggccagccgcgcctctctggtctgctggctgctccagccctggagcttctcgttgaggggttcgaacaggccgtagggtga

SEQ ID NO: 352162 - DNA, 1248 bp, Pseudomonas aeruginosa
atgccaaccaaaaagaaacccttgcgtgacctgcccaaaatccccaaagagctgctggagcagttcggtgagggtctgatgaccgcagaggctatcgaggatgcctctgcggcgttcaagaaggccttgatcgagcgcgctctgcatgccgaacttggccaccacctgggctatccgccgggcgcgcagcgcccagaggatgaaaccaatcagcgtaacggcaagagtggcaagacggttttgaccggtgatggcccgctgcggctggaaattcctcgtgaccgagacggcagttttgcgcccattctcatccccaagcatgagcggcggtacaccggtttcgatgacaagatcatcgccatgtacgcccgtggcatgacggtcagagagatccgggcctttctgtccgagcagtatggaacagaggtctcacccgacttcatcagctctgtgacagacgaggtcatggaagagattggcacgtggcaacaacggccactggagccgatgtacccggttattttcttcgatgcgctgcgggtgaagatccgcgaagaaggcttggtgcgcaacaaggccatttacttggcgctgggcgttctacccgacgggacgcgcgatatcttgggcatctggatcgagaacaccgagggtgcgaagttctggatgaaggtcttcaacgatctcaagacacgtggtgtcgaggatgtgctgattgccgtgaccgatggcctcaaaggcatgccagaggctctcagcgccgtgtttccagaggcgacgctgcagacctgtatcgtgcacctgatccgcaacagcctggactacgcggcctgggacaagcgccgggcactggccaaggcgctcaagccgatctaccaggccatcaacgccgaagcggctgagcaggcactcgatgagtttgaaaacgggccctggggcaagcagtatccaacggtcgttgcggcctggagacgcgcctgggatcgagtgattcccttctttgtcttcccgccagccatccggaaagtgatctacaccaccaacgccatcgagagtatcaatgcccagctgcgcaagatcattaagacccgaggccatttcccgaacgatgacgcagctaccaagctgatctggctggggctgcgaaacatcacggcgaactggggctcagcggcgcatgattggaaaagtgcaatgaatcaattcgcgattttgtacggagatcggttcatcagggcgacttggtga

SEQ ID NO: 352163 - DNA, 621 bp, Pseudomonas aeruginosa
atgcaatcgcgactgttgatcctgccgttactcgccagcctggccgccctcggtgcctgccagggcgacaatccctaccgcgccagctctctgccctacccgccgcagccggccaccgcggccaatcccggcctcgatcccggggcctatccggcggcgccgcgcgactacgcccgctaccgtagctggagctgggccgccgccggggtcagcggctttccccagggcctggacgacaaccagttgcgcgacgccgtcagccagcagctcgaccagcgcggcctgcgcccggcgcggccgggcagcgcggccgacctgcaggtcagcgcgttcctgcgcaacgaactgcgcacccgccaggtcaccgactactacggcggctactacggcaactacggcggctggcgcgatccctggtacggctatggcgccagctacccggtgacccgcagctacaccgtgcaggtcaccgtggtccgcgtcgagctgaacgacgcccgcagcggccagccggtgtggggcaacagcgccgagttcgactccggcgactccgccagcgaacaggccaaggccctgcgcgaagcggtgaaacgggcgctgtcgagctacccgccgggctga

SEQ ID NO: 352164 - DNA, 1449 bp, Pseudomonas aeruginosa
atggaccccggccaggcgcgccgcctccaccaccttgtcggcctgcacctcgccgaagcgggcgatgttttccgccaccgtgccggcgaacagttcgatgtcctgcggcaggtagccgatgcgcgggccgagggtctcgcgctcgtactggcggatctcggcgccgtccaggcgcacgctgccgtgcagggtcggccagatgcccagcactacccgcgccaggctcgacttgccggagccggacggaccgatcacgccgaccaccgagccggccgggatcgccagggtcaggccacgcagggtgcgcgcctcgctgccgggcggcgccgcgtccagcgattccagcagcaggtggccacgcggctcgggcaattccatgcgccgctcgcgggcggggaattcgtcgagcaggccgctcagccggcgataggcatcgcgcgccgcgccccactgcttccacacgccgatcagttggtcgatgggccccagcgcacggcccatcaggatcgagccggcgatcatcatccccggggtgatgcgtccctccaccgccagccaggcgccgaggccgagcaccagggattgcagggcgatgcgcaggtacttgctcagcgcgttgatccgcgccgcgcgctcgctggccaggctctgctggtcgaggaacgcctggtgcagccgttcccagcgcccgcgcatgctgccgagcatgcccatcgcctcgatcacctcggcgttgcgcaggttgttgctggccagttggccggacttgatcgacaactcgccggccttggccagcggcgcacgggtggcgcgttcgttgaaccaggcgagggccatcagggccagcgcgccgaccagcgagagcaggccgagccaggggtcgaagaggaagatcaccagcaggtagaccgggaaccagggcgcgtcgaagaaggcgaacagcgcctggccggtgatgaactggcgcagggtagtcaggtcgtgcagcgcctggctggcctcctggccgccggcgcgcaggttgcgttcgaaggcggcggcgtatatccgcccgtgcaactggccgtcgaagcgttcgctgacccgcaccaggacgaagctgcgcagcgcctccagcgcgcccatgaagacgaacacgccgagcgccatcagggtcagcatcaacagggtgacttcgttggccgaggacagcacgcggtcgtacacctgcagcatgtacagcgagggcaccagcatcagcaggttgatcaccccggagaacgccgccacgctgcgcaacgcactgcggctggccgccagggcctgtttgatttcgttggtaacgctggaaccgagccttgccatcgagcgcgctcacttctgccacgactgccgctggaatcccgaatgagcccggatggcacctccctgtgccgggcgttccctcgccgtcaggcggccagggcctga

SEQ ID NO: 352165 - DNA, 258 bp, Pseudomonas aeruginosa
atggccaccaccgagagcatcggccgcgccgataccaatccctcgaccagcgcgccctgggacaccaggttgcttttgccgaggctgatgaacagcaccccggcggcggtgacgtcgagcagcgccagcagctcctccaggctggcgctgcctgccggaaccacctggccggcggacgccaggctgttctgcaaccagtcgagttcgccgggatgctgggtcagcgccacgaagttctggttcatgcgcgcctcctaa

SEQ ID NO: 352166 - DNA, 1173 bp, Pseudomonas aeruginosa
atgggtgggaataagctttgggttgttactttttctattgtgggtctagtagttcctttaggaattttgggggcttatttttgggcgttcaaaggtcaaagtatttcgtataattctgatgattggtccgcatttggcgctattttggctggcgcattcactttgcttggttcgatagccaccgcattagcacttatttttgtaggtcagcaagttgaattgacgcggattgttgcgaatcgtcaaatggaatcaatgacgttggatcagtatatagggcatagaaaagtttttggtgagaggttggagactctacagaaatactataaaggtagcattttgtttgcctctcatgatgaagtgtatgggcagatttttagtcgtaatacgccagtgcacgttgagttagtggtgcctagtgaagacggagggaatggaaggcttgcctaccttctcaaacattataaggagcttcatgattttgcgatggatattgcagcaggtagaaccgacttggcccatagatttattattaaattgctcaggtttcagaaattgctaggttataaggttctcaatgttgaggggtatgggacagttcgttatgaaggagctgattgtcaggttaatttattttccctcatggattctataaatagagctgagggtgtattgaattcgtaccttttcttttcaggaaataagcaaattaggtcgtttaaaattaatagtcttataatggaggatttggcattctgggtgattcaagggtatagaaaaggagaatttagtcagggttggtatgtgcgtatggatgctgaaaaaaagctggaacgcctgctggacttatataggttctgcatcgaggcgggacgcagactttctagtgaagggaataggttggtaattccgtattattatgatgaggcgctgaaacatcttaggggtctgctttcgaagcctctgaaagtgaagtcgaaactggataatcctttgcgctatagcgatctgatagaagagcttgaagagcatgccagagttgggtttgcacgtgagcgagatagcaggggcgcggagggcgcggagatggcgaataaacgaaaagaagagttgaaagtattgtttaagaatttgcgtgatgagagttatagggaaaaaggtctgtttggttaa

SEQ ID NO: 352167 - DNA, 177 bp, Pseudomonas aeruginosa
atggcagtgaaagcatggcggcttatggccgcggactacagacacagcattgccaccccacttgaagcccggattctgcgatccttggcggacttcggcgacgaggtgatgaacggcgcgggccaggttgcacgcaggctggggccgctcatggacgccgagcttattcttagttga

SEQ ID NO: 352168 - DNA, 1377 bp, Pseudomonas aeruginosa
atggctatcagtgtgttcgaccttttcaagatcggtatcggcccgtccagttcgcataccgtcggccccatgcgcgccgccgcgctgttcaccactgccctgcgccaacgccaggcgctgtcggcggtgcggcgtctcgaagtgcgcctgtatggctcgctatccgccaccggcgtcggccacggcaccgatcgcgcggtgatcatgggcctgatgggcgaatggccggatcgtatcgacccgacccagatcgccccacgcatggccgcgctgctcgatagcggcctgctgcaactggacggccgcgtggcggtaccgttcgactgggtgcgcgacatgcgcctgctcgacgagaacctgccctaccaccccaacgccatgaccctggtcgcctacggcgagcaaggcgaactgcaccaggagacctactactcggtgggtggcggcttcgtggtcgatgcggcacaggccgcctcgggacagctcgaccaggaccacacggtgctgccctacgacttctccagcgccgaggaactgttgctgctgtgcaagcgccacaacctgcgggtatccgagctgatgctggccaacgaacgcatctggcgcagcgagaccgacatccgcgaaggcctgcggcgcatctggcaggcgatgcgcgattgcgtcgacaacgggttgcgcaacgaaggcatccttcccggcgggctcaacgtgcaacgccgcgccgcgcgcctgcaccgcaacctgcaggagatcggcaagcccaacgtgatcggctcgaccctcagcgccatggaatgggtcaacctgttcgccctggcggtgaacgaggagaacgccgccggcgggcgcatggtcaccgcgcccaccaacggcgcggcggggatcatcccggcggtgctgcactactatatgaagttcaatcccgacgcccaggaccgcgacgtcgtcgactacctgctggccgccgccgcggtgggcatcctgtgcaaaaagaacgcctcgatctccggcgccgaggtcggctgccagggcgaggtcggctcggcctgcgcgatggccgccgccggactggcggaagtcctcggcgccaccccggcgcaggtcgagaacgccgccgagatcggcctggagcacaacctcgggctgacctgcgacccggtcggcgggctggtccaggtgccctgtatcgagcgcaacgcgatcgccgcggtgaaggccatcaacgcggcgcaaatggccttgcgcggcgacggccagcatttcatctcgctggacaaggtgatccgcaccatgcgcgacaccggtgccgacatgcacgacaagtacaaggaaacctcgcgcgggggcctggcggtgaacgccatcgagtgctga

SEQ ID NO: 352169 - DNA, 444 bp, Pseudomonas aeruginosa
atgcatgacctccgcccggtgatgttcaccgtacccggcgagccggtggggaaggggagaccgcgtatcggtcgcgtcggcgcccacgccaggatgttcacgccggcgaagacggcgaactacgaggggttgatcgcacacagcggacagcaggcgatggcaggtcgcgcgctgttcgagggcccagtgctggtcgaactcgacatcgcgctgagcatccctcaatcgatgtcgaaaaagcggaaggccctggctttgtccgggcaactgcacccgaccaagaaaccggacctggataacgtccagaaggccatctacgacggcctgaacggcgttgtctggaaggacgacgtccaggtcgtgaaggcggtggtggggaagcgctacggcgaaacgccaggcgtgcgagtgaaagttgtccctctcctcgagggcgagcagtga

SEQ ID NO: 352170 - DNA, 1287 bp, Pseudomonas aeruginosa
atggagcatgtgcttgtagccgatacgaatctcttcttcgagtgcaagcgcctagaagaacttccttggtctgacctcgccgtggatccggttgtgatcgcactgaccaaacccgttttggcggagatcgacaagcacaaaaagggcggcggtagaacacgcaagcgggcaatcgagatttcggggcgcatacgtgcaatgcttgcggcccttccgccggaggtcgttattcaggaagccggaccacgcgtcctgctccggctgatgcccatcgtccagcccgcccccgaactcgcgcgctcacttgactacagcatcaacgacgaccggatcgtcggaactgtcgccaccctttcgaaggacgaaacattcgcctccgtcaagatgctcacagatgacagtgttgcggcgtccaccgcgcagggacttggggtttccttctttctgatcccggagagttggaagcgaccgccggagcagacgaccgaagcaaagcggatcaaggaactggaaaaagatctatcgatctatagatcgcaggagcctgtcattagcatcgcgaacgtctccggcgaggcaacagcgactaatgtggtccgccggatcgcattggcacttgagccctccgaaattgaccgactgatcgacaaactaaaagcgcgtcaccccccaacggaggatttctctgctccggaagccgagattcaggccgatggaaccgaaatttcctacgaagcgccggatgctgaagccatcaggaaatactcgtccgacgcctacccaaaatggatcgacgcgtgccgctcaatctttgaatcgctgcataagggccgcgtcgaacctgaggccgaagtggcgctaacatttggggtcgccaacggtggaactcgaccggcctcgaagatgcgcgtctcgtttgaggctgtcggcaacatcgatttgagccgtgactcagatgatccagacgatcacgaggatgggaatgatgacgatgggcaacccacatttccccccattcctaggctgcccgcaccgcctgttccgccagcggttcgacgcatcgtgaagcggccgccttctgcggcgaaaggtgttgatatcgctacactgagaatgcccggcagtggtctgaggatttctgagttggagaaggcttcgcgcggagtgatgagcggtctcggtccccaacttgcagcgatacatagcgcgcagtcgatgtttgacaaccttcacggtacaggagcgctcgctgacctagcgcttggcatagggctgacgtgcccctga

SEQ ID NO: 352171 - DNA, 267 bp, Pseudomonas aeruginosa
atgaaacgagcgagattcacggaagagcagatcatcgggatcctgcgggagaacgaggccggcgccaaagcgggcgagctggcgcgcaagcacggcgtgtcggaaggcacgatctacgcctggaaagccaagttcggcgggatgagcgtgtcggacgcccagcgcctgcgcgccctggaagatgagaacggaaagctgaagcgcctgctggccgacgccatgctcgacaaggcggcgctgaacgatctgctctcaaaaaagtggtag

SEQ ID NO: 352172 - DNA, 909 bp, Pseudomonas aeruginosa
atgcgccaggccgtcgcccatgtgaaggcgacgttcggcgtcagcgagcggcgggcctgctccatcatcaaggccgaccgcaaatcggtgcgctatcgctcttgccgcccgccagacacggcgctgcgggagcggctgcgcgccctggctgtcgagcggcgacggttcggctatcgccggctgttcgtgctgctgcgacgtgaaggcgagccttcgggcaagaaccggatctaccggctctaccgcgaggaaggtctgacggtgcgcaagcgccgctcccgtcgtcgagccatcggcacgcgggcgccgatcctgatcgaggcaaggccgaacgcccgctggtcgctggactttgtgcacgaccagttcgccacgggccgccgcttccgcattctcaacgtggtcgacgacgtcacccgcgagtgcctggcggcgatccccgacacctcgatctcgggacgccgcgtcgcgcgagagctgacagcgctgatctctcggcggggccgtcctgccatgatcgtcagcgacaacggcacggagtttacgtccacggccatcctggcctgggcgcaggatcaaggcgtcgactggcactacatcgcgccgggcaagccgacccagaacgggtttgtggaatccttcaacgggcggatgcgcgacgaactgttgaacgaaagcctgttcttcggcctcgaccacgcccgccagaaggtcgccgcctgggcgctggactacaacacccgccggccgcattcatcgatcggctacctcaccccggaggcttttgccgccagtctgaccgcaacaggccgacccgctgcgcaggatgaaagctgcgcggtccggcctgttgctcatcccacgctgcgaggcgtaactaacccaaggactctggtcgccgctggatga

SEQ ID NO: 352173 - DNA, 1041 bp, Pseudomonas aeruginosa
ttgcgtaaggcactggacgaggcaaggtcgaagaatggggatcgggaatacgcggtaggctgcacgctatttgagagcaacgatgacatcgagcccatccgcgtcggcccggttgttattgaggctcgccaccagtggctggcccgcatggagaccgagcagaaaatcggcaaggttacagccaaaaggatcaggagaaagtgggcgggtggcaagctcgccaagcggaaggatgttgttgaccagatcagggagaaggacgttctagctgtcgtcggtgcatgcccattcgtgtgtagtgtaaagacaaagggacttccgcctgaatccggaaagcagaaggcgatcactgcggcgcgaatggcactcgccattgtcgcccttgcttgggacaaaccctcatcggctcttgacgggttccggctccttatcgaccagaatttccggcaggttcgtgtcctgacatttgaaccgggcaagatcacgctcgctggctcaaagctctcgcatctaccttcggggtacactttcaagcccggtgaatggcaagttcaggccaagaggctggctccgctgtttggtgctgcgggcgaagtgttggacttcgttactcacgcgacagggcaggtttctcgccccgccctgaacaatgtgctcatgcaggcggtactctggtttcacgaagcatgccgtgaagctgtcgatgcaatggcagtcgtaaagtttgtcgcggtactggatgggctggcctgtggcaacggcgagccagagattcgagcactgttaacggcacgagtgggatgggacgatgacgacaacatctacaggagcggcggacccacattgaagcaagctgtcgcccggctatatggcgaagggcgcagccgaaccgtccatggaaccagcgagcggttggcgcaggattggtcggaaatgcgcgggctggcagaaaccctttcccggctggcgttgctaggctgcctcaactggttcgaaaagaacgcgtcaggtgatgatccggcgcagttgaggatacgttaa

SEQ ID NO: 352174 - DNA, 840 bp, Pseudomonas aeruginosa
atgttcaatctcttgatgttcaacgtcgattggcactcgggtagagtcacggttccgatggggcggatgtttgaatacacggatgaccacataaccgaacagttccgtgaaggcggaaaccctcttctagatcgtctcgccgctctgccgtgcttgttctgcgaagagggcacgacggatgaggccgcttatgtcggtcagatcaaccgcgcacgcatcgtcggcagggatgtgtctcttgaagtcagcttcgacggggaagtgccaccgctacaaaacagcatgattcacgcgaaccgggcagagttgcacatgcctcacgacttcgagttttcgcggaatcactgggcggtgaaagacgtagacctctaccgattcttgctccgcaacgtgcgcccccgccgtcagcgcccggccgtgttccaaatccccgaacatgaaaacatcgagcctgcattagcatcagtgatgatgccgttcgatgctggcttcaatgatgtctatgcagccatccaacttggtgctggcaatgctggccttcgttgcaggcgggcggacgatatttgggagaacccggcaatcattcaggacgtggtttccctcatcgaccgttcgcgcgtcgttgtatgcgactgcaccggcagaaacccaaacgtgttctatgaggcgggcattgcgcacacgcttgggcgtgaggtgattcttatcacgcagagcgagcacgatattccgttcgatctacgacaccttcgccatgtccgttaccttaacactgtcgaagggcgcggcgctctagctgctacgctacaaagcaggatgcagaccatcctagggcactag

SEQ ID NO: 352175 - DNA, 798 bp, Pseudomonas aeruginosa
atggagcttcaaccaatagttaaatgggctggcggaaaaagatggttggtacgcaaagcatcgggtctatttcctgcggattataatcgctatattgaaccgtttcttggcggcgcagcagtattttttcacatgcaacctaaagtcgcgttgctatcagatgttaatgctgagcttataaatttatatgctgcagtaaagtctgactgggaggctgttctcgacgagcttaaagtgcatcagctaaggcacagtaaggagtactattataaagttaggtctctggttcctgagaacagtatcgcgggtgcagctcgcatgctatatctaaatcgtacgtgttggaatggtttgtatcgggttaatttgaaggggcagtttaacgtgcctatcggtacgaagtctaacgtattgatggatgctgatatcttcccatctgtagctaaactgcttcaggatgcagagctgaaagtttctgattttgagagcagtattgatgaggcagaagaaggagacttcatatttgtcgatcctccctataccgtcaagcataactttaacggttttataaaatacaatgaggatttgttttgctgggaagatcaggttcgtttaaagcatgcggtggagcgtgcggccaatcgaggcgcaaagattctaatcttgaacgccaaccacgaatccattgcgcatctgtacggcgattttgaacaggtcgtgctgtcacgcagtaacgttttggcagggaaaagtgagttccgtggtatataccaggaactcgctattaaaagttggtaa

SEQ ID NO: 352176 - DNA, 360 bp, Pseudomonas aeruginosa
atgaacgcccctccggacttccggcgcgccgccagccacgccttgtggctggccctcgcgctgacgttcgcctgtcctcttccgggcctggccgacgagcatcccgatgcccgtcgccaggcccagttgcgtcacctgctgttgcaggactgcggctcctgccacggcctgcgcctgaccggcggcctcggcccggcgctgacccccgaggccctgcgcggcaagccgcgcgaatcgctggtcgccaccgtgctcatgggccgtccgcaaaccccgatgcccccctgggccggcctgctcagcgaagacgacgccggctggctggtggaccgcctgatcgaaggagagatcgccccatga

SEQ ID NO: 352177 - DNA, 1803 bp, Pseudomonas aeruginosa
atgaaacgaaccctgtactcgggcgtcggcctgctgctggtcggcctgctgttcctcgctttcaacctgctgtccagcctgctgctgcgcgaccagcagttcgacctcacccagcagaagctctacaccttcagcgccggcacccaggaagtcctcgacagtctcgacgaaccgctcaacctctacctgttcttttcgaaaagccgcgccagtgatctgcccgccctgcgcaactacgcccgccgcgtcgaggaggtgctggacctctatgcacggcggagccatggcaatgtccgattgttcgtgatcgatcccctgccattctccgacgacgaggaccgtgccgcgcgcttcggcctgcaggcgccgcccatcggcccgaatggcgaagccatctactttggcctggcggccaccaacccgaccgacggcctccaggtgatcccgttcttctcgccggaagaagagccgcttctggaatacgatctcagccgcctggtccaggcactcgcacagcgggaacgcacggtagtcggcctgatgagctcgctgccgatgaccgggcaggcgcccaccgacgggcagccgggcagcaggccctgggcgatgatggacaagctctaccaacagttcgacatccgcaccctggggctcgcttcgacggaaatccccgccgaagtctcggtgttgatgctggtgcaccccaggcaattgtccgaacagacccaatacgccatcgaccagttcgtcctgcgcggcggcaagctgctggccttcgtcgaccctctgagtctcgccgatgcagacggcgggaaaagctccgacctggccccgttgctgcgctcctggggcgtccagttgcggccggataccctgctggcggatgcctcgttcgccatgatcaagcccaacgccgaacgtcgcccggagcgcaatccgacctggctacacctccccggcgacacgttcccccacgacaacgtgctgaccaccggcctggaaagcctcaacctcgccagcgtcggcctgctcgaacctctcggcggagcctcgacgcgcttcattccgttgctgcacagctcggcgcacagcatgccgctgtcgctggaacgcttccgccaatcctcgacggagcagctcaacgcgaccctggtcccgaccggggaacgctacgtgctggccgccaaggtcgaggggccggcgacgagtgccttccctgcggaccgcgggaagcaaggcgaaggcctgagcgacagcgcgaacatccatgtgctgttggtcgccgatacggacctgctgagcaatccgctctggctccaggaacagcccggccacaatgagccgcaggtatgggcggacaacgacctgttcgtcggcaatgccctcgactacctctccggttcggacgcgctgatcgacctacgctcgcgaggccatacgaagcgcccgttcacccgcgtggaagcgctccgccgcgaggccgggctgcgcgcccaggaacagctcaacgcgctgcagcaaagcctcaacgacaccgacaggaacctgcgcaccttgcagcaatcgatggacgccggcgaccaggaggtgactccggaaatggaagcgacgctgcgccgcttcatcgatgacaaattgcgcatccgccagcaactgcgtcaattgcagttccagctgaatgccgatgtcgagcgcctgggggaacaggtgaaactggccaatacggtcctgctgccggcactgctcaccctgttcctcctgctgcattggagctggcgcagcatgcgccggaggaggggctga

SEQ ID NO: 352178 - DNA, 540 bp, Pseudomonas aeruginosa
atgaagaaaatcagccatcaaattcgcgtcagtatcgagtcggacggtcaggtcttggaaagcccgaaagggcggttgttcttcgacgacaccacggctcaattcaccgacctgtcaggcgtgcgcattctgcgttgcggcgtggacacggtgcggcagttgtacaacggcaagttgcgcccggaagtgatggcgctgtttgacctctcggtggatgtggtcgagttcgccggctacgaatggtccaagggccgtatcggtcgcgactctggctatcagtaccgcctgcagaacgctgaaatgggtctgatcctgctgatcaagaaccacaacatcaaggtcgataccctcggctcgcacctcaagatcgaagtatcgcctcacgccctcgatggcgccgatccgcgcatcctccagggcgtgctggatgacttggccgctgccgtgctgagtcactgcgaaaccaaccaagccgctgtgcatatcgccttggacgtacatgttcggctcggccaacggcctgcaactgtcgatctataa

SEQ ID NO: 352179 - DNA, 1230 bp, Pseudomonas aeruginosa
gtgtacgattttgtgatcatcgggggcggcattatcggcatgtcgactgccatgcaattaatcaaggcctacccagagtcgaaaatcttgttgctcgagaaagagtccgggccagctaagcatcagacggggcacaatagcggggtcatccacgccggcgtctactacacgccgggtagcttgaaggcgaagttctgcctggaaggcaaccgtgctaccaaatcgttctgtaacgagcacggcattatctacgatgagtgcggtaagttgctggtcgccaccaatgaggtggaaatgcagcgcatgcgcgcgctttgggagcgcactgcagccaatggtctggagcgcgagtggctgtctgcggagcaactgaaggaacgcgaaccgaacatcaccggaatcggcgggatcttcgtgccctccagtggtatcgttaactatgccgaggtcaccgctgccatggctcgcgagttccagaggcacggtggcgagattcgctacgacagcgaagtcatcggcctggaagagcgcgccacggagatgcgggttaaaacccagcatgaagaagtcattgcacgctttttggtgacctgctcgggtctgatggccgaccgcattgtatgtctactgggcttagatcctggctttagcatttgcccgttccgtggcgaatactatttgctgcctgagcagcacaaccggatcgtcaatcacctgatctacccgattcccgatccctccatgccgttcctcggcgtgcacctgacgcgaatgatcgacggcagtgtgacagtcggtcccaatgctgtgctggcactcaagcgtgagggctatcgcaagcgtgacatatctttgtccgacacgttcgcaatgctcaccaatccgggcattcttaaagtgctcaaggacaatctgcggcccggcctgatcgagatgaaaaactcgctgttcaagcgtggttatctacagcaagtacgcaagtactgccccagcttaacgctgcaggatctcaagccttacccggccggcgtccgcgcccaagcggtttcagcggacggcaagttgatcgaggacttcctgttccgcaatacccgccgtagcgtcaacgtctgcaatgcaccatcgccggcggctacctctgcaattcccataggcgcctacatcatcaagcagattgatgcacagctgcaggggctacccaggtttgtaaaaaaccaacatcccgcatga

SEQ ID NO: 352180 - DNA, 411 bp, Pseudomonas aeruginosa; identical to SEQ ID NO: 241742

SEQ ID NO: 352181 - DNA, 696 bp, Pseudomonas aeruginosa; identical to SEQ ID NO: 241741

SEQ ID NO: 352182 - DNA, 543 bp, Pseudomonas aeruginosa; identical to SEQ ID NO: 241740

SEQ ID NO: 352183 - DNA, 846 bp, Pseudomonas aeruginosa; identical to SEQ ID NO: 162920

SEQ ID NO: 352184 - DNA, 1230 bp, Pseudomonas aeruginosa
atgaatttcccccgcttcttcatcaaccggccgatcttcgccatcgtcctgtcggtgctgatgctgatcgcaggcgcgatcagctacttccagctgccgctgagcgaatacccgcaggtcacgccgccgacggtgcaggtcaccgccagctatcccggcgccaacccgcaggtgatcgccgacaccgtggcatcgccgctggagcaggcggtcaacggcgtggaaggcatgatgtacatgcagtcccagatgtccacggacgggcggatggtgctgaccatctcgttcgagcagcacatcgaccccgacgtcgcgcagatccaggtgcagaaccgcgtctcacgcgcgctgccccggttgccgcccgaggtccagcgcatcggcgtggtcaccgacaagaccgcgcccgatattctcatggtggtgcatatgctctcgccgggggaccgctacgacccgctgtacgtgtccaactacgcgatgctcaacgtgcgcgacgaactggcgcgcctgccgggcatcgccaacgtgatcatcggcggtgaaggcgagtacgcaatgcgcgtctggctcgaccccgagaaggtcgcatcgcggggcatgaccgccagcgatgtggtcgccgccatccgcgagcagaacgtgcaggtcgcagccggctcgatcggccagcagccgaatgcgtcggccgccttccaggtcagcgtcaatgcgctggggcgcctgaccaccgaagagcagttcggcgacatcgtgatcaaggccggcgccaacggccaggtgacccgcctgcgcgacgtcgcacgcctggaactgggctcggacaactacaccatgcgcggccagctcgacggcgagaacgcggtcggcctgcaaatcctgatgacgcccggctccaatgccctggacacgtccagcgcggtgcgcgcgacgatggagcggctgcaggccaagttccccgaaggcatcgagtacaagatcgcctacgaccccacagtcttcgtgcgcgcctcgctccagtccgtcgccgtcacgctgctggaggccatcctcctggtggtgatcgtggtggtgctgttcctgcaatcttggcgcgcgtcgatcattccactgatcgccgtgccggtctcgctggtcggcacgttcgcggtgatgcacatgttcggcttctcgctgaacacgctgtcgctgtttggcctcgtgctctcccatcggcatcgtggtggatga

SEQ ID NO: 352185 - DNA, 948 bp, Pseudomonas aeruginosa
atgaacctagcactggaatacgtaataaagcaagactacgttactgaagactttgataaaattccggacgtctattggagtgacatcctcatcaatagaaaagtaaaaattaactggaaaaacatccttgaataccatggaaataaaaaatttaaattagaaaagctcaatgaaatattaaacaacaaagattcatccagcgaattatccatcaataaaatatccattcctagcacagataatgagcagagcaaattactttcacgacttataatagagaacaaagaaatagatatcgaaaactacaaaaaaatatgtagaagcataccgtccagatatttagatatacctgaaaacctacctgaagatagggtatcaattctaattgatctcgggatcattgaactgaatgaaaaaacattttcacaagtttcaaaatccaccttgctcactcagaaactgctaattcgagaaatcgcgacatacctactatcaccagaaaaatttaaaataaccccggaaatcaaagctgctcttatatctgcgcagatggaaatatcgtataaatccaaattaattgaaggattaagcataattgatttgcagcaaagcaatattctagcccgaagcgttgccactgcgattgcaaatgaagagcttccaaaaaatattgacatacagacaatatattactgcaccaccccagccagtaataatgaaaaaatcgagatactgaaaaaatatatcgacctccttccagtcacagatatcaattccattctaagcgggctgcccgagccatatcactccatatctaagaaaagaaaaagacccaagatcactaacaacttgaagaacacaaactttgtacaagcactagaaaggagaggactaatctcatcgtggaaaatagagggcgactcaattagaatacatacattccgctaa

SEQ ID NO: 352186 - DNA, 1707 bp, Pseudomonas aeruginosa
atgaaagagctcagccaacaggccgggtctgcgctttccggtgttccgcagcagtggcacgacatcgactggtgtcgtgtgcagcggaatgtccggggaatgcaggtgcggattgcgaaggcttgtcgggaaggcaaatggcgcagggtgaaagccttgcaacggatgctgacccactcgaagtcggccagatacttggccgtacgacgagtcactgaaaaccagggcaagcgcacggcgggagtcgaccgcgtgctctgggatacacccgacgcgaaatggaaagcgacacaagggttgaagcggcgcggatacaaaccacggcctctacggcgtgtgttcattccgaaggcgaatgggaaggagcgccccctgggcatcccgaccatgaccgatagagccatgcaggcgttgtatctgctggcgctggcgcccattgcagaaaccacgggtgatccgaacagctacggttttaggatcgaacgctcgacggcagatgcgatgagtcagctattcacctgtctgtcccagaaagcttcggctcgatgggtactggaggcggatatcgaaggctgcttcgaccacatcaatcaccactggttggtcgcgaatatccccacggataaagcggttctccggaaatggttgaaggctggcgtggttcataaaggtcagctacaggcaacggacgccggtacgccacaaggcgggattatctcgccgaccttggcaaatatggtgctggacgggctggagtcaggtctcaagcagtatctggggcgggcgaaggcaaagaggctgaagatacatgtggtgcgttatgcggatgattttgtgatcaccggcgactctccggaggtgctggcagacgaggtcaaaccttgggtagagcagttcctggcggtacgcgggctgcggttgtcacccgagaaaacgcagatcgtccacatcgatcaaggcttcgacttcctgggatggaacttccgcaagtacgacgggaagctcctgatcaagccgagcaagaaaaacgcgcaagcgttctatcgcaaggtgaaggaggcgatcagcagcaacaagacgatgaggcaggaaaacctgattcgcctgctcaatccgatcttgaagggctgggcgttgtatcaccagcccgtggttgccaagcaggcgttcagtcgcatggacttcctgctctttcaggctgtatggcgttgggcaaagcggaggcacccaaggaaaaatctcgaatggatacggaagaagtatttccggacgagcgagagcaagaactgggtgtttgctgccacggtgcttaccgaggacgggggtaaaaaggattttgtgctgtataccctgtcggagacaccaatagagcggcacatcaagatcaacggggaatacaaccccttcgatccctcgatggaggcaatgggcgagaagctgcggatggatcggatgctgaaaaagctgaagtaccggaaacagatcacaagcctgtacgtgagccagaaagggcggtgtgtactctgtgggcaaccgataaccaaggaaacgggatggcacgaccatcacatcgtccaccgcacgcaaggcggaagcgatgcactggtcaaccgggtgcttctgcacccgaactgccatcagcagctacacagccgtggcctgacagtgagcaagccggctccctcgggggctttgttaaaggcttga

SEQ ID NO: 352187 - DNA, 141 bp, Pseudomonas aeruginosa
atgggcaacgcaagtgaactgctgataaacgtcgttatgatcaaattgccaaaactgctgttaggcaataaccaaaaggtgcgtggtcggttatccctgtcgattatggggatacgtcgtctcagtaccaccggcgaatag

SEQ ID NO: 352188 - DNA, 927 bp, Pseudomonas aeruginosa
atgcgggccgaatcacccagctcaccgtcggcgccgaggtcgattcttggcagagtgattcgggccgaatcacccagctcaccgtcggcgccgaggtcgattcttggcagagtgattcgggccgaatcacccagcttgctggcggcgccgaggccaggacctggcgaagtgatgcgggccgcaacaccccgttcgccgtcggcgacgaggtcgatccttggcagagtgattcgggccgaatcacccagctcaccgtcggcgccgaggtcgatccttggcagagtgattcgggccgaatcacccagctcaccgtcggcgccgaggtcgattcttggcagagtgattcgggccgaatcacccagcttgctggcggcgccgaggttggttcctggcgaagtgtttcggcccgaaacacccatcttgccgccggtaccgaagtggatccctggcagagtgattccagtggaaccacccagcttgctggcggcaccgagtcctggtcctggcggagtgttgccagtggcaacacccaactcgccgccggcgccgaggtcgatccttggcagagtgtttcgggccgaaacaccaaacgcaccggcggcgccgaggccaggtcctggcggagtgttgccagtggcaacacccaactcgccgccggcgccgaggtcgatccttggcagagtgtttcgggccgaaacaccaaacgcaccggcggcgccgaggccaggtcctggcggagtgttgccagtggcaacacccaactcgccgccggcgccgaggtcgatccttggcagagtatttcgggccgaatcacccagctcaccgccggcggcgccccaagggaaaatcaccttgctcgacagtgagtatttcatggctcatcaccccgctcggatggcacgctcaatccgtgcctgggccgaatga

SEQ ID NO: 352189 - DNA, 1632 bp, Pseudomonas aeruginosa
atgaatatgcaaagtccccatgttgcgctgcgcgccgcgctctacctgcgcgtctccaccacgcggcaggccgagcatgacgtgtcgatccccgaccagcgcaagcagggcgaagcctattgtgtctcgcgtggctaccagcttgtcgaaaccttcgtggaagccggcgcttcggccaccaatgaccgccgccccgagttccaacggatgatcgaggccggcacgtccaagcccgcgcccttcgatgtggttgtggtccattcgttcagccgcttcttccgcgatcacttcgagctggagttcaacgtcaggaagctcgccaagaatggcgtcaagctggtctccatcacgcaggaaatgggcgacgatcccatgcacgtcatgatgcggcagatcatggcgctgttcgacgaataccagtcgaaggagaacggcaagcacgtcattcgggccttgaaggagaacgcccggcaaggcttctggaacggctccctgccgcccatcggctaccgagtcgtcgatgccgagcagcgcggcgcgaagatgaagaagaagctggagatcgacccgcttcatgccgacaccgtgcggctgatcttccgccttgcgtcggaaggcgacggcacgtccggtcccatgggggtcaagaacatcgtcagccacctgaacaggcaccgcatgttcacccgcaacggcgggcgttggggcatcggccagcttcaccgtgtcctgacccggcgcacctatatcggcgagcatcgcttcaatcgccgctccaacaagggcgtggtgaagcccgaggaagaaatcgtcaccgtcccggtgccgccgctgatcgaccttgagatattcgaggccgtgcagaaccgcttgaaggtcaacaatccgaaggtgacgccgccgcgtgtcgtcagcggcccgaacctgctgaccggcatttgccattgcggcaactgcggcggggccatgacgctgcgcaccggcaagaacggtcgctaccgctactatgcctgctcgatccgggcgcggcagggcgaaaccggctgcaaaggtcgtgcgatcccgatggataagctcgaccgcatggtggttacgcatatcgaggaaaggctgctggaccccgagcggatcgaagacgtgctcgcctcgcttctggatcgccggcaagagggcgtcgagcggcgcagccagcatatcgctgaattaaaccatcgcgctgccgaggccgataaccgcctcaagcgcctctacgacgccattgaagccggttcgctcgacccggccgagtcttcccttggcgagcgcatcgcgggcctcacggcgcttagggatcaggcgcgggccgatgccacgcggatcgaagctatgctcgcaagctcaacccaccaccgcctcaccggggcagccgtgcgggaactggcgagcgaagcacgcacccgactgcggcttggaaagggcggctatcggcgggaacacgtacgggccttcgcgcagcacgtcgaggtcgccgatgacgcgatctacatcaaaggcagcaaaaacgtcctgttgaggacgctggtagccgccaagggagggaaatcggcgggaatcggcgttcccggttttataccgaagtggcgggtcgtgtag

SEQ ID NO: 352190 - DNA, 390 bp, Pseudomonas aeruginosa
atgactacattgaaagtcgggattgccggctacgacgagatgaaggcccgcaccatgcggatcgccaagggcgaggaaaagcccgcacccgacgatccgaaggtgtggttcacatccatggaatccttcgcgcagctcctttcgagcgggaaccgcgagttgctgcgcgtcatcgacgagcagtcacccggttcgctggaggaactgtcgcggatcacgggacgggcgaagcctaacctatcccgaaccctcaagaagatggcgagctacggcctgatccgcatggaccccggcgagggccagaagctcgtccccaaggtgctgcatgaccgggtggagctggaattgccgctgatagaacgtcgcacggcagcaggagtccggtcatga

SEQ ID NO: 352191 - DNA, 324 bp, Pseudomonas aeruginosa
atgtgcgcagagcgccgccgcgcccgcaaagggcgaccgcgacagccggtccccgaaacacttcccgacgatcttttcgactacgccgacgaacccacgccggacggccgggagcgccgcaggtcgccgcttcgcatcgtcgaagtggagtcgttgcctgtcttcgattactggccagagaaggtgccgatcaccgaggaagaactgcaaatcttcgagcggtatttcggcgacgtgctcgaccggctgttcggccccatcgacctcgatcccgacaatcagggcttgcaacagttatcctctgatgataacagtaagtcatga

SEQ ID NO: 352192 - DNA, 234 bp, Pseudomonas aeruginosa
atgaccaagctgaaactcggcccgctgcccgacgacaagcccgtcaaggtgacggtggagctgcccgcgccgcttcaccgcgatttggtcgcctatgccgaagtgctggcacgcgagagcggccagcccgccgccgatcccgtcaggctgatcgtgcccatgctggagcggttcatcgccacggatcgcgggttcgccaaggcgcgccgggcacgaagtgcatcggcgaactaa

SEQ ID NO: 352193 - DNA, 1137 bp, Pseudomonas aeruginosa
atgaccgacaacaccatcgccgatactgccgcccccatgcgcctgcgcgccgagccgccccgcgtcacacgcctgtcccgcaagatggtggcaggcgtcggagccgtcgcgcttcttggcataggcggcgcgctgatctacgcgctccaaacccgcgatgcaggaccgggaggcgaagaactctattcgaccgagaaccggcccacggcggacggccttgccggtttgccgcgcgattataccgggccggtgctcggccccgcgctgcccggagatttgggccgccccatccttgacgcgcagaaccggggacagcccgtcgcgccgcccgtcatgacaacgcccgccgtcgatccagaggaagaacgccgccgcgccgaggaagaagccgcgcgcttgagcaacgtgttcttccagtccggcccgcgcacgggagcgccggcagggacggccatgcccggccttgccggtcttggcattggtggacagcccgagacacaggaccggcacgcggctttcctcaatggacccgtggatcggcagaccgtcgcgccggatcgtgtcacgccgccggcctcgccctacattcttcaggccggggccgtgatcccggccgcgctcatcaccggcatccgctcggacctaccgggccagatcacggcgcaagtgacggagaacgtctatgacagcccgaccggcagcctgctcctgatcccgcaagggacgcgcatcatcggtcaatacgatgacggcgtgaccttcggccagcgcagggtgctcttggcgtggaatcgcctgatcctgcccggtggccgttccatcgtccttgagcgcctgccgggcgcggacgccagcggctatgccgggctggaagacggggttgattaccactggtgggatctgatgaaggccgcagggctttccacgctgcttgcggtcggcacggagctggcgatcagcgacgaagaccggcttatccgggccatccgcgacggtgcgcaggataccgtcaatcaggcgggccagcagatcgttcagcgccagttgcaggtcgcgccgacgctcaccatccggcccggcttcccggttcgcatcatcgtgacccgcgaccttgtattcgagccggctggaggttga

SEQ ID NO: 352194 - DNA, 999 bp, Pseudomonas aeruginosa
atgaggacgatcacccgcacccacacaatcgcggccgtgctgctttcggccaccatgctcgcaggctgcgcgaccaaccggacgccgcaattcagctacgataccagcgtgccgccgctgccgaccgtgcaggcgatagcaaccgacaacacgccccggcctttgcatgtgcccccggcatggaccgtggcgcgtggcggaaccgttgccggcacgccgaccggccgtgttgagaacgccaatgccgccgcccgcgtcgagccgcgccgggaaggctactacaacgcgatccagatttatccgtggtccgaaggcgcgctctatcaggtctatgccgcagtcggacagatcacgacgatcgcgctggagtcgggcgagagcctgacaggcgcggggccgattgcggcgggcgacaccgcccgctggatcatcggcgacaccgagagcggcagcggtgcaaaccgccgtgtccatatcctcgtgaagccgacacggccggacatttccaccaaccttgtcgtcaccaccgaccggcgcacctacatgatcgagctgcgcgctcgggaatcgctctacatgcccgccgtagcatggacgtatcccgcgacgtccggccagcgccgaacccttccggcagccccgatcatcccggtcgaggcagcgcggaactatcgctacgccttgcaggtgcagggcgacagcccgccatggcggccggtttccgtcttcgatgacggcaggcgcgtctatgtcgtcttcccggccgggatcgtgcagggcgagatgccgccgatcttcgtgctcggatcgaatggcgagccgcagatcgtcaattcccgcatccatcaaaacgtcctgatcgtggaccgcctgttcggcgcagccgagctgcgccttggcagcggcaaccgccagcaggtcgtcaggattgtccgcgccaacccgacgcaggcggcaggcgcgcaacccgccagcgtgaccggaggctccccctcatga

SEQ ID NO: 352195 - DNA, 1362 bp, Pseudomonas aeruginosa
atgggcaacacgggcgtcatcgactcgtttctaggagtcttcacctcctacatcgacagcggttttgggctgctcggcggcgaggtcgccttcatcgccaccaccctgatcgtcatcgacgtgacgctcgccgcgctcttttgggcatggggcgcggatgacgacattatcgcgcggctggtcaaaaagaccctgttcatcggcgtcttcgcctacatcatcggcaattggaacaacctcgcccgcatcgtcttcgagagtttcgccggcctcggcctcatggcctcgggcaccggcttttccgttgccgaccttatgcggccgggccgcgtggcgcagaccggcctcgatgccggccgcccgctgctcgaatccatttccgacctgatgggctggatcgctttctttgaaaacttcatccagatcgcgtgcctgctgttcgcatgggcgctggtggtgctggcgtttttcatcctcgccatccagcttttcgtgaccctgatcgagttcaagctgaccaccttagcggggttcgtgctgatccccttcggcctgttcggcaagaccgccttcatggccgagaaggtcttgggcaatgtggtgtcctccggcatcaaggtcttggtcctcgccgtcatcatcggcatcggcagcaccctgttttcgcaattcacggccggtttcggcggggcgaccccgaccatcgacgacgccatggcgattgtgctcgccgcactgtcgctgctcggcctcggcatcttcggccccggcatcgccaacggcatcgtctcgggcggcccgcagctcggcgcgggcgcagccgtgggaaccgggcttgcggtcgctggtgcaggcgtcgccgctggcggcggggccatgctcgccgcgaagggcggcgctgccgccctgtccggtggggccgcggccgtccgcggcggcgcgacggccgcgggcgcggcaacagcagcctatagcgtcggcgcgctcggccagtccggcgcggccggtgtcgcttccggccttggcggtgttgcccgcgccgcaggctcggccgccgtctctcccttgaagcgcgccgtctcgaaagccactgaatccgtcaaatccagcttttccggtggcgcacgcgcggccttcggtgtgacgggcggctcatccaccgcaggcacggtcggcggcgctagcgccgatcctgtcgcagcagcatccggcccggcgggcagcccgcccgcgtgggcgcagcggatgcggcgttcgcaggccatgaaccacggcacgacgatggccgcccatgcggtgcgctccggcgacagccacggctccggttcctccatcaacctttccgaaagtgaccgctcatga

SEQ ID NO: 352196 - DNA, 267 bp, Pseudomonas aeruginosa
atggacggcaagatgctggcccggctcggggccgtggtgttcatcgccatcgccgtcacggcgaccgcaatcgacatggcgcggaaggacgagccttccgcgtcaccttctgcgccggccttccagcccccggccgacccgttgcgcgaaaccctgcgccgctgccagcagctcggcgacgcggcggcgagtgacaccgactgcctcgccgcatgggctgaatcccgcgaccgcttcctcggccgtgatcgcagcgaggcgcgctga

SEQ ID NO: 352197 - DNA, 777 bp, Pseudomonas aeruginosa
atgacctatcccaagatcgtcggggcctcggccctcgcgctggcgctcgccgtgcctgtcgcgctttcgcccatgctggcaagcccggcccatgcgcaattcggcttcggccgcatcgtctatgacccgagcaactacgcgcagaacgtcctcacggcagcgcgcacgctcgaacagatcaataaccagatcaccagcctccagaatgaggcgcagatgctcatcaatcaggcccgcaaccttgcgagcctgccgcatagctcgctccagcagctccagcagaacgtccagcgcacgcagcagcttctcgggcaggcccaaaatctcgcgttcgaggtcggccagatcgaccaagcgttccagagccaatacggcaatgtctcgctttcggcgaccgacgcccagcttgtcgccgacgcgcgcggccggtgggaaaacacggtcggcgggttgcaggacgcgatgcgcgtgcaggctggcgtcgtcggcaatatcgacagcaatcgcgccgagatggccgcgcttgtcggccagagccaaggcgcgaccggcgcgctgcaagccacgcaggccggcaaccagcttctcgccctccagtcgcagcagctttccgacctgatcgcgctcatctcggcgaacgggcgggccgacgcgctgaccgaggccgagcgcgcgaccgccgccgagcagggccgcatccagcgtgagcgattcctgacgcccggcagcggctaccagcccggcaacgctcagatgttcaacaacggcaacaactga

SEQ ID NO: 352198 - DNA, 495 bp, Pseudomonas aeruginosa
atggccgttccgcagaacaaggacgaattgctgaaagcgatcaatgtcaacttcgataagctgcgtagggagcttgttgacgttccagacaacgtggtccgagacaagggccttgaggggcacgccaagggcacgatgatgagcgtatctgatctggtcgcttatcttgtcggctggaatgagctggtgctgaaatggctggaccgggatgagaccggccaacccatcgacttccccgaaaccggcttcaagtggaacgaacttggcctgctcgctcagaaattctaccgtgactatgaagcggtcccgtatcagcagctcgtcgagcgactggaaacggccaagcaccgtatcgtcacgctgatcgaggcgcgcagcaacgacgagctatatggccgtccatggtatgagaaatggacgatggggcggatgatccagttcaacacgtcttcaccctacgacaatgcgcgcgggcggctgcgcaaatggaagtaa

SEQ ID NO: 352199 - DNA, 465 bp, Pseudomonas aeruginosa
atgaccacacgcacccgcctgaatatctatttcgaccccgcactcattccgcagatcgaggcgatggcgctgcgccgctcggtggccctacgccgcaatgtctcgaaatccgccatcgtggaggcggcggtcatgtcctacctgtctggcgatgccgacgaccagcttgaagccgccatgtcgcgccgcttggacaagctcggccgccagatcgaaacgctcgacctagatctcgccgtcctcggcgagacggtcgcgcagttcatccatttctggatgaccatcacaccgccgcttacgggagccgcgcaatccgccgctcgcgcgaaaggcgcggagcggttcgagggcttcatgcagaatctcggccggcggctggcgacgggcgacaggttcctcaaggagctgtcgcgggatatagatgtaaccgtggaagcagacccggcatcagacccgtctgcttga

SEQ ID NO: 352200 - DNA, 1851 bp, Pseudomonas aeruginosa
atgggccagcaatggcccatccccacccgactcttctggtggtggttctccttcgatgcttatgcgcccgcgatcttcgtggagggcggcatcatcgcggtatcgggcggcttcctcgccattgtcgccgccatcttcatgtcgatcatccgggcgcgggaagcgcgcaacgtcgccacctacggatcggcgcgatgggcggatagccgggaaatccgcagcgccggcttgctcggccccgatggcgtcctgctcggcctatacgaccgggactatctgcgccatgacggtcccgagcatgtcctatgcttcgccccgacgcgcagcggcaaaggcgtcgggctggtggtgccgacgctgctgacatggccggcatccgccattgtccacgacataaagggcgagaactggacgctgacagccggcttccgcgcaaagcatggccgggtactgctgttcgatccgaccaacgccagatcgtcggcctacaacccgctgctggaggtccggcaaggggaatgggaagtccgcgacgtgcagaatatcgcggatattctggtcgatcccgaaggcagtctcgacaagcgcaaccattgggaaaagaccagccatagcttgctggtcggcgcgatcctgcatgttctctatgcggagaaagacaagaccttggcgggcgtcgctaacttcctgtccgatccgcgccgcccggtcgaggcgaccttgcgcgcgatgatggacacaccgcatctcggcgaggcgggcgttcatcccgtcatcgcgtcgtcggcccgcgagctattgaacaaatccgagaacgaacggtcgggcgtattgagcaccgccatgtcgtttctcggcctctaccgcgatccggttgtggcgcgggtgacggcgcgctgcgactggcgcattgccgatctggtcggcagccgggagccggtcacgctctaccttgtcgtgccgccgtccgacattaaccgcaccaagccgctcatccggctcatcttgaaccagatcggccgcaggctgaccgaggaattgaacacgtccggcaagcgccatcggctgctgttgatgctggacgagtttccagcactcggtcgcctcgacttctttgaatcggcgctcgccttcatggcggggtatggaatcaaaggcttcctgatcgcacagagcctcaaccagatcgagcgcgcctatgggccgaacaacgcgatcctcgataactgccatgtgcgtgtgagcttcgccacgaatgacgagcgcaccgccaagcgggtgagcgacgcgcttggcaccgcgaccgagctgcgcgattccaccaactatgccgggcacagactggccccgtggctcgggcatctgatggtgtcgaggcaggagacggcgcggccgctgctcacgccgggcgaaatcatgcagcttccgccgaccgacgaaatcgtcatggtcgcgggcacgccgccgatccgcgcgaccaaggcccgctatttcgaggacgcgcggttgcaggaacgcatcctgaccccgcccgatctggtcgccgcttcgctggcgcccagcccatcaaccgatgattggtcgagccgcgtggtcgcggcgtcggaccagtccgcgacggatgctgccaacgggagcgagggcgacccggccaatgccggcatccgccgcgagccggaattgcccgagcatgaggaaatcgtcgcgccgccgccatcgcccgaacaggagttcgagtttctggacgacgagccggacgttgacgcggccaaggcccgcgccatgcgccagcgcatgaggatggtggcgcggcaggtggcgatgaaccccgatgatggaatcgagctttga

SEQ ID NO: 352201 - DNA, 3132 bp, Pseudomonas aeruginosa
atgtccgaattcttcatcaagcggccgaacttcgcctgggtggtggccctgttcatctccctggccggcctgctggtcatttccaaattgccggtagcgcagtaccccaatgtcgcgccgccacagatcaccatcaccgccacctatcccggcgcctcggcgaaggtgctggtggactccgtcaccagtgtgctcgaggagtcgctgaacggcgccaagggcctgctctacttcgagtcgaccaacaactccaacggcaccgccgagatcgtcgtcaccttcgagccgggcaccgatccggacctggcccaggtggacgtgcagaaccgcctgaagaaagccgaggcgcgcatgccgcaggcggtgctgacccagggcctgcaggtcgagcagaccagcgccggtttcctgctgatctatgcgctcagctacaaggaaggcgctcagcgcagcgacaccaccgccctcggcgactacgccgcgcgcaatatcaacaacgagctgcggcgcctgccgggcgtcggcaagctgcaattcttctcttccgaggcggccatgcgggtctggatcgatccgcagaagctggtgggcttcggcctctccatcgacgacgtgagcaatgccatccgcgggcagaacgtgcaggtgccggccggcgccttcggcagcgcaccgggcagttccgcgcaggagctgacggcgaccctggcggtgaagggcaccctggacgatccgcaggagttcggccaggtagtgctgcgcgccaaccaggacggctcgctggtccggctcgccgatgtcgcgcgcctggaactcggcaaggagagctacaacatttcctcgcgactgaacggcacgcccaccgtgggcggggcgatccagctgtcgcccggggccaacgcgatccagaccgctaccctggtgaaacagcgtctcgccgaactgtcggcgttcttccccgaggacatgcagtacagcgtgccctacgacacctcgcgcttcgtcgacgtggccatcgagaaggtgatccacaccctgatcgaagcgatggtcctggtgttcctggtgatgttcctgttcctgcagaacgtccgctacaccctgatcccgtccatcgtggtgccggtgtgcctgctgggtacgctgatggtgatgtacctgctggggttctcggtgaacatgatgaccatgttcggcatggtcctggcgatcggcatcctggtggacgacgccatcgtggtggtggagaacgtcgagcggatcatggcggaggaggggatttccccggccgaggccacggtcaaggcgatgaagcaggtatctggcgccatcgtcggcatcaccctggtgctctcggcggtgttcctgccgctggctttcatggccggttcggtgggggtgatctaccagcagttctcggtgtcgctggcggtctcgatcctgttctccggcttcctcgccctgaccttcaccccggcgctgtgcgccacgctgctcaagcccattcccgaagggcaccacgagaagcgcggcttcttcggcgccttcaaccgtggcttcgcccgcgtcaccgagcgctattcgctgctcaactcgaagctggtggcgcgcgccggacgcttcatgctggtgtacgccggcctggtggccatgctcggctacttctacctgcgcctgccggaagccttcgtgccggcggaagacctcggctacatggtggtcgacgtgcaactgccgcctggcgcttcgcgcgtgcgcaccgatgccaccggcgaggagctcgagcgcttcctcaagtcccgcgaggcggtggcttcggtgttcctgatctcgggcttcagcttctccggccagggcgacaatgccgcgctggccttcccgaccttcaaggactggtccgagcgaggcgccgagcagtcggccgccgccgagatcgccgcgctgaacgagcatttcgcgctgcccgacgatggcacggtcatggccgtgtcgccgccaccgatcaacggtctgggtaactccggcggcttcgcattgcgcctgatggaccgtagcggggtcggccgcgaagcgctgctgcaggctcgcgatactcttcttggtgagatccagaccaacccgaaattcctttacgcgatgatggagggactggccgaagcgccgcaactgcgcctgttgatcgaccgggagaaggcccgcgccctgggggtgagcttcgagaccatcagcggcacgctgtccgctgccttcggctcggaggtgatcaacgacttcaccaatgcggggcgccaacagcgggtggtgatccaggccgaacagggcaaccggatgaccccggaaagcgtgctcgagctatacgtgcctaacgctgctggcaacctggtaccgctcagcgccttcgtcagcgtgaaatgggaagagggaccggtgcaattggtgcgctataacggctacccgtcgatccgcatcgtcggtgacgccgcgcccggcttcagcaccggcgaagccatggcagaaatggagcgcctggccgcgcagctgccggccggcatcggctacgagtggaccggcctgtcctatcaggagaaggtctccgccgggcaggccaccagcctgttcgccctcgctatcctggtggtgttcctgttgctggtggcgctctacgagagctggtcgatcccgctgtcggtgatgctgatcgtgccgatcggcgccatcggcgcggtgctcgcggtgatggtcagcggtatgtccaacgacgtgtatttcaaggtcggcctgatcaccatcatcggtctttcggcgaagaacgcgattctcatcgtcgagttcgccaaggaactctgggagcaggggcatagcctgcgcgacgccgccatcgaggccgcgcgcctgcgcttccggccgatcatcatgacttccatggcgtttatcctcggcgtgatacccctggccctggccagcggtgccggcgcggcgagccagcgtgccatcggcaccggagtgatcggcgggatgctcagcgccaccttcctcggcgtgctgttcgtacctatctgtttcgtctggctgctgtcgctgctgcgcagcaggccggcacccatcgaacaggccgcttcggccggggagtga

SEQ ID NO: 352202 - DNA, 270 bp, Pseudomonas aeruginosa
atgcgcattgaagacatgagcatcgatcagctattggagctgaaccgaatgatctgccggcgcattgatgaactgcaagatcaagaaaacctgcaggcgctgagtcggctgcacgtggggctgaaggtgaccttcgaaagccgaactggcttgactatggggatcgtcaccaagatcaaccgcaagagcgtgatcgtcctggccgagaacggcacgaaacagtacaaggtctcaccggaattgctaaggccccttcgggacgtaaagtaa

SEQ ID NO: 352203 - DNA, 1623 bp, Pseudomonas aeruginosa
atggcttccgcgtcctattccaacgccccttcctactcggtactggccgagaagaatgccctgttgcgtgagcagctacaggtcatgcagcggcagttggactggttcaagaagcagctgttcggccccaagtccgagaagcaggtgtatgacctcccggagcagggcggcctgttccaatcgaatgatgcggctagcccggagaagcctctcgatgcggagaaacgcccggttcgggcttatcagcgaggcaccggaaagaaacagcgggacgacgactgcctgaacgatacgggtctgcgttttacagcggacgtgccagtggaagttgttgaacacctgccgccggagctaagcggccccgacgccgaccagtacgacatccttggcaccaaaacgacctatcggctggcccagcggacgtccagttacgtggtgttgcaagtggaacgccccgtatttcggcgcaagggcagcgacaagcccgtgaccacgccggccccgtccaacgtactggacaacagcctggccgacgtcagcttgttggcgggtctgatggtcgacaagttccagtttcacctaccgctgtatcgccaacaccaacgcatccagcaagcgggtattaccctcagccgcagcaccctcaccaatctgatcaagcgatctattgatctgctgcggccgatcgtggatgcccagaccgacaatgttctgcgcagccgggtgttggcgatggatgagacgccgattaaagctggccaccagggtcgggcaggcccacaaaaaggcaagatgaaatccggctggttctggccgttatacggcgatgccgatgaagtggtgttcacttactcgaacagtcgaggccgagcccatatcgagcaggtactgaacgaacagttcagcggaactctgatcagtgacggctatgctgcttatgcccgctatgccgccgcacagcagaacatcatccacgcgcagtgctgggtgcacagtcgtcgttacttcattgaggcgcagaaggaccacccgataactgccaccgaagcccttcagcagattgccaagctatacaccaacgaagaagagatccgcgtccagcaactgaccggcgaaaagaaacgccagtaccggctgctccactcaaagccggtggtcagcgacttcttccaatggtgccgggatcaactggcacagggcggtctgctgcccagtgatttattgaccaaagcactgaactacgtgctcagccgtgaagccagcctgaccgtcttcctggaagacccagacgtccagccagacaccaaccacctggaacgggccctgcgccccattcccatgggacgcaagaactggctgttctgctggactgaactcggcgcggaacacgtgggcatcatccagagcctgatcactacgtgcaaactgcacgacatcaacccgtacacctatctggtggacgtgctgcagcgcatcagtcagcacccggccagcaaggtcgctgacctgacgcctcggctctggaagacccggttcgccgataatccgttacgctcgctgatcgatccgcgccattctgatcgacagaccgcacagccaaagggcaccctccatgcgcattga

SEQ ID NO: 352204 - DNA, 345 bp, Pseudomonas aeruginosa
atgatcggtctggatagccaggcccggatctggctgtgcaccgagcccgcggatatgcgcaaatccttccgggggctgagcgctctggtccgcaatcaactcaagcaagatccgctcagcgggcagtattttgtcttcgttaaccgtcgcaagacccaaatgaagatgttgtatttcacgcccacgggctactgcctgtgggccaagcgactggagcaggggcagttccgggtacggccgtcttcttcgggacagcgccccttaaacctgactgatctccagttgctgattgacggtatcgaggtgcaaaagtaccgtcagttcaagcgttttcggggcacgtag

SEQ ID NO: 352205 - DNA, 291 bp, Pseudomonas aeruginosa; identical to SEQ ID NO: 57597

SEQ ID NO: 352206 - DNA, 858 bp, Pseudomonas aeruginosa
atgaatacagagactcaaagagcctacatcagtttggccagtaacttctatgcgactcgaatgcagggcgttgagcttgatgagctcaatattattggtgctttactacgggcggcccctgattaccgcccggattattatcggcgcctacgtaacgctttggcgtttgatcaaaagcatcgaggcaatttctgggctgcccaagaaatcaatcggacgctcaatccggtcactgtgttgaatctgccgcgaaagaaaaagcagcgacgtccgcaaaagctttctacccctgattttgaggcctggctacggtgtctggctgaacgagatatgcctgtcgaagcgggagctttaatggtgatatctcttaccggagcgcgaccatgcgagcttaacggaatttctatcgatggccggcgcatccatatatccggtgcaaagcttagccacaacggtttacgcggcgctagccgaacgcttgaggctgacgatggcgtctgtaaaatcttgagaaacgctctcgctgcttttaaatgtcagccccgcagtatggattcaatacgcgttgcacttaatcaagtggccactgagctattcggtagaagaaaagtgccgagcatgtacacgcttcgtcatcaatttggagcgaatctgaaagcctcaggtttttctgagattgagatggcatacgtcatggggcaccaagctaccgattcgattagccggtacggagataaaagacttggtcgagcagaagcggttaaggtcaagcccgcaagtgatgctgatctatccaaggtgagaaaaacggtgcctgcgcgaatgcgtggggtcgctctacccgccgcgtcaggatag

SEQ ID NO: 352207 - DNA, 942 bp, Pseudomonas aeruginosa
atgtacgacctgatcggggacattcatggttacgcgtcggcgctcaaacgcctcctacgcaaattggggtatcaggagcgggaaggcacctggcagcatgttgagcgcaaggtgattttcctcggcgacttcgttgatcgcggccccgagcaagttgaaaccgtccagatcgctcgtcgcatggtcgaggcgggccacgcgctggccgtcatgggcaaccatgaattcaatgcggttgcctgggctacgccttgcgctgaacgaactggggagttcctacgtgttcactcggataagaaccgcgagcagcacgacgccttccttgtccagatcggcgagggctcccatcagcacctggacacgatcgagtggttcaaaacgctgcccctctatttggatctcggcggcctgcgcgtcattcatgcctgctggcatccccgacagattgaggcgctggcatctcacctggatgtgcacgcacggattcgctcaggctcctggtcggctgtatgcaccgagggcagtgaagcctttgatgccgtggaaatcctcctgaagggaatggagattcccttaccgtcgggtttgcatttcaaggacaagtacgggcatcggcgctcccgtactcgcacgcgctggtggcaggagggtgagcagctgacctatcgtgatctggcgatggtcccgccttccattatcgatcagatcccccacgagccggtgcctgccgatctgcagcccggctacgacggcagcaagccgctgttcatcggccattactggatgactggcacgcccaccctgataaccgatcagattgcttgtctggattacagcatcgcaggcgaagatcccggccgcgccaaactctgtgcctaccgctggagtggtgaaggcaaactgtcggagaagaacttcgtttgggtcggacgcgaaacctga

SEQ ID NO: 352208 - DNA, 798 bp, Pseudomonas aeruginosa
atgagaaatcaggcacaaatccgttccgactttctggtgtgctgctggacgggcttcgtactcgtggccatttacctgccgatcatctgcagcgcgctggccgggctgtcgacgagtcgctacttcctgttcccagtacgggaatactcgctgagctggtggcagcgcacggtcgattcgtttgaggtacagatcctcgtgcagaactcgctgaagatcgccctgctggtgacgctgatttcggtagtgctggccttcttcggcgcgctggccttcgcccgctacgactggaagggccgcaagctgtaccagaagctgctgctactgccgatcttctttccgcagactgtgctgggcctggccctgctgctgtggatgaacgcgctgggcctcagtccgagctggaagaccgcggtgatcgcccatctagtgtggatcgtgccggtggtgaccttggtcatcgccatccaagtctacaactatgacccgagcctggaggaggccgccagcgatctgggcgccggcaagctgttcatcttccgcgaaatcaccctgccgctgctgtggccggggatctggtcgggggcgttgttcgccttcctgctgtcctggggtaacttcccgctgtcgctgtacacctccggggccgactcgaccgtgcccaagtggttgtactcgaagatggtcgccggctatacaccgatggtgcctgcgctaggcactatgagcaccctggctgcggcggcgctattgctgctcggcggggtaatcatcgcgacgcttcgccgacgcaagtag

SEQ ID NO: 352209 - DNA, 867 bp, Pseudomonas aeruginosa
atggatgctgtttcggggcgcggcctctccattggcgcccgctacgccagtccgctggtgatctttctgctgctgggctttctcgccccgctggtgacggtggtggccttcgccttcgccgagccgaaaagcttcgaggtgttccgcaccttcaccttggaaaacttcgccgccgtgctggatccgtccaacacggtgtggcgctcgttcgtctggtcgctggtgctggccgcgctctgcgtggctgtgctagcggtcatcgcctatcctatcgcctacgggctcaaccgggtgtttggccgcttcgccccgctgatcagcgtgctattcgtgttccccctgttcgtctcggagaacgtgcggctctacggctgggtgcagttcttcattaagaacggcgtgctcgacggcgtgcttaaggcgttcgatctgggccgcgcgcccgatgtgctctacagcccgggactgaccctgttcggcatggtctatgtgtatctgcccttcatgctgttccccatcaccctggggctggccatggtgccgcgggatctggtggatgcggcgaaggatctgggcgccggccggctgatggtctggcgcgaggtcgagctgccgctggcgatgccgggcatcctcatcggcatgttgctgaccttcgtgctcgccgtgggcgcggtggccgaggcaagaattctcggcgggcagtcggtgatcactgtggttcacgacatcgaggtggccttcacctacgcgcagaactggccgctgggcgccgcgctggcggtactgctggtgctgattatcggcagtctgacgctcttcgtgctgacgcgcctggaccttgatcgagtgttagggaaacgttga

SEQ ID NO: 352210 - DNA, 1101 bp, Pseudomonas aeruginosa
atgaacagctcgacgatcgacaacgtcgcgaaacagccactacccgtgctgcaactggtggatgtgcagaagaagttcggtgatttcacggcggtgaagaacatctcgctggatgtactggaaggtgagttcctgacgatcgtcgggccgtccggttccggcaagaccacgatgctgcgtatgctggcgggcatggaggcccccagcagcggcaacatcaccctgcgcggggaggcgatcaacaacctgcccgcccagcgccggccaacctgtctggtgttccagtcccttgcgctgtttccccacaagacggtgggggaaaacatcgagtttccattgaaggtgaagaaggtgccgaaggctgagcgcagggcccgggcgctgggactgctgcggatgctgcggctgccggagaactactacgacaagaacgtcacgaagtgctccggcggcgagcgtcagcgggtggcgctggcccgcgcctttgcctacgacccggacgtactgctgttcgacgagccgctctcggcgctggactacaagctgaagaaggtgctggagaaggagctgaaggatctgcaccgggaaagcggtaagaccttcatctacattacccactcgctggaggaggcgatggtgatgtccgatcgcatcgccgtgatgcgatcggggcagatcattcaggtagggtcgccggaggagatctacgcgcacccggccgacgagttcgtcgccgaattctttggcgaggtcaacaaattcccggtcagcctggaagccgagcggggctggtacagcgccggcctcgatcgtccgctccgcctcgatctgccggccgaactgcagggcgcgacggccgccaccgtggtggtgcgcccggaatacatgcagttcgccggttcggaggacgaattcgacaacgtaatccgcggcacggtgtttaacgagtactcgctcggctcgcgcgtgcaataccagatccgctgcggcgaccgcagcgtgctgctggaaaacccgcgcacctttacccgcgaccgggcccgtgacgagcaggtgctcatcggctggaacgcggcggacgccatcgttgcaggagcctga

SEQ ID NO: 352211 - DNA, 1152 bp, Pseudomonas aeruginosa
atgaagggcgtatcgagaagggaactgttgaagctgatggggatgggcgccggtgcggcagccctcggtggcggctcgttgctgatgagctccagtgcctttgctgcgcgggagaaggagctgaacatcctttgctgggagggttacaactcggcacaggtgctcgatccgttccgccgttcgaccggtgccaatgtgcgcgccgagtccctgaccaacgacccgaccatgatcaaccggctgcgcgccggtgagaccaacgtctgggacctgatcaacgtgaacaacccctgggcgcgcaaggtgatgttgcccgagggcctgatcaagccgctgccgcgggccgagttcgagccctatttcgaggacatgctgccccagttcaagtcgccgtatcagtgggcgatgagcgccgacggcaacgagctgctgggtatggcacagcgtttcggtccgttcaactacgtggtcaataccgaccggatcagccgcgcgacggccgaagacaccggctgggacctgttcaacgataaggccctgagcggcaagtacggcatccaggagtcggatgactggaacgtcttcgatatattcctggtggccgggatcaaccccttcatcgagcacacgccggcgcagatggcgaagttccaggaaaccgccaatgcggtgttcaagggcgcgaagatgatcggcgacgcttccagcctcaatcaggcaatgatctccggcgaaattgacctgtacatgaccggcggcacctacagctgctcgccggcgcgggccgacggcttcccggaaatccgcggcatcaccccgctgcgcggtccggtggatggcaaggggggcgtgtcctgggtggagatcacctcgctggtgaacaaccccaacctctcgccgctggccaacgacttcctcaagtacgtgcaggagccggagatcgcccatcgcgtggctttcgccgagggcaccttcaacccggtcagccagatgggcaatcccgagtgcttcaagctgttcaccaaggacgagctcgccgccatccagtgggacagcctgggcgaggaaatgaagcgctgcgtggcctacgacatcgtgccggagttcgacgaggctctgggaatgatctccgcggccaagcggatgcgttga

SEQ ID NO: 352212 - DNA, 765 bp, Pseudomonas aeruginosa
atgtttgaatcactacaaaaaaagacggtaatcgtcacaggcgccagccggggcatcggccgcggcatcgcccgtcgcttcggcgaggccggactgaatgtgctggtggtgtcacgctcgctggaagacgcccgcaaggtggccgaggaaattggcccgctggcctcgggcttcgccgctgacgtcagccagcaggccgactgccaggcgatggtcgatgcggccgtcgagcgctacggatcggtggacgtgctggccgccaacgcagggatcttcccctccgcccgcattgccgagatgacggtggaggatttcgaccatgtgatccacaccaacctgcgcagcgcctttctctgcacccgcgcggtcacaccggtgatggaaaagcagggctttggcaggatcatcctcacctcctcgatcaccggaccgatcaccggcttcccaggctggtcccactacggcgccagcaaggccggccagctgggcttcatgcgcaccgcggcgatcgaactggcccacgccagcatcaccgttaacgcggtgatgccgggcaacatcgccaccgaggggctggaaggcatgggcgaggaatacgctgcaaaaatggccgcctcgatcccctccggccggctgggcaaggtcgaggacatcgccaacgccgtgctctttttcgccagccgcgaggccggctttatcaccgggcagaccattgtcgtcgacggcggccaagtcctgccggaatcctccgaggcgctgggctga

SEQ ID NO: 352213 - DNA, 1335 bp, Pseudomonas aeruginosa
atgaccgaacccaaacagatccttgccctgaaccgcttcgacgctggacgcgccaccgcgctgggcggccggctgggtacgctgcttgagaagcgccggcgttgttttggcgcctcctcggtgctgttctacgagcagcctttggagatcgcccgggccgagggggtgttcatgtacgacaccgccggcaggccctatctggatgtttacaacaatgtcccggtgctcgggcattgccatccggcggtggtggaggccatcagcgagcaggctgcccggctgaataccaacacgcgctatctctacgagagcctgacggactacgccgaaaccctgctcggcacctttcccccggcgctatcgaacctgctgctgacctgcaccggcagcgaggccaacgacatcgccatgcgcattgcccgctctgcgacaggcggcagtggtttcgtggtgaccgagacggcctaccacggcaacacaagcgcggtgatggaaatttccccctcgtcttaccgcaaggggcgcgagctgcccccgcatatccgcacaattccggcaccagacagcttccgcctggcgccgggggaggaagttggcgaggtattcgcttcgcatctggagcaggccattgccgacctccagcgcaatgacatccgcttcgccgggttggtggtcgacactatcttctccagcgatggcgtgtttgccgatccaccgggctttctggccaaggcggtggaggcggtgcatcgcgccggcgggctgtttatcgccgacgaggtgcagccgggcttcggccggaccggccaggggcactggtgcttccagcgccacggcgtcgatccggatgtggtgaccctcggcaagcctatgggtaacggctttcccatgggcggcgtggtgacccggccggagctgctcgatggcttctgcgccgagaccggctacttcaacaccttcgccggcaacccggtggcggcggcggccggccaggcggtgctggacaccctggaacgggaggggctgatcgccaatgccgacagggtcggtcgctacctgcgcgacggcctgaagcggatggggcagagcgatgcgcggattggcgacgtgcgtggagccgggctgttcatcgggctggagttcgtcagcaaaaacgccacgccggatgccgccctggcggggttcgtcatcaatgcgatgaaggagcggggcgtgctgatcggtgccgccggcgcctatggcaacgtactgaagatccgcccggcgctatgcttcagcgaggccaatgccgatcagttcctgaccaccctgcaggaggtgctgcgccaggggtga

SEQ ID NO: 352214 - DNA, 999 bp, Pseudomonas aeruginosa
atgctttatcaatcggattttctcgaaagactggaggccgggctgcgcgtcctgcttcctgagtgggagatggcaccggacgctgcgctgaagcttctgaccatttccgagaatgccacctaccttgccgaggatgtggccggtcggcgactggtactgcgggtgcagcgcccggagtaccacagtctccccgaaatcgaatcggaattggcctggatccgggcgctgcgggagtcggggctggtcagcacatcggcgccggtagccacggttgatggacgggccctgagctgtttcgtcgatggccagacccttcggcatgtcacggccttcgagtgggtgccgggcagtgagccggagccaggatcgcggctgatcagctggtaccgggtcctcggccagaccaatgcgcgcctgcaccagcacagcctgagctggcctcagccccaaggctttacgcgcaaggtctggaacttcgacaccatcattggcgagcaggcgtactggggcgattggcgcaatgcgttgggactgacagcggaagggcgggaggtactcgagcgcacccaggcgctgttgcgcgagcagactgaagcttatggcatggcgccggagcggtttgggctggtgcactgcgacatgcgcctggccaacctgctggtggatggtgagcggctcacggtgatcgatttcgacgactgtggctttagctggtttgtctacgactttgccgcctgcctcagttttctcgaggaagacccgcgcgtaggcgagtttctcgctgcctggctcgaaggctatcgcagcgtgacgcctctctccgaggaggacgagcgagccattccgatgtttctcatgttgcgccgcatgcagctgaccgcctgggtcgccagccattcggaaacgcctaccgcgcagtccatgggcgaggactacacccggggcacggtggccctggctcaacgctatcttgacacccacagcggggacatcccatga

SEQ ID NO: 352215 - DNA, 762 bp, Pseudomonas aeruginosa
atgtccagagccaagaccgcccgccaggctgagattctcgccgagctcaacaacacccccagcctgcgtatcgccgacctggctaggctgcatggcgtatccagtgaaaccatacgccgagacctcgacgagctcacccgttgcggccacctgaaccgtacctatggcggcgcggtgcgagccatcaccagtgagccctcggtcactgaacgtcaccgactgttcggccccgagcgcgaacagatcgcccgggtggcggtggagctgatgaaggacgcgcgcattctgatgatcggctccggctcaaccaccttgcatgtggctcgccgcatcgcgacggcgatgaaggacattaccgtgatcacccattccttcggggttgccacggtactgtcgatcaacccgaccattcgggtcatcgttgtgccaggggactatcacgcaaccgaaggcgccatggtcggcgcccacacggtggcctttctcaacggcctgactgccgatttcgccgtgctcggcgccagcggcctgtccgccgaaggtccgaccgacgcgctgatcgactgcggggtggtctacagcaccatgctgcagcgctcgggtagcacgctggtggtggccgatcattcgaagttcgacgcgaccttcccggctcgttatgccagctggcagcaggtggattacctggtcaccgacgagcagccgaccggcaagctcgccagcgccctgagccagcacaaggtcatcgttcgacgccattag

SEQ ID NO: 352216 - DNA, 711 bp, Pseudomonas aeruginosa
gtgcctcaacggcgggccaggcctgccctgcgactacctgcgcgacgcccacgcctggctgaaggaagagggcctgcgcatcgtcgccttcgatcagctcggtaccggcaaggcggaccgcccggaagacccggcgctgtggaccattgcccgctacgtagaggaagtggaaaccgtacgcaaggccctcggcctcggccgggtgcacctgctcgggcattcctggggtggctggctctccatcgaatacagcatccattacccgcaggcggtgaagacgctgattctggaaaacaccgtggcggacattccgcacctgtcccaggagctcggccggctgcgcgcggcactgggcagcgaaaccgtggcgatgatgcagcgccacgaagcgaaggggaccaccgatcaccccgagtaccaggccgcggtcaccctgctgaactaccgtcacgtgtgccgcctcgaggaatggccggccccggtgaaacgttcgctggacgactggaacatggggccttaccaaaccatgcagggaccgaacgagttcctttacatcggcaacctgcgcgactggaaccgactgaaggaaatgggggagttccgcatgcccatcctcatcaccaccggccagcacgacgaactcacccccgcctgcgccctgcgcatgaaactggccgcgccccatgcggaagtgcatgtattcctcaatag

SEQ ID NO: 352217 - DNA, 1374 bp, Pseudomonas aeruginosa
atgcaactgtacaaacgtaacgacggcgatgaacaaccctgctggaaggccggaccgttcaagcttcgcctgcccttcgtgcactaccgctgggaaaccgcggagatgctccaggcgctgatcatgttcgtggtcagcctgggcatgatcccgctgttggagaaatacctcggcctgccctacgaggtggcgctggcctacgtggtggtgtgcggcatcggcttcatgctgccggcgttgctcggcgtgccgctggtgccgggctggatcacccccggcatcccggtggtgctgctgtttctcggcaacttcgagccggggccggaggcgatccgcgcgctgttcgcgctgcagatcctggtctgcgtcatcttcttcctgctcggggtcacgcgcctgggcagcgtgatggtgcgcatcgtgcccaactcgatgaagggcgggatcatcatcggcgccggcatcgccgcgctgatcggcgagatcgagaccggcgggcgcctggccaacacgccgatctcgttggtgctgggcagcctgatctgcctgtacctgatgttctcggtgtcgttccgcgggcttaccgagcgggtgccgctggcgcgcaagatcgtcaactacggcatggtcccggggatgatcgtggccatcgtcgccggcatcgcggtgggcgagtacaggatgccggacgtgcgcttcggcatcaccgcgccggctttcgaccagctctggcagtacctgcccttcaccgccggcttccccgacgcccaggtgttcatgctggcggtgcccaccgcggtgatcgcctacatcatcgccttcggcgacatcatcgtcggccagtcgctgatgcagcgcgccgacgagctgcgcaccgacgagaagatcgagatcaacgtcgaccgcatccacctggtgtgcgccatccgcaacgccctgcatgccttcttcgcgccctacccgggcctggccggcccgctgtggacggccgtggcggcgaccatggccgagcgctacaagtacggccgcaaggcgatggagtcgatctacagcggcgccggcaccttctggatcaccggctttctcgcgctgttcgtcctgccgctggtgagtttcttccagccggtgctgccgatcgccctgtcgctgacgctgatcctcaccggctacatctgcctgatggtcggcttcgagcagctcaacaacaacgccgaacgcggtatcgccggcaccatgggtgtggtgctggcggtgtacggcgcgggctggggcctggccgctggcgccgtgctgtacctgctgatcgagcgcacccacctgctgcgcttcgcctcccccggggtgcgcgcccagcgccccagcgaagccgactga

SEQ ID NO: 352218 - DNA, 1659 bp, Pseudomonas aeruginosa
atgaccatctacgaacagggccttgcgcccgccgcagtcaaccatgttgccctcagtccgctcagcttcatcgagcgcaccgccagcgtttatcccgattaccccgccgtgatccacggttcgatccgtcgcacctgggccgaaacctacatgcgctgccgacgcctggcctctgcgttggccgggcgtggtatcggcaagggcgataccgtcgcggtgatgctgcccaatatcccctcgatgctcgaggcccattttgccgtgcccatgatcggcgcggtgctcaatacgctcaatgtacgactggatgccgaagccattgccttcatgctgcagcatggcgaggcccgggtattgatcgccgaccgcgagttctcctcggtcgtgcgcgcggccgtcgggatgctcgatcacccgccgctcgtgatcgatgtggacgaccccgagtacggcgaaggcgagccggtttccagcctcgactacgaagcgctgctcgccgaaggcgacccggcgttcgcctggcagtggccggaagacgagtggcaggcgatcagcctcaactacacctccggcaccaccggcaaccccaagggcgtggtctatcaccaccgcggcgcctatctgaacgcgctgggcaaccagatgacctgggcgatgggcaaccatccggtgtatctctggacgctgccgatgttccactgcaacggctggtgctacccatggacgattaccgcgctggccggcgtccatgtgttcctgcgccgcgtcgacccgcagaagattctcgggctgattcgcgagcatcaggtcactcacctgtgtggcgcgccgatcgtgctcaatgcgctggtcaacatgcccgcttcggccaaagccgccatcgaccaccccgtgcacgccatggtcgccggcgccgcgccgccggccaaggtgatcggcgcagtcgaggaaatgggcatcaaggtgacgcatgtctacggcctgaccgaagtctatgggccggtcaccatctgcgcctggcatgccgaatgggacgaacgccctctggaggagcgcgcggaaatcaaggcacgccagggcgtgcgctacccgaccctggaagggctgatggtggccgatcccaaaaccctggagccgaccccgcgcgacggccagaccatcggcgagatcttcatgcgcggcaacacggtgatgaagggttatctgaagaaccccagtgcaacggccgaagcgttcgaaggtggctggttccataccggcgacctggccgtctgccacccggacggctacgtggagatcaaggatcggctcaaggacatcatcatttccggcggggagaacatttccaccatcgaactcgaaggtgtgctgtaccgccatcctgccgtgctggaagctgccgtggtggctcgaccggatgagaaatggggcgaaaccccctgcgccttcatcaacctcaaggccgatcaccaggccgtcgacgaagacgccatcatcaatttctgccgcgagcacctggcctcgttcaaggtgccacgcaccgtcatattcggggcgctgcccaagacctcgaccggcaagatccagaagtacgtcctgcgcgaacgggcacgcgacctgtcgccaccccagcctgcacctctgcgcaatctggcctga

SEQ ID NO: 352219 - DNA, 2271 bp, Pseudomonas aeruginosa
atgagcacaactcccgttcgccttcacacctggctgcgtctgcagcgtgaacaggtagcgctcgacgcgcgcgccgatgccctgtgccgggtgctgcgcggctgcgccggggtacgccaggcgtactacatgacctggcaggccggtgccggcatctacacccatgagggcagtggcgcacagctgcctcccggcctgggtgatccgctgcaggccagtgatcgcctgctgcatgagcggctcggcggcgagggcctgctcgacctcgccgttgtccgtgggctggactgctggcttgccggccgcctgcgccgggcaggtatcgttcagggcgccgtgctggcgctggatctggatgaagccgtacccgggttgttgctgcttgccaccgatggcgatgtcggtccctgctcgctgagctgggtacgcgagctgttgctcagcctgctcgcatgcgcgagcggcctggcgcgtcagtcgccgttgctcggcctggatccgcaaccgagcctgctgctggacgagcacgcgtatcccgtcgagctgaacgctgccctgctggcgctgctggccgatcgccctctggatgagctgctgcgctttctgcccgtcaatcacgccgcgctggtcggcgcttgtctggcgcaacaacgggctatcgaaggggtggaggccgaatacgaccagcgcatcctgatctggacctttgttcccgaccccgcgcagaaccgggtgctcgcgcgctgtcgagaggcgaccgcacaggtcctggccgagcgggatgcggcacgcgcccggcgtctgtatcggctgatcaccgaaaacaccaccgacctgatctcccggcacgcgcccgatggacgctttctcgacgcctcgccagcggcctggcggctgctcggctattggccggagcagttgcgtggccagctcgtggaaacgctgttccaccccgaagaccgggcccagttgccggcgcgcagccgcgacgcgctggaggtggacggctatcacacgatgacctaccgggtgcgccatcgggatggtcactacctgtggttcgagaccgccagccatgccatccgcgagacctataccggcgcggtggtcgaggtggtcagcgtgtcgcgcgaaatcaccgcgcgggtgcaggccgaagagaaccgccggcgtctggccgaggtggtggaagtaaacactgacctggtgttgttcatcgatgccgaggggcgggtgacgtatctcaatccggcggcaaggcgagcgctgcgtctgcaggatgggcagatgccggcgctcgatgcgctgttcgataccgaggtactggcgctgctgcacggaaccggccgcacgaccgccgagcgcgagggcgtctggagctgcgattcgcgtctgctcgcacaggacggcggtgcctcggtgccgatttccctcgtgctgctggcgcatcggacgaccggcggcgagcgttattactcgctggtggcccgcgacatgagcgagcgtgagctgcgcgaggcgcagcagcggcgccaccaggacgagctggcgcatacggggcgcctcatcaccctcggcgagctggcatccggcatcgcgcatgagatcaaccagccgctcgcggcggtggtcaactacgccagcgccagccagcgctacctgcagagcctggggcagaatccgcaagcagccgagcgcgtggcccagggcctggagcggattaccgagcacgccaaccatgcctcggaggtgatcaagcgcttgcgggcgttcctgcgcaaggggcagcggcgcatgcagccgctcgatgtcgccgaggtcgcgcgcgacgcggtgcgcctctgcgcgtgggagaccgctgccgcccaggtgaccgtcgagcaggtgctggccgccgacctgccacgggtctatgccgaccgcgtgctgctcgagcaggtcttgatcaacctcttgcgcaatgcgatagaagcgaaccgcgaagcccacccggggcagccgtcgcgtatcgtattgcgcgccgagcgacaggccgatgaggtggtcctggccgttgcggaccagggccgtgggttggatgagcaggaactcgagcaggcctttacgccgttctttacccgcaagccggacggtctcgggctcgggttgccgatgagccgcagcatcatcgaggggtttggcggcgcgttgcagggccagccgggcgagaacggagggctctgcatgcgctgttgcctgccgatcaagacaataacaacagaggaacgctga

SEQ ID NO: 352220 - DNA, 636 bp, Pseudomonas aeruginosa
atgagcgatgctcacgagcaggtggtgtatatcgtcgacgacgaccagggcatgctcgactcgacggtctggctattggagtcggtggggttgtctgccaggccgttcatcggcgggcgggagtttctcgaagcctgcaatggcgcggataacgcctgcgtgctgttggacgtcaggatgccgggtatgggcggtctgcaggttcaggaggccatgcgcgcgcgcgggctgcagttgcctgtgatcttcgtcagcggccatgccgatgtgcctatcgtggttcgcgcattcaaggccggcgcggtggatttcatcgagaagccctacaacgagcaattactgctcgatagcgtgcagcaggcactcagtcgtcaggaacgtgccggcggcaccggcgagcacgtcagcctgcaggcccgcctggacagcctgaccccgcgagagcgcgatgtactgctgccgctggtgcagggctacaccaccaaggaaatcgctcgccagctcgacatcagcatcaagaccgtcgacctctatcggtcccgggtgatgaagcgcatgcaggccgagcgcctggccgatctggtcggcatggccgtagcggcacgcctggtggatccgctgcgcttgcgcggctag

SEQ ID NO: 352221 - DNA, 1014 bp, Pseudomonas aeruginosa
atgtcttacgagggctacagcatttcggtccacttcgcctgcagcgccatcaaggcggcgcagcgcagtgggctcgacgaacaggcgttgctgcaggaagccggcatcggccagcgcctgctcgacaacgcgcagatgcgcatgacctcactgcagttcagccggctgatgctggcgctatggcgcgttggcgacgacgaattcatgggccttgcgccctcccgtagccgccacggtgtgttcgccctgatggcccgccaggtcatcggctgtcgtcgcctggcctcggtctattaccgaatggcgcgcttttacaatctggtcaacgattcgctgcgtctggagctgaccgccgatggcgggcaaaccgctttcgtgatgcgcctggccgatccggagcatgacccggagcatctcttgcgggaagtgttcatgctgctctggcatcgtttcgccagctggctggtgggccagcgcatcggattgcgggaggtgcacttcgactacccgcaaccggccaaccatgccgagtacaggctgatgtttccctgcccggcacgcttctcgatgcccgattgccgcctggtgctcgaccctcaatgcctggacatgccggtggtccagacgcccgccacgctgcgtgaacacctgcggcgggcgccgctggaatggttcacgcgcccgtcctaccaggccgccttcacgcgcagcgtcagtgacctgttccaatacgatggcgcgttcagggacctcggtatcgaagccgcggcagcggcgctgcatatcaccgagcgcaccctgcggcggcgtcttgccctcgaaggtgcccgcttccaggcgctcaaggatggcctgcgccgcgacctggccatccactacctcagtcaggctgggctgccgatcagtgaaatcgcccagcgtctcggtttctccgaaccttcggctttcacccgtgcctttcgtcagtggaccggcgacagcccacgcgcctatcgggaagcagcgcgggcctga

SEQ ID NO: 352222 - DNA, 1188 bp, Pseudomonas aeruginosa
atgcaactacgagaggtggtgatcaccggcgctttgcgcacggcgatcggggatttcggcggcagcctcaaagacgccaggccgagtgagctggcaacccaactggttgccgaatcggtcaagcgctacggcgtggccccggcgagcgtggggcactgcgtgttcggtaacgtactgccgaccgagtcgcgcgatctgtatctctcgcgggtggctgcgctggaagggggcctgaccgagcgctgcgtcgccatgtcggtgaaccggctctgtggtagcggcctgcaagcggtcatcagtgcggcgcagcagcttcaactcggcctttgccaagcggcgatcgcgggcggcgccgagtccatgagccgcgcgccctacctgctgcccgcggcccgctttggccagcggatgggagacggccagacactcgacctgatggttggcgcgctgacctgtccgatcaaccgttatcacatgggaatcacggcggaaaacgtcgccgagcgctacggcatcagccgtgcgcagcaggacgctctcgccctggaaagccaccgccgggcggcccgcgccatcgccgaggggcgcttcgccgggcagatcgtccccgtggagctgaaaacccgcaaaggcacgcggtcgttcgacaccgatgagcacgtgcgccacgactgcacgccggaagagctggcggctctgcgcccggcgttcaagcgcgagggcggcaccgttaccgcgggcaacgcgtctggcctgaacgacgccgccgcggcgctgttgctgatggaccgcgattacgccgaggccaacggccaccaggtcatggcgcggctggtggactaccaggtgtccggcgtggcacccgagatcatgggcatcggcccggtgccggcggtgcgcgagctgctggcgcgcaacgggctggagatcggggatatcgatttcttcgagctcaacgaggcgttcgcggcacaggcgctggcggtggtgcagcagctcgacctgccgctggaaaaggtcaaccccaacggcagcggcatctcccttggccaccccatcggcgccaccggggcgatcctgatggtcaaggccgtgcacgagctgcaccgcagcggcggccgcttcgccgtggtcagcctgtgcatcggtggcggccagggcatcgccgcattgctggagtgcctctga

SEQ ID NO: 352223 - DNA, 2106 bp, Pseudomonas aeruginosa
atgactctttatcaagggcaggcgctgcgcctggaaatgcttggcgacggcttcgccgagctggtgctggatgtcgacggctcgtcggttaacaaactggaccgcgccaccctggcggatctgcgcgcggcgctggaggtgctcgagcacaccgcgttgcgcgggctgctggtgcgtagcgccaagccggcgttcgtggtcggtgcggacgtcagcgaattccccgcgctgttcgaggccggggagggcgcgctgcacgcctggatcgagcaggcgctggacagcctcgggcgcctggaatcgctgccctacccaagcgttgccgcgatcaacgggttcgcccttggtggcggcctggagctggcgctggccaccgactaccgggtgctggccgaggatgcgcaggtcggcctgccggaagtcaccctgggcatttgccccggcttcggcggcacggtgcggctgtcgcgccttgtcggcgtggccgatgcgctggactggctgctcgagggcaagccgcggaaggccggggcggcgttgacggccggtgtcgccgaacgtgtgatgcccccggaaaccttgcgccaagaggcgctggcgctgctcggtgaggttgccgagggcggcgactggcaggcctggcgcgcacgcaagcgtcagccggtggctgtgccggacggcatcgccgcccgtggcgatacgctcgacccgcgctacccggcgccgcaggcgattctcgccgcggtgcagacccacgccgggctgcagttcgccgaggcgctgcgagtcgagcgcgagaccttcgtggccctggcgcgtgggcccgaggcggcctcgctggtcgggctgttcctcgccgatcaggcggtgcgcaagcaggcccgtcggcatgccgaaggtgccgcgccggtgcgccgcgccgcagtgctcggcgctggcatcatgggcggcggcattgcctaccaggcggcggccagcggcacgccgatcctgatgaaggacatccgtgccgaggcgctggagctgggcatgcgcaccgccaccgcccagctcgaccggcaggtcgccaagggcaagctgagcgaggcacagaaggcggcgatcctcgagcggatcaccccgacgatggactggcagggcttcgccgaggtcgatctgctggttgaagcggtggtcgagcgggccgacgtcaaggccgcggtgctcggcgaagccgaggggctggtggccgacgccgcggtgctggcctccaacacctcgaccatttccatcgaccggctggccgaagggctgcgccaccccgagcgcttctgcggcatgcacttcttcaacccggtaccgatgatgccgctggtggaggtcatccgcggtcgccacaccgacgacgcgacgctgtcgcgcaccgtggccttcgccctggcgctgggcaagacgcccatcgtggtcggcgactgcccgggctttctggtcaatcgggtgctgtttccctacttcaacggcttcaaccggctgctgcaggacggtgtcgattttgagcgtatcgaccgggtcatggaagccttcggctggcccatgggcccggcctatctcgccgacgtgatcggcctggacaccatggtgcatgccgaccgggtgctgcaggagggctaccccgggcgcatggggcatgacggcgagccggtgatggagcagttgctcgcggccggctgcctgggccagaagaacggccgcggtttctacctctacggcaccgatgagcagggccggcgccagcgcgagccgtcggccgaggcgcgggcgctgctgggtacgccgggcgccgaggtgagcgaccaggacatcgtcgaccggctgatgatcccgctgtgcctggaaaccgtgcgctgcctcgaagacggcatcgtcgccagtgccgccgaagcggatatgggcctggtgctcggcctcggcttcccgcgctttcgcggtggcgcgctgcgctacatccagaaccaggggctcgccgagttcgccgcccgcgccaggcgccatgcacaccacggcgggctgtaccaactcaccgacgagttccgcgcgcggctgcacagcggccagcgctaccactaa

SEQ ID NO: 352224 - DNA, 1779 bp, Pseudomonas aeruginosa
  misc_feature (276)..(276): n is a, c, g, or t
atggccgattacgtccatccgtaccgcgacaccgagttcgtgctcaatgaagtactgggcttcgagcgcctatgcgccgagcttggcctgggcgatatcaacagcgagctggcggcggcagtgctggccgaggcgggaaaactgggcgccgaagtgctggcgccgctgaacgcgatcggcgaccgggaaggcgtccggctgaccgagcacggcgtcaaggaggcgcccggtttcgccgacgcctatcggttgttcagcgaagggggctggtgttcncttaccgcgcccgaggcgtttggcgggcaggcgctaccgagtgtgctggggaccgcggtcagtgaggtctggcacgcggcgaacatggcgttcgcgctttgcccgctgctgacccagggcgccatcgaggcactggcgcatcatgcgtcggcaccgttgcaggcacgctatctgcccaggctggtcagcggcgagtggaccggcacgatgaatctcaccgagccggatgccggctccgatctggcggctgtcaaggcgcgcgcggttcccgaaggcgagcactaccgcatcaccgggcagaagatcttcatcagctggggcgaccaccagatgacatccaacgtgattcatctggtgcttgctcgcctgccggatgcgcctgctggcgtaaagggtatctcgctgtttctggtgcccaagttcctgccgaacgccgcaggcgaagccgccgagccgaacgatgtgcgctgcgtgtcgctggagcacaagctcgggatccacggcagcccgacctgcaccatgagctttggcgagcagggcggggcgatcggctacctggtcggcgagccgcacgccgggctggcctgcatgttcacgatgatgaaccacgcgcgtcaggccgtggggctgcagggcctggcgatttccgaacgcgcctggcaggaggcccgcagctatgcccgcgagcgcttgcagggcacccagcgcgacggcagccgctacccgatcatccgcttccccgatgtgcgccgcatgctgatgcagatgaaggcctcgaccgaggccatgcgcgccctggcgctgctcgcggcgtccgaactggaccgcgcccgccatgcgcccgacccggccagccaccgtgcccgccagggccgcgtggatctctacacgccgatcatcaagggatggctgaccgagctggcgcaggaggtgacctcgctggccgtgcaggttcatggcggcatgggctatgtcgaggagaccggtgttgcgcggcatttccgtgatgcgcgcatcctgccgatctacgagggcaccaacggcatccaggcgatggacctggtagggcgcaagaccctcgccaacgaaggagcgttgctggccgagctgctcgatgacatcgacacgaccctcggccacctgcgccaggatgcgcgctgcagcaggctggcggcgccgctggccgaggcgctggcagctgcacggcgagcgcgccagtacctgctggaaggtgctgcaagcgatcccgcgctgcccggcagcgtcgccttcaacctgatgatgctgttgggttacctgtgcgggggctgggccatggcgcgctcggcgctggccgcgtccgccgcgctggccgcagggcgcggcgatcccgcctttctcgaggccaagctggtcaccgcgggcttctacaccgaccacctgctgcctcgcaccggcgccctgcttgccagcgtgctcgccggtagccacagcaccatggcgctcgtcgaagagcttttctga

SEQ ID NO: 352225 - DNA, 999 bp, Pseudomonas aeruginosa
atgcggcggcggctgtcgacaccgatgaatgatcgtcaatggggagtgccgaccgcgcttgggtcgcgcattcccctcgcgtcgctgatccagactctcgccgtcgccgaatatttgaacttccgccacgcggcgaacgcgctaggcgtggcgcaatccagcgtgagcgcgcgcgtcaaggcgctggaagaagaccttggcatcctcctgttcgagcgccatgcacgcggcgtcaggttgaccgaggccggacgccacttcgtcgcacggatagcggccggcgtcgatcagctcgatcatgcggtgaaaaccgcaggcatggcagcgacgggggagtgcggtcgcttgcgtatcggcatccatgccctcctccccggcagcttcctcgccgatctaatccgtcagtatagggaagaccatcccggcatcgaggtcgaaatcaccgaaagcacagcccgcgatgcggtaatacagcttcgcgccgaccggctggacgtggcgttcatcgccggcaagcccgagctgcccgactgccatacccgcccgatctggactgaaccgctggtggcggtgctgccggttgggcatcgcctcagcgggcagtcggcaatcgcttgggccgatctggtcggcgagacctttcttgtccgacatggcggcactggcccgcaggtccacgaccatattgtgctgcgccttgccgggcgctggcctgcgccgtcgatcctgcgtttcgacgtggggcgcggcaccctgttgtctatggtcggacagggtttcggcataaccatcgtcggggaggcgacggcgctgctgccgacaaccggcatcgtcttcctgcccttcgccgacgaggcagagccggttgcttttaccgccgtctggtcgccgttcaaccgcagcgccgcgctgcaaaacctgctcgacctcgcaggcaaaatgaacaatgacagcgattcgcccaatcggttgcgcggtggcactcggacggcacgataa

SEQ ID NO: 352226 - DNA, 1461 bp, Pseudomonas aeruginosa
atgagttccgacgcctgcaccgcagaaacgctttctcccacatcgaccgaaacgacccgccgcccgccgtggctcggcctgtccgtcctgctgctggccgggttcgtgacgatcttcgacctgtttgtggtcaatgtcgcgatcccctccatgcaggccgaactcggggcgagcctgtcgcagatcggattcatcgtcgcgggttacgaactggccttcggcgtgctgcttgtcacaggcgggcggctcggcgacctctatggacggcggcggctgttcatccttggcatggcgggcttcaccttcgcgtcgtttctatgcggcatcgcgccgaccgtggacgtgctgatcggcgcgcgcgtgttgcaagggctggcggcggcgctgcttttcccgcaggtctatgcctcgatccgggtgaatttctccggcgaggacagtcgtcgggcgttcgggtttctcggcatgacgctggggcttgccgccatcgccgggcaaattctcggcggatttctggtcgaggcaaatatcctcgatctcggctggcgcacaatcttcctcatcaacgtgcccatcggcatcttcgcaattgccatggcgcggttcattcccgagacgatttcgcccgagcgtcccccgctcgactggccgggcgtagcccttgtcagtgtcggtctgaccctgctgcttgtgccgctggtcgaggccccgacccatggctggcaggtctggagcttcctttcgctcgctggagccaccatcctcctcgttgccttctaccgccatcaggagcgtcttcgcagaagcggccatcttccccttgtggacatggtgctgatgcgccagccgcgctttgcgcaaggcgggctgttggtgctgctgatctattcgacagcctcatctttcttcctctgcttcgcgcttcttgtgcagacaggattcgggttgagtccattcgaggccggcagcgtgttcgtgccatgctccatcgccttcgtgatcctctccttgagcgcgccgcgcattgtcgcgcgcttcggcacgcctgccatcgccatgagtgcgttgatttacgcaatctcgttcggcgtgctgatcggacaagtctggatcgccgggtccgacctggtggtggttcatctcattccggcgctgatcgtcatcggcggggcgcaggcgatgattatgacgccgctgctcaaccttgtgctcggcttcgtagaggaacggcaggccggcatggcctcgggcgtcatctcgacgctccagcaggtcggcgcggcgctcggcgtggcggcagtcggcatccttttcggcgctgcgctcggggtgggatcggagggacaggccgggcgctacgccgccgcgttcgtatccggcatgagctacaatgttgctgccgccgtcatcgccgcaattctgctggtgcgactggcagcctatggacgcaagacgaactga

SEQ ID NO: 352227 - DNA, 786 bp, Pseudomonas aeruginosa
atgcgcacccttgaaagaacccgcaccgagcttgctgacttcctgcgcacccgccgcgagcggctgttgccggaagatgtcggcctgccggccgcgaagcgtcggcgcacgccggggctgcggcgcgaggaggtcgcggcgctcgccggtgtcgggctgacttggtatacatggcttgagcaaggccgggaaatcggggtttccgctgatttcctcgacaatctcgcccgcgtcctcaagctcgatgcggccgaacgccggcatctgttcatgctggcccatgagcgtccgccggccgaaccgggcaagacgttctgcatcgtgccctcgttggccgcccggctggtggaagacctttccccccacgccgcctatatcatcaacctgcgctgggacgtgctggcgtctaacgggccagccaaccgcctgttcgggtttggcagacatgaacccggccgccgcaatctgctttgggcgctgttcaccgattccgaattgcgggaagcgtttgtgaattgggaggaacaagcccctgccatgctcgccagcttccgccgcgacttcgccgccgcgcgcgaggatgccgacgccaaggggttggtcgctgaactggaagccgtctcgcccgagttcaaggagtggtggcgcaatcaggatgttcatgccccttgcaccggcacgcgcacgatccacgtggaaggaaggcccgtcgatttcgagcatacttcgctcactatcgacggcgggcagcatctgcgccttgttgtctatgcgcgcgaccgatga

SEQ ID NO: 352228 - DNA, 2055 bp, Pseudomonas aeruginosa
atgagcgccgacgacgaaaaccgcttccgaccgaagcccggccgcatccgatccgacacgccgaaggcgggcaagacaaagagctttttcacgcaggtcaagaagatcacccggcagcatcaggcagcggccgcccgcgatccttccatgccgtcatccgcccgcccgtcatcgccggggcgatcccgcgctgtagtcgccagcggcaagggcgtgaagcgcggccggggcgcgagctttgtgcgcgcccggaacatctccggccaatggcatcatggccagcccggcagccgccgtgtgatcgtcaaacagcgcagtgtccgggccgcgtggaagggcggccgcgcccgcgcgcatctgcgctatgtccagcgcgacggcacgtcacgcgatagcgagcgcggccagctctattcggcgaccgaggaccgcgccgatggcgacgccttccttgatcgcggcaaggacgaccgacaccaattcaggttcatcgtctcgcccgaggacggcgcggagctgtcggacctcacggcctacacccgcgatttcatgaagcaggtggaagccgacctcggcacgaaactcgattgggttgcggtgaaccactacaacaccggccatccccatgtgcatatcatcgtcaacggccgcgacgacacgggcggggatctagtcatcaacggcgactatctttccgccggcctgcgcgagcgcgccagcgagcttgccagtctcgaactcggccccgtcaccgagatcgagcagacccgcaagctgtccgccgaaatcgaccaagaccgtttcacccggatcgaccgcgccatgaccgaggaagccgatgcccgtttcctcgacctgcgccatgaaccggcagaaccgaggcggcagttcgagcggacgctgcgcctgcgccgtcttaccaagctggagaagatggggctggcgaccgagcacgcgcccggcgtttgggaattgagcaaggacatggagccagccatgcgcaagttgggcgagcgcggcgacattatccgcaccatgcagaaagcgctcggcccgcagggcggcgaacgcgatccgatgagctttcaaatccatgacggtgcgcccgagacacccatcgtcggccgcgtcatggacaagcatctgtccgacgagttgggcgagaacctgacaatcgtggtggacgggatcgacggcaggacgcaccacatcgccggcatcgcgcccgagcggcaggaggacgcccgcattggcagcgtcgtccagatcggcccggccgaggtgacagcccggccgtccgaccacaccatcaccgccatcgccgagaacggcatctatcgcccgagccgccatctggagcaggcgaagttcgagggccgcgttcccggtggtgactatcagggctatgtcgatgcccatgtccggcggctggaggcgctgcgccgagccgggatcgtcgagcggatcgccgccgaccaatggcgcatccccgatgatctggtcagccgtgcggccgaatacgacgccggccgcgaccggcaggccagcgttcgagtcctgtcccccgtcgatctggacaggcagatcggatcggacggcgcgacttggctcgaccggcggctgatccatggcgagacggccgaccttgcgccgaccggcttcgggcaacaggtccgcgaggcgatggaccagcgcagtgagcaccatatcgaacagggcgacgccacccgcagtcggaacagccgcatcttctaccgtcgcaaccttctcgccaccctgcgcaaaagggaggttgcccgcgtcggcgcggagatggcggagagcaaggggctgccgttccgcgccgccacggacggcgagagcgtcagcggcaagttcaccggaacggtgcagctatcgagtggcaagttcgccgttgtcgaaaaatcccatgagttcacccttgtcccgtggcggccggtcatcgaccgccagctcggccgcgaggtcatgggcgtcgtgcagggcggatcggcgtcgtggcagttagggcggcagaggggaatagggctatga

SEQ ID NO: 352229 - DNA, 933 bp, Pseudomonas aeruginosa
atgacggccgcgcgcgcccggcctgccatccggtcaaagatcggcatccctttgttcgcggaaaagccgtctcatcccttcgtcccgctcggcgaccagacggccggcgcgcgcagcgaaggtcaggggcggccatcggccggcgcttgcgccttgcccttgaccgcagcgagcacgctggcaggctggcggcgaagcggagacaggccggcatggcattatgccgtcctgctgctggcgggggcgctttccgtctgcatcggatcgggcgtcgctgtcgcgcaatccatgccggtcgagcgcccggccgaagcccatccctttgcggcgcacatcgccgaggcgtcgcagcgtttcggcatccccgagcactggattcgcgcggtgctgcgcgccgagagcgcgggcgatgtgcgcgccatttcctcggccggggcgatgggattgatgcaggtgatgcccgacacatgggcgggcctgcgcgtccgctacggcctcggccgcgatccctacgacccgcgcgacaatatcatggcgggtgcagcctatctgcgcgagatgtgggaccgatacggcaatgtcgcggcgatgctggcggcctacaatgccggtcccggccgctatgacgaataccttgcgaccggccgcccgcttcccgccgagacacgcgcctatgtcgccgcgctcgccccgatcctcggcggcgcgactccatcggatacgccgttgcaaacaccggcaccgccgcccgattggcgcgaggcaccgctattcgtcatgcgcccggacgacacccgggctgccgccgcgccgccgtccgaagcacgatccggcgacggccgcgctgccgttccgacgcgcgaccccgcccgcgtggagccacaagacggcagcattttcgtggcgagcgccagcgacggaggaacaccatga

SEQ ID NO: 352230 - DNA, 336 bp, Pseudomonas aeruginosa
atggcagaaataggcaccttcacccgcaccgaaaccggctatgcgggagagcttcattcgttcggcctccacgaaaggctgttcatcgtcccggccaagccgagcgacgtgaagaacgctcccgactatcgcgtgcgcctcgatagcgaggacggccccgacgccggcccggcatggaaggacgccagcgaaaatgccggcgacttcgtgtcgatgcggctggagggacccatcttcccgttcccgatccgcgccaagctgttccagtccaacgatgatcgttcggtctggacgctgcgttggaagcaccctcggaaagtcgaggatgaggaatga

SEQ ID NO: 352231 - DNA, 546 bp, Pseudomonas aeruginosa
atgacgcgccgccgcacccttacggtgacggcgctggcggtcatcggcatcgccgctgcaagcgcggtcgagacgccattgaggctcatctggaacgccaccgccagcgcgccggtcgggttctacaccgtcgagccggccgagcggatcgaggtgcccgagctggtcgccatcacgccacccgaaccactcgccggcttcatggtcgagcgcggctatatcgcgcgaggcgtcccgctgttgaagcgcgtcgtcggcctaccggggcagcaggtttgccgcgccggccgcacgatcacggtggacgggatcgagatgggcgaggcgctggagcgcgacagcctcggccgcgatctgcccgtctggcagggctgccgcgtcatcggcgacggccagcttttcctcatgaattgggaagtccgcgacagcctcgacggccggtatttcggacccatccccgcagcttccgtcatcggccgagcggtcccgctctggaccgatgaggaaggcgtcggccgctacgagtggcgcgcgccgacgcactga

SEQ ID NO: 352232 - DNA, 519 bp, Pseudomonas aeruginosa
atgacccgtcgcgcccaccgcagcgcgcacggccgtccgctgccggacgggcctgcgcgcttcacaacattggtcgagttgaccttcgagaaacgcaaggtcgagcactggatacgcttcggccgcaagagttacgagcagatcatcgaccgccgccgcagcgtcgtcggcttcgcgccgggcagtgtctttgccttcatgcgatgggcgagcggcgaccatggcactgtcgtttcccgcatcgacatcgtgcgggcaatcggtcgcggcgagccgttccagacattgcccttcgtccgccccggtggcgaaatcctgttgcgcctcgatagctggcccaaggtgcaacgcgcgcttgccgccatcgacgccgtggatgcgctcggcctcgatccggccgacgccgcgccggagcattggcggcacgtccacaaccgtttgaccgccaatctggagccgcacgcctacacccccgagcgacatgccgcttggcttcatcgccgaaggatcgacccatga

SEQ ID NO: 352233 - DNA, 270 bp, Pseudomonas aeruginosa
atggccaacccgcttgcgggcctaccgccgcgcctgttgcgcaccaaggaagccgcgcgcttcctcggcatatccatccgaacccttgagaagcatcgcacctatggcaccgggccaacctatcgcaaggtcggcgggcgcgtcctctacaccgtccgcgatctggaagactggagcgcggcgggcgagcgcaaatccacccgcgacaagaccgctggcaccgtctttcctgcgcgtccgcttacgcccgaagaacggggcgactgctag

SEQ ID NO: 352234 - DNA, 288 bp, Pseudomonas aeruginosa
atgcgggtgcctgtcgaactcgatcccgatgtggatgacgaagcgcctgccggcgacaccatcaccgactatgacgagcggcatttcgtgacctacctgcgcttgctggacgcgaaggccgagggcgcagactggaaggaagtcgcgcggatcgtgctgcaccgcgatccggctgccgaggaacttcggacctatcgttgctggctaagccatctcgaccgcgcgcaatggctgtcgcgtgagggttatcgaaagattctggaacaggcggccgccaacaaggcgtga

SEQ ID NO: 352235 - DNA, 525 bp, Pseudomonas aeruginosa
gtgaggttgtcgcccgtcgatcacaagcacgacgacaccgaaccaatattgacactggcgcatctcgacggccttgacctgcgccgcgcccccgatggctggcacggcatctggcaggtggatggcgtcgcgcaccaattctggctgcccgaggccgtgcccgatgccgccgcattctacgccgtcacgttgccgatggattcgtttctggaactgcgtgctcacgcagcccgccgattttggcggtccctcaacggtcgcgcgcccggtcctgatttccgagccgtgcctgcccaactccggcaatggcatatcttgaccctgcgcgcgcttgacgcgcggttgcgcggcgaaagctatcgcaccatcgctgaagtcctgctcggctttcgcggcacgaaggaggatttcgagagcgatccgcgcaagaacaaagcccgccgcctggtcgcgcacggcatcaagatgatgcgcgggggctatcgcctgctgctccattatccgatcaagcccagcaggcgttga

SEQ ID NO: 352236 - DNA, 216 bp, Pseudomonas aeruginosa
atgctcagcatcgattggcgatctccggcggcatacgggcacacaaagcacatcccggccgctggtttcgcttgggaatatttgcgccgcaacgacgaatatcgtcaggactgccagaccattgcattgaccggagggacggccacccgcgactttgaagctttcgcgcatcgctggggtttgcgatttcccgtgcgatcccgacgcgccgcatga

SEQ ID NO: 352237 - DNA, 528 bp, Pseudomonas aeruginosa
atgaccaacgtatccgacagcagcccccgcatctatgtcgcctgccttgccgcctacaacaacggctatctgcatggggcttggatcgacgcggatcaggacgcggaccaaatcagggacgagattgccgccatgctcgcacggtcccccatcgagcacgcggaggaatatgccatccatgattatgagggcttcgagggcgttacgatcagcgaatatgccggaatcgacagcgtagcacgcatgggcgctttcatcgcagagcatggcgcactcggcgcgggcctgctggaacatttcagcggcgacatagaccaagccgaatctaccttggaggaccgctatcatggtcagttcgccagccttgccgactatatggaggggttgaccaccgaaagcgtcacgatccccgaggcgctgcgctattatgtcgattgggaggggatggcgcgcgacgccgagatgggcggcgacctgttcaccatcgaaacggcgcacggcgaagtgcatgtgttttccagcacgtga

SEQ ID NO: 352238 - DNA, 867 bp, Pseudomonas aeruginosa
atgaagcacgacgattaccctgcgctgtttctagacgcagacaacgcttccaatatgtatcaaggaaattttctgtggctcatccgtggcgaatacgttgcattgtttcttgcagcgatattttctatgagcttcatgaatcatattatctactacgtgctttacgcgggggtttttgttgttggattagtcatccttatagcccgcgcacacagtaaaccggagcagtggtggtataggtgtcgcgctctagccgaaagcgtcaaaacattgacatggcggtatatgatgcacgccgcaccgttcgagggagaggatgcacaagcaagggcgcagtttcgagaccagttgaacacaatttttcgcgaaaacatagaaaccgcgaagcgcatcacggacgattggtctggaaatgaccaaatcacccgggctatggacaccgtgcgagtaaaaacccgcgaagacagaatggcgtattatatagagcaccgtgtcgaggatcagcggagttggtataggcgaaaatctaaggctaatcgcaatgctgcccggatgtgggtatgggtgagtggcgcctgttacgtcatcgcgggttcgatggccctgagtcgtatcgctttgccaagttggcagtattggccaatagagccgctcattgtcgtcgcagcttcaatcgtaggctggatgcaaattaaaaaatttaatgagttatccgccgcttacacagtaacagcacatgaaatcggcttgattaaagcactaacagacgacatgaaatctgatgggcagttctcagaatttgtgaatgatgcggaaaaagcattttcaagagaacataccttgtggcttgcaaggcaatcggactga

SEQ ID NO: 352239 - DNA, 303 bp, Pseudomonas aeruginosa
atgacttccaagctgaatatcagctccggttcatccggcgggcagcaagtcacccagcacccgacgcgccgcctcgaccaaaccgctgtctctatgtggatgatcctcgggcaaagcaatcaaacgttggaaatactggcggttaaatacaatcgacttcgtatatatatcgatagcctttcctttccgctctgtggaaaccagcatttccatcccctcggtcagctcaccctcaaggctgtccttacgaaaccggtgcttcacaaagcacatattgagatcgaaatactcctttctccctga

SEQ ID NO: 352240 - DNA, 1365 bp, Pseudomonas aeruginosa
atgagtatgaaattcaagaaatccctgctgtgcagcgccttgttggcactgttcagtactggcggcgcccaggcggcaacctcggcggatctggccaggttaggcaacgatctgacaccgttcggagcagaaaaagccggtaatgccagcggcagcattccggcctggaacggcggactcacccaggcgccggcgggctggaaacctggccacggcgacccttacggcgccgacaagccgctgtactccatcaatggcaagaacctcgcgcagtatcaggcacagttgccccccggtcaggtggagctgatcaaggcctatccgggctaccgcctggacgtctacccgacgcaccgtagctgttccttcccgacggagattgcccaacgcaccaaagcgttcgctgcgcagagcaagatcggcagcgacggctggaacctggagcaagcggccggcgctgcgattccgttcccagtgccgcagagtggcatcgaggtgatgtggaactacaagctgcgctacatggccaagggacgtcgcgcccaggtgtcaatgctgcttcgcgagaagagcggtgaactgtccgagctcaagcagtgggccagcgagtattacccctacaacgatgcggcggtgaaaagcccggtcgatgccggcgactacgaagccaagatgctttacgacgtgctgacaccgccatcgcgggcaggcgagatgtatctggtccacggctacctcgacaagccgcaggactcctggatctacttccccggccaacgccgcgtacgccgtgccccgtccttcgcttacgacaacccgattgccggcaccgacagcctgtacttcgtcgaccagatcaacatgtttaccggggcgatggaccgttatgacttcaagctgatcggcaagaaggaaatgatggtgccttacaactcctacaagttgatcgacaagagcaacaagtacgagaacctgatgggccaggactacctcaatcgcgatgctcaacgttatgagcagcaccgggtctgggtggtggaagccacagtgaaggccgataagcgtcactcatttgcgaagcgcgtgttcttcgtcgacgaagacagctgggcgctgttgcacgtggacatgtacgacgccaagggcaatctctggcgcgtgcaggaagggagcctctgggccaacccgcagacccagtcctgcaccggcttcgagtacgtgagctacgacctcgtcgcacggcgctacatcgctgatggtttcacccaggagggcgaggtgctcgacctgaccgcgggccttgaaggccgggtcagcgacaaactgttcaactccaacgaactgcgccgcagcggcgaacgttaa

SEQ ID NO: 352241 - DNA, 2613 bp, Pseudomonas aeruginosa
atggacaaagaacatttcgacgttgccaaagcgatcgcgataactatgggcaggaaccttgagccatgtggtcaaggtgcgcgggctttcgagctgagagacgagctctgggtctttgtcgatgatccaaccatctcgacgcctgaattattgaacgaagcgacaggaatcaaccagaagcttccaagggctggcctcagggcagttcactacgtgcttccccattgggcaccgagcggtaaggagtggataaccttggggctcggccttaccgcagaaaccgtgcgcatggcgttgcgaaggcttctggacctgccctcaacgttcgatgcttcgcagcagcttctgatcaacgaaacgctcgagcccattagagcgcttggtatcgacccggtgcgtatgacgctgatcgatcaacttgccgaacgggaactcgatgccgtggcggagctgacgcgtcgtgttcgctgtggtgctggcttgactttcatcgaagccgaggcaggaaaaggcaaaagtgtcttgctcgcctctgcggcagaaaacctacgcaatgacaaacggggaaaactaccggtcttcattccgctgaggaaattgcccctttccgaaggtattgcctgggacagcatcgcccagctcattggcatcgtcggtcagggtgctgacctattggtccaggctgtcaaatcagggttagtcacggtctttcttgacggcattgacgaggtctccggtcgatatgacaagaacctagtccatgacctccttgacctgatcacattgcgcctgggatcggcaggctcgacagtcatactctcgggccgccgtaccgaggcccggcacctcgacaacagtgactggacaatcctcaacgtcgatctacctgacgtaaacagtgacgacttcagggcctacgtagccgcggtatttgacggtgtcgtcgagcgcagcaggactgcaatcaaggttgagttaccgccagagtacgaggaattgatcggcaataggccggccgatgatttagttgttcgggaaaagaagagcatcgtcgcctggatcttggaagtcttccctgaggtggcgaaggagccttcgctgttcttcgtccaaggcctcgcagcgatcgccattggccgtcgatcaggcaaccacgcgccacttcaccaagaaagtagagccttcattcccagagtacgagacgtctgtctcagcgctgcagtgtttgcctgtatcagggaagcatcaaagatcgacgccatcgcagcgcagaaatactcagtcaagaaccagatgcgggcattgcaggggttagcagcactcgcgtcagcgccccccggtacgcaggtacccacgcccaacgagctggtgccccaggcatttgatgtcgatccaatcaatgcgtctgaggtgcatgtcgcaatcacacgtcagaacgcaaaacatgcgcttctatacgccacggaagctgcgggagcctatcggcccctattcctgagcgactggattcgctgcacccttctcacacagatattcacgactaacacagcaatggctcatttgagccgcgaccaaacccttcaactagccgcttcggcagagcgcgcgaagttcgcctttgagacattgctgccgtctgcgctcaacgacaacgccgtagacgaccactggcgtcaagcgtttgaccgcgcgattgctgtcggaactgaatcagccagtgccaatttatggttcctccgggcatccgttggcgatgaagcgctggtggcaccggtgcactcgcctctgcccctagcagaaattaccgatatcgagttcaccggtttcgagattggaagcgagcttagcggggaagacttccttctcgacggaaaccgcgtagtcaattcgtccgtgtccaacgtgcgcctgcggggtgtctccctcagcgacgtctcgttcgagaactgcatcttgagcgatgtcgaactggtcgactgcgacggcccaatcacctttgaaggctgcgaactcagcggcttcatcgttaagaacacgcgatccaaaagaaagccagcgctaagatttgtcgattgcaccttcattggcgagaagaacctgttggttcaaaacgtggccgcctatggtgatacggcatatggttccccggccgtattcgaaaactgcgaatgtgaatgcgatgttgcaaagctgatgcaaggcgaatggactgccagggaagaggtgctgaccggcgtcagccgcaagagcgtgcaaaccatgagcaatgcggaagcgtgcttgcgacgtgcgctgcgagccttcttcccatcgcaccttggtgacagcagcgcccttcaagtgcgccggtacatcagactgtctgctttgggcagaggaagcatgcccgccgggtctccgggccaagaagcactaaagcaaattcttgaaagcgtcggcttctcggacggcggccgttcagaccacatgtatgccccatggtcgggcgtcgccggagcgagtcaggcgggtatggaactccgtactgaactgctggatttccttcgcgacgggtccaatcgcagcccccgcgtgcggagtatgctcacaaagatcgaacgcttcttctcctga

SEQ ID NO: 352242 - DNA, 1578 bp, Pseudomonas aeruginosa
atgagtgtgaagtctacgttgactgaagcggcaggcgtccatgagaccgcgagtagcttggctgatagcctaaggcaatatatcgaggctcagtatcatattctcgatgaaggtctcgtcagggagcgacgcgcgcttctccaagcgaatgaaactattgcccaaaccccctatgtagagtcaacgccagtctacaaactgggaactccctacgaggacttgccaataccgcaggctgcctctgacgcattgaccaaattgtcggtaatgggacttggcctttaccctctgccgtatgagcaccaatctcaggcgctcatctcattcctcggcgatgaggctgctgacctggtggtggcaaccggtacgggttcgggtaaaacagaaagctttttgatgccggtcattgggaaactggcagtagaaggcgccgaaagacctgagtctgctgctttgccgggttgtagggcgatgttgctgtaccccatgaacgccttggtgaatgatcaactcgcgcgtatccgtcgaatactcggtaaccctgaggcagcgaaactgcttttgaacagcaggaaaacaccgatccgcttcggcagctataccggtaggacaccatacccggggcagcgctcttccacacgagacgagcagttcatcaagccacttttcgaggagttttataagaaagtggccaagatcccggccatccaaaaagacctggctcgtattggccgctggccgagcaaagatcttgatgctttttacgcggatgatgcggtagagaccaaaacctactcctccgggaagaaaatcggcaaccaattcgtttcaaaaaattggaaggggcggctgctaactcagcctggtgaccgtgagctcatgacacggcacgagatgcaggtacgctgtcctgaactgctagtgacaaactattccatgctcgaatacatgctcatgagaccgattgagcgtgggatcttcgagcagacgagagactggctcaaagaagacatccggaacgagttcatactcgttctggatgaggcgcatatgtataggggggctggaggtgctgaagtcgcgcttctcattcgccgtctatgtgcccgcttggaaattccacgagaacgcatgcgttgcattctcaccagtgcgagtcttggcgccggtgaaactgccgtcgcggacggtgaacgatttgcacgcgacttgaccgggttgctggaaagctcctcccgcaaggttagagttcttcaggggacgaacgagcagcgttcctcggtgcacactgttacccgtgaacagattgatgccttggcgggctttgatctcgacgccttccaagaggcagcaaatgatctcccttctgcccaaaaagccgcggcggcgcttgctggacagcttggttgggaagctccgaatgcaagcgatcactcagcatttcgcgactggctgtttcgaagcctaactgacttcggaccgttagaaaaacttattacattagtgtcaggtaaagcggtcaagctagggacgttgagccaaactctttttgaggggtgtcctctagggaaactctga

SEQ ID NO: 352243 - DNA, 771 bp, Pseudomonas aeruginosa
atgaaaggagcagcaattgccacagcccgccagatattagcagcattgtctgcggggcagatggtccagttctcgggctcgatttctgatttagtggcagatgccgtggcagcagccattggcggtcaaacatttcatgaatggcgtgtaccggtcggattagtatccgatgaggcggcgactgattgtctagaagtggtctcggaaacctctggttgtttgctgatgaagggagcaaaccgttcagcttttgaggtgtacggtaccgcgatccgagatgtcgttacgcgccgccaattctcactgccaagctaccaacgtctctcgttgatagccgcgtggacacagggccctgccacgttccctgatggcggcacgctcgcggagatcggtccggtttttgatacggataatttttctatgcgtggggtatccgccaaattaccggagctcaagtttggccacctggtgcgcaactcttgggatcagattgacggctttgacgatgattcgccgcgggcacttgtctctgagctgaaggaactcatagaagagagctcgtttgtccccggcaatctttggacaaggatggccgaccgtgcttactcacgtctgcggactatccccggcgggtcatcagaagaggatctgcactccgtgttgacgttgtgggctctcccgtgggcgaaggcaacggccggccccgttgaggatatcgctcgtatcgcgggccggatgttggccgaattgcaagccgaggcagagacctga

SEQ ID NO: 352244 - DNA, 759 bp, Pseudomonas aeruginosa
atgaagctgattcagtgccgtttctcttcaggtcagcgtgtaccgctgctcgtgcaagctggtaacgcagcgccgttgcccaaactcattccgttcatttacgtccaactcaagctcagacaccgcgcatatagcactgctgcggctcatctacgcgcgattcaggctttctacagctatgccgaaagtcgaaatctagatatcgatgaggccatcgtggcctgcgacttcgaggcgattctggcgctactggacggttacgccatctggctccagagtggccgccaggccgataatctggtcgcccgaatcggcacagctgcaatggcatcttttccacagatcgattcgcgcacgcgtgaccagtacctgcggttgctgaagcagttactcgcaccaaagccaggagagcccgaatcaaaaactaaccaagtggatcagtcatggtaccctttgccttgccgatcaacacccgattctcttgcagtaccaacgaaaattcatggcgaccggaacgagaaacttctcttgagtacagattccagtattcagtcgaagtttcagcttctatgtgatagtttactgaggaaatgttgtatttttgctttagtttccttagcccactccgaagcctgccatactccagccctttgcttttttcctggctctttgctccaaaataatggattaggccatgttcaagcagcatcccttcatctttcttttgcacctcatcaatcattgaattgccaagcatga

SEQ ID NO: 352245 - DNA, 1440 bp, Pseudomonas aeruginosa
atgggggcattgtcgtttatgggctacatccagggcgaaggtcgtcagcaaagcagcctgtttcctcccacattggaggagctggtgccggaggatcacttggtacgggtgatcgaggcctatgtcgctcgcctggatctgcaggctctgggtttcagcaaggccgaaccactcaagactggacgtcctggctatgatccagcggatctactcaagctttatctgtacggttacttccagcgcatccgctcctcccggcgtctggaagctgagtgccaacgcaatgtcgaggtgatgtggctgctgggccgattggcaccggatttcaagaccattgctgattttcgcaaggacaacagcgctgcttttcaggcgacctgccgcaccttcgtccagttctgtcgccaggtggggctgatcagcgggcaactcgtggccatcgatggcagcaagtttcaggcggtggcgtcgcaacgcaagcatctgagcctgacgaagctcaagcgccaacaagccaaactggaggcgcagataggccgttatctggcagaactggacgaggctgaccgcagtgaggcaactgaaggggttgatcgccgtgcggtcaaggcagcgctgcagcacctggagagccgacatgccgataacctgacagcccaggcgttgatggaggtacagaggctggatcagttcgtcgtgggcgaggacgaggcccgcatgatgcgtacccaccagggggctcgcgtggcttataacgtgcaaagcgcagtagatggcgagcatgggctgatcgtgcatcatgccgtcactcagaacggcagcgataaccagcaactggaaccgatggccaaggccgcccaggcgatcctagaacaggaagcgctgacggttacagccgatgccggctactccaatggtgagcagtttcaagcctgtgatgatgctgggattacggcctatgtgccggagaatcgaggtatcaataacaagggcgacgacacgccgctattcgatcgcagcgccttcacttatgacgccacccacgaccagtaccaatgcccggcaggcaaatggctactgttcaagcaggtcagtggcctacagcgcatctatgccgtgcaggatgactgcgcgggctgtccattgaaaacacgctgcaccaaggctaaacgtcgacacgtgagtcggcatgtccatgaatccgcgttcgaacgcatgcatcagcggatgcaggcgcatccagagatgatggtcaggcgccgatccatcgtcgaacatcccttcggcaatctgaagcagtggattttgggtaatggtcgcttcctgctccgacaactgcggggagcgcggacggaaatggccctggcggtcaacgcctacaaccttaaacgagctatcaatgtgctgggtgcccgtcggttgatcgagctgttggggtaa

SEQ ID NO: 352246 - DNA, 435 bp, Pseudomonas aeruginosa
atgtctgtcctaattcttaactgcgagcgcgacgaagtcggcggtcaatacctagtagcaagcattcacggtgtggaacactacgtatcacttgatgatgactatccggagcaaatcccagattcagatgatatagtccaccgcattaatgcagatgacttcaatgagctttcagagcaggtacgctcctacgtgcgcaagcacagcatcgcccccattcattcactcgatgatgttaagctgcttgcaatgcggctcggcgatatgaaagcaaagacctacgaaatcgacgaagaaggtcttggcctcacgctccgtgactgtaacgtagataaaggtgtacgcatcctagctcgtaaatttcagagtacatatcaggcacatcgctggctgaccgagcaactggatattttaggtttcaatgcgtcacggtaa

SEQ ID NO: 352247 - DNA, 1233 bp, Pseudomonas aeruginosa
atgcccgattccgtcgctgccggcctgcgcctggcgccagaagaactgacccgcccgttcgctcccgagcaattcgccttcgacaccaccgatgacctggagcccttccgcggcgtgctgggccaggagcgtgcggtcgaggcgctgcagttcggtgtggcgatgccgcgtccgggttacaacgtattcgtcatgggcgagccggggaccggacgcttctccttcgtcaaacgctatctgcaagccgagggcaagcgcgtcgccacgccctccgactgggtctacctgaacaatttcgacgagccgcgcgaacctcgggtgatcgagctgccgccgggcagcgcgaccgaattcagcgccgacatcgaccgtctgatcgacaacctgatgtcgaccttcccggcggtcttcgagcatccggcctaccagcagaagaagaacgccgtcgaccgcgctttcaaccagcgctacgaccgcgccctggactcggtggagcggcgcgccctggagaaggacgtggcgctgtaccgcgacagcgccaacgtcgccttcaccccgatgaaggacggcaaggccctcgacgaggccgaattcgcccagttgcccgaagccgagcgcgagcgtttccacaaggatatcgccgccctcgaggagtacctcaacgaggaactggcgagcctgccgcagtggaagcgcgagtcgagcaaccagttgcgcgagctcaacgaggaaaccatcaccctggccctgcagcccctgctggcgcctctggtggagaagtacaacaacaacccgggcgtctgcgcctacctgcaggcgatgcaactgaacctgctgaagaccgtggtcgaccaactggtcgacgacagccgcaccgacgcccagcgcaagcaagggctgatcgagcagtacgcgccgaaccaggccatcgtccaccacgcgaccagcggcgcgccggtggtgttcgagtcgcacccgacctacgacaacctgttcggccgcatcgagtacagctcggaccagggggcgctctacaccagctaccggcagttgcgtccgggggcgctgcaccgggccaacggcggcttcctgatcctggaagcggaaaagatgcttggcgagccgttcgtctgggacgcgctcaagcgtgccctgcagtcgcgccagttgaagatggagtcgccgctggccgaactcggccgcctggctgcggtttccctgacccccaggtga

SEQ ID NO: 352248 - DNA, 180 bp, Pseudomonas aeruginosa
atgaaatcttggcgagggtgggatcgcaatcatggaaggccgcgccatgccagcggccttgtggacgttcgttatgccgacggcaaggttttccctgggcggcgggctgaggactgctactggggcaaggacagcatgatcgagttatggcgcccgaccccgatcaaccagctcaaatga

SEQ ID NO: 352249 - DNA, 216 bp, Pseudomonas aeruginosa
atgaacctctggcgactacgctcgtttcaggtggaaattctcgactttaggttcatctatgccttttttgccccaggcacctacatcgttttagccattgtcgagaaggctatgcacggtgacagcacagacgcgagatttgactatgaactcagccaccctatctcccagcgcatcgaaagcgcttacaggctccttgaggatgagcgttgctaa

SEQ ID NO: 352250 - DNA, 663 bp, Pseudomonas aeruginosa
atgaatacttattttgatattccgcatcggttagtgggaaaggctctgtatgaatcatattatgatcattttggccaaatggatatattgtcagatggaagtttgtacctaatatataggcgggcaacagagcatgtgggtggtagtgatgggcgtgttgttttcagtaaactggaaggtggtatttggagtgcgcctacaatagttgcccaggcgggaggacaggattttcgagatgtagctggtgggacgatgcctagcggaaggatcgtcgcggcctcgacggtttatgaaacaggagaggtgaaggtctatgtatctgatgattcaggtgtgacatgggtacataaattcacattggctagaggtggggcggattataattttgctcatggaaaaagttttcaagtaggggcgcgctatgtgattcctctttacgcggcgacgggagtcaattatgaactgaaatggctagagtcttctgatggcggagaaacgtggggcgaaggaagcacgatctacagcgggaacacaccatacaatgagacttcttaccttcctgtgggagatggcgtaattctggctgtagccagagtaggatctggtgccggaggagcgttacgtcagtttttaagccagagcatggcatccgcaccgggctaa

SEQ ID NO: 352251 - DNA, 1800 bp, Pseudomonas aeruginosa
atgtttacgtgggacaaggacgatctgaatccagagcaagaagctgccattctggagcctggaagtgtttttctcatcgcatgccctggcagcggaaagacccgcacgctgacctacaagatcgcgtatgagttgtccagactgaaatcgaacaagcagttcgttgttgcgattacgtatacgcaccgcgcggccgacgagatccatgagcgcattgagggccttggggtggacacatcccgactatggataggaacgatccactcgttctgccttgaatggatactgaagccctacggtatctatcacgaggcattggaacggggctaccgcgtgatcgatcagcatgagcgtgagaagattttggaggctctgtgcaagccctaccaaaagccaaagataacgttttgggattgcgaattttatttcactgaaactggctatgtgctttcctgtccgcaagcgtggaaacacaccggcctgcacgccatattgggacagtatttcgagaagctgcaggaaagccggcagatcgactttgaactcattctctactatgcgtatcaactgatcgccagccgtcctgcgatcagcgtccttctagggcagttgttctctttcgtgctgatcgacgagtatcaggacaccaagcgaattcagtactcgatcatcacggccatcttgaaagccggccagggtgcgactaaggccttcatcgtcggcgatccgaaccaagcgatttaccagtcgctcggggggtatccgattgctttcgaggatttcaaaacgatggctggcattgacttgaagaagctcgaactgtcgaagaactaccgctcctctgagcgcatcatcgactacttcggaaactacaacgtccacgacacgtgcattgaagccgcatcgtacgacaaggcatatccgagtcttgtttcgttcgatgccacggtgaacaagacgggcctggaagccgagttgatccggctcatccgcttcaacatcgagactgtcggtatcgcgccccacgaggtgtgcgtgcttgcaccacagtggacacaccttgccagcatgacacgccgtttgtgcgcgagcatgcccgagtattcgttcgatggcccgggcatggttccgtttgcacgcgacactgaaaatttttggtacaggctttctaagatcgcactcacgcaggcatcgccgggaatgtatgtgcgcagacttcgttgggccggtgaaatccttgctgacttggaggcggctggcgctagcgtatccaagctcacccgaaaatcgttgttgagagaatgcaatgcgatccaggtcgatgagacggatggactcacctacctcagcacattcttcgagaggttgttttcaagcctggccatcgattttcgactcttgaccacccttagggagcatcacactgcgttcttcgacagttcgcaagcgcggatcaaccggctgaaaagtgagggcagcgaattcatcggagacatcgggactttcagaaaggtttttcagagccggacgggcatcactatctcaacgatccacggcgtgaagggggcagagttcgatgtggtgatcgcctatgccttgctggaggacatggtgccgcacttcaatgatccgaacggccaagaaagtgcaatgaagcttctgtatgtcattgggtcgcgagcgaggaagaacttgcatctgatctcggagcggggtcgtattcgccagtacgctggtgaggagtatcaaatcacccgcaagctcgctgcatgtaattttggttatgaccaggttccatag

SEQ ID NO: 352252 - DNA, 288 bp, Pseudomonas aeruginosa
ttgctagggaagaagatcgatccacaaacagccatcccgtcgtacattctcgatgccatcgccttcgcgcacccggtagtcacaaaagaagtctggttcaatgtgctgagctatcgcgtcaactacatcgatgcggaggatctcgtcactgcatcggcggtgtttgatggattcagggccaaattgctggccttcaggaagggagacctcgatttcgttgacatcagaaatgaaatgctggccaccttccccgacgatcgcatcaacgacgtcctcaaggttttctag

SEQ ID NO: 352253 - DNA, 1866 bp, Pseudomonas aeruginosa
  misc_feature (1840)..(1849): n is a, c, g, or t
atgcacatttctaagctcagcctggtcaactacagaaacttttccaacaccaaaatcctgctccaaaagggtatcaacaccatcattggtgaaaatggatcaggtaaaacgaatctgttccgagcgatcaggctactgctcgatgacaacatgatccgatccgcctaccggttggactcaactgactttcatagaggtctgggaaggtggcaggggcattggatcatcatcagccttgagttcgaggagatctcggctgatgaagcagtccaggccttgttccggcatgggacgggcggcatcgacgatgagacgatcggcaaagccacctacaacctcatcttccgcccaaagaaagagatcaggcttcgcctctctcaattggacgatggcgaccacgctggtctcgctgcgatcctggctccggtcactttggacgactacgaaaccatcttcacgggccgaagcgacgccgacttcaacgacgaggctttctacaaggaggtggtcggtgacttcgagaacgccaggttcaacgaagagatcgagtaccccgccatcggcgccaagattccgagcgtgctgtccgtttccaaggagatttccttcaccttcgttcaggcacttcgagatgtggtatcggagttccacaacaacaggaccaatccactcttgtcgctgctcaagggcaagagcggcgatatcgatccggtggcattccagctcatcaccgatggggtgaaggctttgaatgattcgatcgaggcgctgccggatgtgcaggtcgtccggaccgatatcagggacaccatcaaggatgcagcaggcgaggcgtactcgccctcatccttgtcgatcaagtccgatctgcctgacgaagctgacaaactgttccagtcgctcaagctgtttgtcggcgaatcgggagaaagccacgaagggccgatccatgagttgagcctgggtggcgcgaacctgatcttcctcaccttgaaactgctggaattcaagtatcagaaagccaagcagtcgatcgccaacttcttgctgatcgaagagccagaggcccacatccacacacacattcagaagacgcttttcgacaggcttcagtacgacgacacccagatcatctactcgacccattcgacgcatatctcagaggtcagcaacgttcagaatgtaaatattctcgggcgggagcgtgatcgatgcgaggcctaccaaccgtccacgggcctgagctcagaagagatcggcaatattcagcgctacctggatgcggttcgcagtaatctgttgtttgccaagagtgtcattctggtagagggcgatgccgaagaaatcctgatcccgattctggtcaagaaggtgctgggcatcagtctggatgaactcggaatcagcttgatcaacatccgaagcactgggttccagaacgtagccgttctcttccacgatgatcgaatccgaaagcgatgcagcatcgtcaccgatctcgacaagtccatcattgacacaacgcccgcagggggcgaccccgaggaagtgcttcggcgcaagaaaaagtaccaagcctctcaggacaagggtatcgcccgaaaggcgcttctggacgagtcgttcaaagacaatccatgggtttcgccattctttgcgcctcacaccttcgaggttgatttcgttgccgctggaaatgcgaacaaagtggttggcatcctccctgatatctacaaagatgcgccaaccattgctaccgccaaggcagagcttgagtcaccggacatcgccctttacggccagcgcgtgctgaccatggcgggcaactatgggaaagggnnnnnnnnnngttcgccatcttgctag

SEQ ID NO: 352254 - DNA, 852 bp, Pseudomonas aeruginosa
atgagcatgtttattcatcacacattgatgatgctggaagacgccggcatgtccatcaaatacccagagattcgccacatcacgctggacgaaaatggcaatggcaagatgcacgcgcactactccctcattcaaggtaggcgggtgagcgtggagcagaatcagcagatgaaattcctcatgctgttcacgctgctggatttccatgtggatgcctcttatcctgaactagaaggtaaaggctatcgcgagaagtacgagaacctgccaacccaaggcgactacaacctcatcctgcgccagttgttcagggtggcgaaggtcattaggaatgccctcgtccataaccagtcgtcatgcgtcctttccgaaggcaaggtcagcgtggactacaggcacggcaaacaccatttttgcctgaatatgtcgtgggaagagttccaagactttcaaactgcgatcgtcatgtacgtcaggggcgacatgggcaaaggaagctatttcatgggcatcatgcggtcgatgtacgcgagcatcctagcgggcatcacacagttcaacgacgagtttggtagcgcactcgaacagcctacggccggcatcaagatgaagcgacacgtgcgacaaattgtcatgcatccgccttatgaaacctgcggtgacgcgcttcgctttccatgcgcggcgcgcgagactccggagtgggaaggcttggatctttacatagtccgcaacgacaaggaatttctggtgccgcgtgaggcgctggacgaagaattgtcgatcacagagtgtgacctgattgccgactggaagcgcgaaggccactatccgcatgtcaaggtgttgtag

SEQ ID NO: 352255 - DNA, 828 bp, Pseudomonas aeruginosa
atgcaactcgcatcccgattcgcttcccgttccccgtcgctgcgcagcgattacccgctgtccgacgatcaaatccgcagggtcgcgccgtccatcttcgcggacgccccgcacgaaagccgttccgagcggtacgcctatatccccaccgccgccgtgctgacggagcttcgcaaagaagggttccagcccttcatggtggcgcagacccgcgtgcgcaacgacgaccgccgcgacttcaccaagcacatgatccggctgcgccatgccaaccagatcaacgatgcagaagccaatgaaattgtcctgctgaactcgcacgacggcaccagcagctatcaattattggctggcctgctgcgctttgtctgccagaacggattggtattcggcgacaccgtggcagacgtgcgcgtaccccacaaaggcgacgtggccggactggtcatcgaaggcgcttacgaagtcttgagcggcttcgaccgcgtgcaggaatcccgcgattccatgcgcgccatcaccttgaacgatggcgaatccgaagtgttcgcccgcgccgcgctggccctcaagtacgacgaccccgacaagcccgcgcccatcacggaatcgcaaatcctgatgccgcgccgccacgacgaccgccgcccggacttgtggagcgtgttcaaccgcacgcaagagaacctgacccaaggcggcctgcgcgggcgcagcgccaacggacgccgccagcaaacccgcccggtgcagggcatcgaccagaacatccgcctcaaccgtgcgctttggctgctggccgatggcatgcgccagttgaaagcctga

SEQ ID NO: 352256 - DNA, 960 bp, Pseudomonas aeruginosa
atggaacgacaaccaccaaacgcatcaaccggtggagcttctgcgcagttcggctactaccccaagccctgtgacatagtgaccggtcgtttctccatccagacactccccgatcatgaaagtagggtggccgtcgtaacgggggactcgaacgtcctcaaggattggatctatccgggcgcgcagcaacatcgggacttcatgagcggaaatgttcgttcgatgccgtacaacgcccgtgtcttcgcgctacctaagacccatgtcctgactctccatgagagcgagagccgggaagacctcgatttcgtggtgtggtgcttgtcctttttcaccggtatgcggctgaccatggccgaggcgggctttctcgatgcgacaccgatcacgccggggaagctcgtagacttttccctgagtcgctccaccgtagccgacgtcattgagctggcactgcactatctggaatcggaacgcagcgatccgcgtgctctcaagcgggttgcggctgtcatccatgccttgttcttggcgcagtatccgcagaaccttcccttcgagcagttccagtacctgtatatggcgttggatgcctgcttcaagctggttgccgtcaaggaagcgcaggagcctcgtctgccccatgcagggcgtattcaatggatgtgtgaaaagttcgacattcctgtgcctgattgggccaaaaacgccaaggcggctccctcatcgctatcagtcgtccgcaacgacaccttccacgaagctttgttcttcgatgggccgctcggtttttcgatttacggcggcaaccagcacgcggcagatcggggcaacgtcacgctgcaaatgcaggcactcatttgccggctgctggtttccatactcggaaagcctggagccagctacatcaagactcccgtcgatacccggcagcggcacgtgcttgaactacacagatga

SEQ ID NO: 352257 - DNA, 633 bp, Pseudomonas aeruginosa
atgaaatacgttgcaccagccctacacctgaaggcgtttacctgcccgttttgcgaaacctatgcctctatggaatggaaatctatctatctggaaaggtatcccagctatgccaagatgccattctctcaatgtgaatgcctgagctgtgaacggccgagtctttggaacgagagcacagagagaatggtagcgccatctctagtcagcgctccattgccgacccccgaccttccagaagagtgccgtaccgacttcgaagaggcccgccaaattctggccgcttctcctcgtggggccgcagcgcttcttcggctatgtattcaaaagctatgcatggtcctgggtgaatctggcaagaacattaacgacgacatcaaatcactggttgccaaaggtctgcctgtgcagattcaacaggccttcgattatgttcgcgtgaccggcaacaatgctgtacatccaggggaaatgtcgttagatgacgaccccgagacggtgagcataatgttcgaaatgatcaacctgatcgtcgaagaacgtatttctcgcccgaaaaagctcgaaaagcactacggccgcctaccagaaggtgcacgggcggcgatagaaaagcgggacacctccaagtaa

SEQ ID NO: 352258 - DNA, 657 bp, Pseudomonas aeruginosa
atgctagacacttccctattgaccgaatcgatagtggcgctgatacgagagctgaggccgctgggagtggcattgtaccaccatggaatggacgactgttctgggtggattgccagccccattctgcaaggctgctgcgcttggcaggcaatacagtgctggtcaggtgagctggatgcgctcgcatcgggtgcgcaagcgctggaaaccccaatcaaggctctccttcgattgtgcacgaccggttattccttagctgccttcagcagtggggctctcggcgggctcggccaaacccaagagaccctttctcacgtcgggctcacatttgtggcaggcaaagtatttgattctttccatgtcacctgtgacgaattcatcgcatctctcacacgcgactgctccccagccacggtcgaagcacgatacgcaactccacatgccctcgatgaaaaataccgagggttgagggtgctgacacttgtggcaggatgcgatgtggacgtggccttcctcgcaccagtcgtcgccctcgggaaattgtttggtgcagaggtctatcaggatgtcggtggtaatttgatggccgcaggcaggacaggcatgcagacctttttgaaagaatttaaacggagcattgcagccggggcagggtaa

SEQ ID NO: 352259 - DNA, 156 bp, Pseudomonas aeruginosa
atgcgaaacaagcgcaacgatgaactgaacctggtccacgtagcagtgatcctggcgatgaagatccttgccatcaacagtctggcgctatcgatcatgcaacggtacgtggacgatagaaagctaaaagagctggtatccagcaatgaaggatga

SEQ ID NO: 352260 - DNA, 543 bp, Pseudomonas aeruginosa
atgaaaaagccactcgctacggcgctgaccctgcttctcggcgccaccgccatttccgcgcacgccgccgacggcatggtcaaggtcaccggttctgtcgtcggcaccacctgtaaggtgggaggcacgaaaactgaaaccggcggccctcaaggcaccctgaacaccatcaatgtggaactggaccccgtgtcggtctccgccctcgacgcccctggcaagatggccggcagcaagtctttcaccatcagcctcagcgactgcacggcgaaaaccgcgcaggtgatgttcgacaccatgggtactgttgatacctccacgggcttcctcaagaacgccggcgacgccaagaacgtcgaggttgccctgtataccagtgatgataatccgattcacctcggtaccaatgagggaagtcaggccgtcacgctcaccgacggcaaggccgatatcaacctccgggcgtactacgtcgctatcggcgcagccgccgagcccggtagcgtggataccaccgcgatgttctcgatgaaatacgagtga

SEQ ID NO: 352261 - DNA, 219 bp, Pseudomonas aeruginosa
atggagcgcttgctcgagagcatttacatcaatgctcggccggcaatggagttgaggcttagcctcaccagctccggccacaagagaatggtaaagattgtggatggggaggaggtcgaggttctgccaggtgaagtgcagggcatcctggaggcccaaaagagggatgttggaatcctcgccgatttcttagccaagagtctcttggcgcgacgctag

SEQ ID NO: 352262 - DNA, 2349 bp, Pseudomonas aeruginosa
gtgattcttctggaaaagggggaaagcacgccagcgccatggatcaatgtcatcgccaatccccggttcggcttccaggtctcggcggagggcagtggctatacttgggcggagaacagtcgcgaaaatcaactgacgccctggtccaacgatccggtcggcgatccctgcgtagaagcgttctacctccgcgacgaggaaagccgggcgctgtggagcgtcactgcgcggccgattcgcgacgatgggctctacagcgcacgccacggattcggctacagccgtttcggccatcgctgccaaggcatcgacatggatctggtgcaatttgtcgcgctggcggacccgatcaagatttctcgtctggtgctgcgcaacctctccggcaagtcacgacggctgtcgttcaccagctatgcggaaccggttctcggcagcgcccgggcgacatcggcggccttcatcgagacctgccaggatgtcgaaagcggagtgctgcttgcgcgcaacccttggaacgcagccttccccgggcgtgtcctgttcgccgatctgtgtggccgccaaagcagttggagcggtgatcgccgcgaattcctcgggccactcggcgccccctccgcgcctgcggcgttgctcggcgagccgggcctttccggacgcacgggggctgggctcgatccgtgtctggcgcagcagtgttcgatcgagctggcaccgggggaggtggtggaaatcgtcgcattgttcggccaggcggactccctggcccatgcccgagatctggtcacgcgataccgccggatcgatccggaagagacactggcgggtgttggtaggcactggcggaccttgctcggagccgttcaggtgagcagccccgagcgttcgctggatatcctgctcaacggctggctgctgtaccagaccctggcctgccgcgtctgggcgcgctcggcgttctaccaggccagcggcgcctatggcttccgcgatcagttgcaggatggcatggcgctgaccctggctgctccggcgctgacccgcgagcatcttctgcgcgccgccggtcggcagttccgcgagggggatgtgcagcactggtggctgccgcactcgggacagggggtgaggacgagaatttccgacgaccgggtctggctggcgtatgccacctcgctgtatctcgaggcgacggccgacatcgggattctcgacgaagtcctgccgttcatcgaagggccgccgctgcaagagggcgagcaggacgccttcttccagccaatgccttcggatcagtccgcgtcgctattcgagcactgtgcacgaggcctggaccagtgtctggctctgaccggtgagtcgggcttgccgctgatcggttccggcgactggaacgacggcatgaaccgcgtcggtgccggcggcacaggagagagcgtctggctcggctggttgctgctggatactctcgcgcgcttcgatggctatgctcgttcgcgtgaccctgagcgagcccggcactggcgcgaacatgccgggcggttgcgtctggccatggagcgagaggcctgggacggtcactggtatcgccgagcgaccttcgatgacggaacctggctgggttcgaaggatggcgaaacctgccgcatcgactcgatcgcacagtcctgggccgttctagcgggggccgacccgctgcgggcgggaatggcaatgaccgcgttggagaggtacctgctacgtccagccgatcgattggcgctgctgtttacgccccccttcgacgagaggggggcggatcccggctatatccgcggctacccaccgggcctgcgggagaatggcgggcaatacagccacgcggccatgtgggcggtcctggcattcgtccgccagggcaaaggggacaaggcggggacattgctttccttgctcaatccaatcaaccatgcgctcacgccggaacaggtggaacgctatcgagtagaaccctacgtgctggccgccgatatctactccgaggtgccgcatatcggtcgtggcggctggacctggtataccggctccgccgcctggatgtatcgcgccggactcgaaggtttactgggaattagccggcagggtgcctggctgctgattgatccgtgcattccggtgacatggccgggcttcgaggtaagcctggaggtggagggcggccactacgagattcaagtggagtccggagaggggcgcagccgtggcgtgcgcgaggctttcctcgacggcctcgaagtggagtgtatcgatggccgagtgcgggtgcctctcgattgtcagcgacaccgcttgcgactgagcctttag

SEQ ID NO: 352263 - DNA, 246 bp, Pseudomonas aeruginosa; identical to SEQ ID NO: 343360

SEQ ID NO: 352264 - DNA, 348 bp, Pseudomonas aeruginosa
  misc_feature (171)..(180): n is a, c, g, or t
atgagagcagttgcatccaccatcgtacttttgacgctgtacggcttcgcatacgcagaggactccaagcccttagcaacacaagccggcgaagccactgctccaatcgcggaagctatcggctcaggttttagtcgcataatgaccgagttcatggcaggtacggatggnnnnnnnnnnggcatggtaggggacgccgcaaggaagagtctcaagatgcaggacaaacgcgaaagggaggcgaatagaggcatgctgaagaccatgaaggaatgcattaagccagggaatgtcattgatgacgacgtaaaagaatgcttagaaggattacgcgttaagacttggtaa

SEQ ID NO: 352265 - DNA, 513 bp, Pseudomonas aeruginosa
atgcacggccatacccagcttgccccgcactacttcttccgacagcagcgattgctgcgcgcgctgctgatcgacgaccaggcctggttcgtcctcgacgacttcgcccggctcatcgaacacagccagcccgaacagatgctcgcccgcctggacgacgaccaggcgcgccgcgagtcgttgcgttccgaacgtggcgaagaccaggcgcagtggctgatcagcgagtccggcgcgtatgccgcgctgatctaccagcagcgcggcgatggcagcgaattgcgccgctggctcagcggcgaggtggtgccggagttgcgcagcgccaccgacgacagcggcatgccgcgctacgtcaagttgcgctgggagcgccaggtggtgcacatgctcgactggcagggcaagctctgggtgaatttcagcgagatgcccgacctcctcgaacgccagggcgagcccatggtgcaactgggttggcgacgctggttgcgcaagttgcggccgctctag

SEQ ID NO: 352266 - DNA, 159 bp, Pseudomonas aeruginosa
atgaatatccacgtacgcaccgtcaaccatgtggtgctctctgaagacaccttccgctttgaatccatacttctgatggagcttgataacgggagcattaaatgcaagaacttcacaatacagcttatgaagtcccatatcgccaaaagcgtagtctag

SEQ ID NO: 352267 - DNA, 3069 bp, Pseudomonas aeruginosa
atggagttcggggaagtagaaatcaatgacgaactttgggctgtgcttcgtcgaggccaaagaaacgcactcgagttggcatttgagtaccttaatcaggaccaaatacgtcactcatgtttagtaagtatgcctaccggaggtggcaagacaggagtaatttccctgctagcccactttgggctgcagcagaagattttagtcatttgtcatcgctcggcggttcgggagcagttagttaggcagctgtccggtgagtttttcacagataggctgcctgatagtgagttcccactaaggcaagtaattgatggggtggctctcatcgacggggaaagtataaacgtaacaacatttcagatgctttcgtcgttgcctgcaaggactttgagttctttggtagaggctatcgatttggtgattgtggatgaggggcattctgagccgtctccaatctggagtgagatatcaaggtcgttcgaagcacataaagtcattataactgccaccccttacaggaatgatctgtttaagtttgatgtttctcctgagtggagttgcgtatatacatataaaagagcacttgaggatcgtgtgctatgtcagcctgtttgggagtctgttcggcctgaaggcctcctccaacgtgtaagagatttactgcaacaacaaccgaatacgaaatgtatcgtaaagtgcgaaaattccgatgcaatagaatcgtacgctgaaatgttttcggcagagttttctgtgcttgctgtgcatcagaatttttctggtgatcccagagataattttaagtctgcagtcccgaaggcgcttaaaaatgcaagttacgatgtgattattcatcagaggaaacttgatgaaggcattgatatacctcaggcgaaagttttaattctgacatatgatgttagaagcggccgagaactcgtgcaaacggttgggagggttgtacgcagtcatcaaaattataatgcatatattttagaggtggagtcgcaatctaactcaagcttgtggcaaaatttcttggattttgatgagtatattactgttagagataactgtgtttcttttctgaggtcacttgatacttcaatgcttttagtaaggtatctcgatgcttttccagatgtgagctattttgactctggctttagaaagaagttcgatattgatagatttgacgttggtcaggggttgattatccctcttgcgtcgctgtgctttataaataagctgccgtctttcacaatggctaagtttatagattcgcagtactggaggcttaccatggcgggtgaacttgttgtcattagggagtccgcaggtttttcgattttactaagcataagttttagtaactcaaagtttcttaaagactctttgttctttgagccagcactacaggtattgatttgtagagaggttggtgatctttttgttgtctatgacagtagaggtatcaaccattctagtgaaagtgacatcggtcttggtggcgtaatttccttggaggaaattctatcgttaggggcaagaacaggacgtatcagaactaaatcggcaaccagcatggctataggagaaacaaggcggcgtccggaaggcgtgtcctggagggggcgcaatttggaagatacacactcggcccagtctaacgcttcctatgcactttcaacgctggtggttgataatctgacgcaacagggtaaagctcagagtagctattatctcggcgttgggtcaggacgggtttcagatcagaaaaataaaaacctgaatctacgcgggttggccgcatggatagatgatgttgtcgatgtaatcaacagcagaaatgctattggtagcaatttggtaaactcgtttgcgaaacccattgcaaatccgcctgaatgcgcacctacaagcttaatttttgatatgtgtgactttgctgagcctttggtgtttatatcaaacgaggagcgattgagcgtaagcaacgatattctatattttgaatatagctttgagagcaacgagtttgtgtgtggtgtagagtggcgtggtgtatgtatgtatcttgcgtatgacataaaaacgcgcatgcctaggatatccactggtggtaatttcgtattgcttaatgctcaagtatcgagtgctgggctggagttacaagccggacagtcgttggaatctgtattgaatgcaagcgttcaaagggtgctctacttggactcatcagcattttatcaggggcgttattataagtttagacttcctttagaggcgggtttcgatctggatcagtcctcgatagggcgctcagttataagaatagatggattactttcgcccggaatggatgagaaaggtgggtcggtggcactggtggaaaatgcttttctaccgaattctgtatttcacctgatagacaaaattaggcttgtaaatgattctaacttgagggtttcggactttggtccgttttttccacatatacctgatgtggattttttgctttgcactgatctcaatactgagcctgcagatttcattgcaagctcagaaaccaagctagtgttcatacatgttaagtgtggaacgagcagtgtgcggccgaagtcttcagcaggtgctattgctgaggtcggtggtcaagcaataaaaaatatggaggttctaataagcccaaatatggatcttaagtttgggaatcatcggatgttagctttgccgtggcgattagatctaactcatcccgatcatctgaaaagagtgcggctgattcataaagaaaatccatctcactatatggatagaacaggggttgcttatgaagatttggttgatgaggcgtggcggatatttactgagcgtagaaattcgttgcgggttgataaagaaatttggatagttgttggaaataatttttctaaagctcatttttctgagcaaatgagtctaggtcatgattgtgctcatgaaagccttcaagcatttcagctgttggactcctgggtcgcaactgctgcggacaatgatgtggcattcaaattatttgtatcctaa

SEQ ID NO: 352268 - DNA, 243 bp, Pseudomonas aeruginosa
atgcaggttctgatagtcgtgttactgctagtgatcattgtgctgcttgcgccatgggtgcttggtcttatcgcggccggagctgcggtttacgtggtcgctgctgctttggtcgctgtggtcacgctgatcatggtggcgctctatgctctgtattcgttgaaggatagtgaatgggcgcgacagcgaagaatcagaaagacagttgagcgggcgaaccagcgaaatcgcctgaatcaataa

SEQ ID NO: 352269 - DNA, 615 bp, Pseudomonas aeruginosa
atgaacgcacaccacaaaaacacgctcccgagcgcagtaggcaccccgttcgagggcggcttctacatgggccagtaccagattcaaggcgagcgcttcgcccttatccgcgcgcccaaagcgctgggcttccacgctccgatccactggggcgagtatggcctgccgatcccggacgccgatagcttcgtggacggcctcgccaacaccaaggccatggccgaagccggctcgaaactggccgcctgggcgctcggcctttcgattggcggccacaatgactggtatctcggcgcccgcgacgagaacgaaatgatctatcgggtctgcaagcccaccaccgaggagaactggtgcagcttccgcgatggcgacaaccccagcagcttgccgccgggctacccgtacaccgccgtggcgcccgggcagagccccattgccatcttccaggatggcggcgaggaggcgctggaggcccgcagttattggaccagtacgcagtacggcccggacggcgcgtggatccaggacttcggcgttggcgaccagagcgacggcggcaaggtcggcgcacggcccgctttcgccgtccgcagaatcaaagtcaccccttga

SEQ ID NO: 352270 - DNA, 663 bp, Pseudomonas aeruginosa
atgcagaacgaaatcactctggcaatcggcgacaccacgctcatcaccaccaacgccctgctcgctcgccacaccttggaacaggaaaccggcctggtacccagcggcagcatccagggcgagctgatcactctcgatacccacctcaccccgcccgctatcggccagcactggcacggccagggcggcacttacgtcggcgtgatgcgtggcgaaaatggcgaaccggattaccaccttatcgccccgaagcatgcacagatcgactcgatcacctacggcggccgcggctaccgggtcagcggcgcagatcacatccgcgacggcctcgccaacacccgagccttgaccgctcatgatatcgatcaccctgctgcgctatgggccaccgagcaggaagctgaaggacacacggatctctacctgccggcccgcgcggaggcgtacctgtgctgggcacacatccctgaacagtttcagggcaagggctggtgcctcaccagcacgcagtacggcccgaccagcgcgtggatccagtacttcggcgatggcaaccaggaccgcggcggcaagggcagcgcacggcccgctttcgccgtccgcagaatcctcatcccttcaccacttaatgctctgaacaactgcgcgcgcagcgcgcagtaa

SEQ ID NO: 352271 - DNA, 363 bp, Pseudomonas aeruginosa
atggccatcgcccaacacttgccgatctacaaacgcgccggagaactggcccggcttgtagccgacctctccaaagggtggcgccgcgacttcaagcgcaccctcggggaaaaggtgctcaacgagtgcatcgacgtgtcgatcctgatcttccgcgccaacacggccggcggccaggaacgggtagcgcacatccaactgattctggaacgcatccaggtcgtcgaactgatgctgcgcctctcggccgacctcgggttgctcagcggagcccagcacggccgagccattgaaatcaccgacgacataggccggcaggccactgggtggaaacgaaatgccgccgcatcgccagccgtgtga

SEQ ID NO: 352272 - DNA, 1071 bp, Pseudomonas aeruginosa
atgcaggcctattacgactgtcggcgcagcaagcgcaacagcaaatcggcccttgcattcgagttcaacctggagcgcaacatcatgcaactccaccatgagctgaacaccggcgcctaccaacccggcgcctccatctgctttgtcgtgactcacccgaagcaccgcgaggtgtgggccgccgacttcagagacagaatcgtccaccacctgctgtacaaccacatcggcccacgcatcgagcgctccttcattgttgatagctgcgcctgcatcaagggccgcggcacactctatggtgcccagcgcctggagaagaaggtgcgcagcattacccgcaactggaaacgccgcgccttctacctgaagtgcgacctggccaatttcttcatctccctcgacaagcgggtgctcgagcagcaactggtcgcacgcatccctgagccaacctggcgggcacttgccctgcagatcctctggcacgacccgcgcaccaactacgaaacccgcagccccacccgcttgctgaatcgcgtgccgcagcacaagcggctcaccgcccagccagcgtacctgggcctgcctatcggcaacctgtcgtcgcagttcttcgccaacgtgcacctcgacgcgctggaccagttcgtgaaacaccaactgcgcgtgaagcactacatccgctacgtcgatgacttcgttctgctgtccgagtctccccaacaactgaatgcctggcacaaccagatcgaggcgttcctggccgatacgttacatgcccgactcaaccctgcgaagaccgtgctccagcccatcacccgcgggatcgacttcgttggccaggtaatccttccgcaccgccgcgtcacccgcccgcgcaccgtggaaaccgccctgcgccgggtcagcactgctcccgccgagcagttacacgcaaccgccaacagctacttcggactgctaggccaggcaagccacagccacaacgatcgccggcagctcgccaggatggtacagcgccgcggacggacggtatccgccaacctgcgcaagactttcaagggggccgcatga

SEQ ID NO: 352273 - DNA, 969 bp, Pseudomonas aeruginosa
atgaagcagagtttccacgcacattttgatcgggacttgaccaaggccggttcggcaattctcagggaggcagtccggcgcgggcttctcagtcagcacgaggccatgatccacgaccagcaatgggcgcagtttagtgcttatgccaacgagtctcatgaagtagacatcttggaattcgtcaataaaaaattggtgagggagtacggggaagagctctatatccagacataccaaggaaatctcccactgcaaagcgtgtcgggcctgcttgagactgtatatgtagtgatgggcttcgcaactaatgggcactggaaaggcgcagcggctaacgtcggtagccgtcttggctttccaagctatgcacggattaccgtaccgcgcagtcttgaccgtactaagtttgaagccgcgatggtggatattcaggctctccactcagagcagctagcaacattaatcaggtcagctcgatacctcggcatgtcattgcttgaggcttttttcttcgacgcagaagatgctcacaaggacgccgaagaaggaaacatcttttatgtattcagcaaagataaacatgagcatcggatcattaatatctctgcccctgagcaaattataattttgaagaaggccgcggcatttcaaaaacttcagggcagcagccacgcgacaccagcagcttggcgtacatggaaattaaagaacctacctgcagctcaagagcttttactttctcacggactaaacattgatgattgtcgcgcggcatatgcctgcgagctctactggcgattgtctggtcaccacgccccgattcttgggggcaaagctccccaagatgaggatctggaggcccggaatcacgtcgcctacgagctcgggaatatgcgtatctgggaaactgatgcgtacgttggtgcccgagccaacctgagaaaggaagccgccggtaccagtctctaa

SEQ ID NO: 352274 - DNA, 672 bp, Pseudomonas aeruginosa
gtgtatccctgcctagctgcaactggccgacttctgccagttacgacaggcagaaatcggccaaaagcggaccgtcagaagacacctataaaagcgtgggcaattaaaaattggaaacttctaactatggccaaatctatgaatagccccctgagtcctgatgtatttgttatggactttgaaagaactgaaaactccgacgaattgcacgggatttttggtagggctcttatagttgcaacacgatttgattcgatgtgtgaggctgctgcaattacgacaaaaatcaaagggagcttagttagagagtctgtgtgcagcgacattgattataaagattttgtgtctaaattaattgaaagacatgccaccctcaacagtaacattcaatcccttgggctgcccaagggtgtatcggaaattcttcactcgacaagagaggccagaaactatgttgctcatgaacttacaagaggtaaagtgggctgcttggatactaaagtggatgaaaatattctaatttgtgaagtttctgagctggttgagaaaatagtgtatggtgacgttgttatctcaattttgatttcgaggcaaagcaatgatccgctaccaataaattattcaattgagaattataaggaaaaagtaattaaatgggtgactgaaaggtga

SEQ ID NO: 352275 - DNA, 351 bp, Pseudomonas aeruginosa
atggccaaggatacccgcgatacccagaccctcgacgccttcccggccaagccatccaggggccggcctcgcaaggctgacgcgctctccaatgctgagcggcagcgcctctaccgtcagcggcaggcgggcaaggcaccccaggtggacgcggatgccctggtccgtctgcaggaggaattcgaccggcacgttgatgatgcgcgcgccctggtggcccatcttcgaaagaccattgcgcagatggagcttgaggtggatctgtgccgccaagagcgatccgatgccatgcgcgtcaacagcatttaccgcgagcgcctggtgcttgctggtctccccacggactattag

SEQ ID NO: 352276 - DNA, 270 bp, Pseudomonas aeruginosa
atgctgccgctctgcatcgtcgtcgacgagactggacggctcgtctcgcaaggtgagttcaccggcgattgcaccggctacgtactcatgaccccggccgatttcgcggggtccatgaccgttgctcagttgttcggctggcctgatccagtcgccttcggggcagcgttcacgaccgcattcggcgtcgtcctgggctgtgcggtcgtggcccacaccatcggctctttagccggtttcttcgataccaatcgtgaggaagaactatga

SEQ ID NO: 352277 - DNA, 1311 bp, Pseudomonas aeruginosa
gtgtcgggtgtttcgggcggggttttgactatcgttggtcccgccctggagggggaatatattcctcgcggcggtactggcggtgcaaacattcctgtgcgcggcattcatggtggtgttacggcgggtgcgcggactattgcgggcggggcggtttctgcactacgtggcggcatagttggcgttgctgcaactgccgcgatggcgatggctctggataagataggtggctttattgatgaaaatggaaagcctgtaattaagaagccgcagggtgaggtgccgattgatgtatttggctatagaagttccgcctggagtttctgtaacacgtctatatatccttctccaatgggttatatggcatgcgctcaaccacgcatagagtcttacgtgagttctacgatttcttacagtcttcagccggtcccaaacaataacggttatcgtgtcatctggactaataacaagactggtcaggaatcacagttttatgttgaggcggtgggcaaatgtccgggagttctgattgattcgacgtgttatcaagaggaagttataagcccattcacagggccagactatgacaacctgacagatacattgtcgggtgttactaacccggactggctcaagagcttgctggaggcgtcttgtgaaggctcgctgagtcctggccggtgctacgacgagctgaccagtcttgccgaccagttgaaggggcctagctcggtcaaaggtccgtcaagctcgaccacaagcacttacacgcgccctgatggcaccaccggaacgacgaacactactacggaaaccaattacacgatcaactacggtccgaactatttcgattattcgaagacgacgactacgacaactagcaaggatggcgaaaagcccacgacaacgactgaaactgagtcgcctgaggtggcgggggaggagcctgcgaccgaacctgagtctcagacgccttcaccatgcacgacaaactgcgaggggcccgcatatgaggatcagtacaagccgaccgaggaaacgaaagaaagcgttatcgacaactatctgtcgcgtgtagaacaagcgccgatagtgaatgcggcgacgggatttttcgatgtttcggtttccgcatcgtgtccaacttggcaagcgcctgtcgatatgtcgattatgggtgcaagctttcactctgaacttgtatttgatcatcactgtcagccctggtttaccggatatagaacggcggctatggccgttgtgatgattctttgtgcgttcggcgcgttctatatcgccatgcttgattga

SEQ ID NO: 352278 - DNA, 351 bp, Pseudomonas aeruginosa; identical to SEQ ID NO: 352275

SEQ ID NO: 352279 - DNA, 1311 bp, Pseudomonas aeruginosa; identical to SEQ ID NO: 352277

SEQ ID NO: 352280 - DNA, 486 bp, Pseudomonas aeruginosa
atgacaaggaagacgcccgtggcaacgcggaaacccactgccttaacggccggctatgccggcattcacggcggcatcgtggagctgctggacgcggtgcgccaggcggcggctcgcagtgtcaacgcgctgatgacggccagctattgggagattggccgacggatcgtcgaagccgagcagaaaggcaggcggcgggccggttatggcgagcagttgatggcgcggttgtccgccgagctgacggcccggttcgggcgcgggttcagcccggacaacctggagaacatgcggcgtttcttcgtcgcttacccccttgaggcaatttccgagacactgtctcggaaatctggagacggactgcccatcgagaattccgagacggtgtctcggaaattcgacctctccgaactggcccaggtcttcacgctgccttggtcggcctatgtccggctgttgtcggtcaaggatgaccatgcccgctag

SEQ ID NO: 352281 - DNA, 1761 bp, Pseudomonas aeruginosa
atgaacgagccttgcccgcttcgcgacagtgtcctcgcttgcgaaggacacgcactggtcactggtggccccggcagcggtaagacgaccattgcactgcgaaaggcggtcaagcgtattcaacagggtatgacgcctgggcagtccgcgcttttcctaagcttctcgcgcgcggcagtggcgcgcatcctcgacgcggccaagctagaagctacagcagccgagcaagagcaactttcgattcagaccttccactccttcttctgggacatcctgaaggcgcacgcctacctgctaggtgctccgcgaaaactgtcgattctgctgccgcaggatgagaaggctctgagcgggggcatcgacgacgatgacgacgaatggggtcaatggctaattgagcgcgagcggctgttccgcgaagagggccgcatcgcattcgacctgttcgctcccaacgccactcgtctgctcgccaccagcagccacttgctttcctcgctcgcgcggcggcatcccatcatcatcgtggacgaggctcaggataccgggcaattcgcgtggcaatgcgttgaaatgcttgctccacacgcgcagatcgtttgcctagccgaccttgaacaacaaatcttcgattacctgcctggcgttggaccagagcggatcgcagcgattcgcgctgcccttcatccactcgaagttgatctgggcactcagaaccatcgcagcccagattctgaaatcttgctctttgccaacgacattctggccgggcaggcgcgcggtgcgccctataaagggatctcttccttttcctatcggccagaaaacccaacaccgaactggaaccatgttctacgacgcgccatagctcagttgctgtcgaaaatccgcgcggagtccgatagccgacctcaaacgctcgcaatcttggtgtcaaacaacagaagtgcgctgcgtatgtcgaacgcgctcaacgcaatcgaacctaatgtaggcaaggctgtgcgccacaagctgttattcgacgaggccgaggccttactctcggcacgatttgcggcatttctgcttgaacccaaagaccttgcgcaactcgaactcgatgtggcagccagcatggagctgatcgcctctgcgcggcgggcgaccggacaagctaaggccgccgtgagcaagctcttggagcaggcgggaaaaattcgaggcggcaagaccctcaacatcaacatcgttaaatcgttgcggggcctaattacaggtcttcacgccgacggcttcaccggagaccccgccaccgactggcttaccgtcaaatacgctcttcgagccactggccaaaatgagttgctgcgcgtggcttcccagcttgacttcctagtcgccttccgacgtggacatcgaatttcagcaggcttagccaacgagtggctgcgcgacggtgcgtacacgaacgctcgcttagcattagatcaagccctcgcacaagagcagatcttggatggtatcgaggctcctgctgggctccaggtaatgaactttcataaggccaagggtaagcagttcgatggagttgtcattgtccgagaagcacggcgcacggctgccggagtacagtcttccttcgtttggcgaggagatgaggcgccacatcctaaaagccgcaaagtcctgcgcgtggggatcacccgtgctcgtatccacacgctgatcgtcaatcccatgtggccgacctgtccaatcctgcgtggacataagttgtag

SEQ ID NO: 352282 - DNA, 1806 bp, Pseudomonas aeruginosa
atgaaagtagttcgtctaggcatctcgaactttcgaggcatcaggtctgcggaactgcttttcgatgggcatacgctcatggtcggctctaacaacgtgggtaagagcaccatctgtgacgcgctagatcttgtcttgggcccagatcgactgaaccgattcccaccaattgatgagtttgacttttacaacgcacagtatctggccccgcctgcacaagagggtgccgagcccgaggcaattccattacgcgtagaagccgtcttgatcgagttgagcgctgagatcgacgccaaatgcgggggcaacacagaattttggcacttggaggaacagcgtcttttgggggcaggcgaagtccaggccgccaacccgccacatgtggttccttgccttcgtctggagaccattggcaaatacgacctcgccgaggacgaattcgaagcgagaactttcttttcccacagccccgacgcaccggaaggaacactgacgcccgtctctaagccgatcaagcggcagttcggatttctctacttgcgagcattgcgcacgggatctcgggcgctgagccttgagcgcggctcgcttctggacatcatcctgcgcaccaagggcgttcgcactactctttgggaaaggaccatcgagcgactacgcggcctcgacatcgaggccgacgccgccgagatcgctcctgtcttgcgttcggtcgaaaagcgacttgcccgctacatcgcgctggagtcgcccggcaacgcgacgaagctgcacgtttcggagctcacgcgcgagcatcttcgcaagacaatgtcgttcttcctgtccatttctgccgaccaaggccccgtcccttttccccacgcgggcaccggtactgtcaacacgctcgtgctcgctctgctgtcgttcatcgcggatctcaaacccgacaccgttatcttcgccatggaggagcccgagatcgcagtacccccgcatacgcagcgccgaatcgcccaatacctactgacgaagaccacccaggctttcgtgacctcccactcgccctttgtgattgagaaattcgagccgtcgaaaacgctacttctctcacgtgacggcggtttggtcagcgcccgcaaggtatccgacgcaacgggcctcaaagacaacgactacaagcggttctctcgctcggggctgtccgaatgcatgctggggcgagcagctatcgtcgtcgagggcgtcactgagctgcatgccatgcccatcatcgcgcgccgcctggaagaaagcgatcctaacttgcagcccttggacatcgctggcgtggccttcttcgacgccgacggcgagtcgaacatgcccaagttcggtaagttcttcaaaacgctggggctgcgcaccttcgctttctacgacctcgactacaagaaaaagcgcaagcccgagcaggcgcaggctctcgcggagaatttcgagattaacgtcgagcacgcctacaagggctttgaagacctcctggtggctgaagtgccggtaggccggctttggtcgttcctcgcaaacctcaaagcaaacggcgaacatggcaatatcgccatccccgacgcgcgcccatccgacgacgcagtcaaggccgtcgccaaggaggctctcggcggaaacaaaggcgcaggctggtcggcccgccttcttgaagagtgcgaattcaacgaactgccggctaccgcaacacaattcctcgcgtccgtgttcgctctgttcccgccgccgccgcccatcgacgagggcgacggcgaaaacgccgatctgttcgcctag

SEQ ID NO: 352283 - DNA, 210 bp, Pseudomonas aeruginosa
atgagccacacccgcacgagccgcccacgcatgggcgcaacctatgcccccggcacggtacgcgcccgccgttggcatggtgatggcgacgtgcgcggctaccgtccgcctcgcggctggacagcccgcgccgacctgaccgacattcaccccatcacaggccgcgccttgccgcgtgccgtgtggtggattgtcgaaacgaatgaataa

SEQ ID NO: 352284 - DNA, 846 bp, Pseudomonas aeruginosa
atgattaagttagaacctccagatctagatgccagccaagtcttcgcacaatgtattagtcgtgtacgtaatccggcacttaaggcgcgattggagtcgatagaagcacatatcactcaagcgtccgacaccttttcagaccttgcaacccaggtacggctgcacgagttcgtgcgcgaaaacgtcgtaggtggcgtagtaacgacggccgagatggaagctgtatacagccagcgaatggtaccaaagaccgcgcctgggcgagccacttacgataaattgatgagtttggcccgctctgggaagtgcccactgtgcgcccagagggatgcctccacgctcgaccatcatttacccaaagcccactatcccgtcctagcggtgacaccgctaaacctcgtgccgtcgtgtaaggactgcaacaaggccaagcttgcgaacttacccacgaacgcgaatgaggagacgctgcatccctacttcgacgacattgatgctgatcgctggctgttcgcgactgtgcaaacaaccacaccggcatccttaaaatttttcgtcgatcctcccaatcattgggatgccgtgcttgcagcgcggatgtttcttcattttgagacgctcgggctcggagaactctatgccgctcaaagcgccgacgaactgctcaatattcggcatcaacttcaaacgcttcacaacgtgggcggtgctgcgaccgttcgcagcgagttgtcgtcacgcatggaaagcgcacgcgccgtgcgagtcaatggttggcgtgtctctgcattccaggcattcgccgagagcgactggttctgtggtggcggattcagagctatctga

SEQ ID NO: 352285 - DNA, 1551 bp, Pseudomonas aeruginosa
atgaagaaattctttaccgtgcttcctgcaggtcattccccacccaagtccgatggggaggccgcgtacctactgacagacaactgggacgactggttctcgtacagcacgatgtatacgttaatcgtgagggacactaaaggcacggtacatcgtattggcagtgtcaagataggacagatggggatgcagccggatcagcgtcggccgaatctggagcctttctttaatgcattgggtgacgaattcttctctatcggtcaagacgacacctactacgagaccttaaacgaattgggggctgaactacgagaccgtgttctaacgggactacgtgacatggcattcgacccgcaacgcctcgaaacagcgctcaaggagaaggtcactggcgtttcgctgctccgatctgtcacacgcgccaccatacaaggtcaatatgctcggctagcccaagggggcgcgcgtttgtcgcgctataacttctcatactgcggaccacaaaaggcccgctcgaagactcctccaatagagctaaattttgtcgtcgaacctgagtcgatgccacccagcaatattcacgttctaatcggccgtaacggtgttggcaagacttacttgctgaataacatgtcacgctcgttggtagatcagcgatcgagtcccgaggaagttggagggttcgaggcaggggaggacgacgaaggtcaggatttgttcgccaatttggtgtcggtgacttttagtgcgttcgatccctttgcccccctgcccaatcgtcgcgatcggtctgaaggtctcccctgtgcctatgtggggctcaagcgcacggggacgacatcggatggcaaacctttggctccgaagtcacctgaaagtctttcgagggagttcagcgcaagtgtccttgtatgccgcagccaaagtgcccgcttgggccggtggcgccgagcgttgcatatgctggaagccgattccatcttcaaggctgccgacgtcgcctcgttggcagacgaagagttggaagatgagctcaagactagcgctcgcaaggtctttagcaacctcagctctggtcacaaaatagtcctcctaacgatcactcgcctggtcgagacggtggaggagcgaacgttagtgttgctagatgagccagaagcacatctccatccaccgctgctatccgccttcgtgcgcgcactgtcggacttacttgtgaatcgcaacggggttgcgatcatcgcaacgcactcgccagtgattcttcaagaggtgcctgctcaatgcgtttggaagatctggcgcaatggccgaatcgttcaggctgaacgcccgaccatcgagactttcggcgagaatgtcggggtactcactcgcgaggtgttcggtcttgaggtcacagatgctggcttccatcaattactacggacggccacacgcgatgaggagaacttcgagaatgtggttgccaaatttgaccaccagctcggcggcgaggccagagcattgattcgggctttgatggtcaaccgtgggggtgacgatgattaa

SEQ ID NO: 352286 - DNA, 150 bp, Pseudomonas aeruginosa
atgctgacgacctatctgctgcgcccggaaggcgagccttcggagacgcttgcccgcttcatcgaacgggtgcaagccatcgacctgcccgaaggcgtgaggcccgcgcctacacctgaacctgatccgcaggaggacaccccgccatga

SEQ ID NO: 352287 - DNA, 924 bp, Pseudomonas aeruginosa
atgcaacgactgaacgtggaattccgctccgagggtgtcgccctgcgcggctggctgtatttgccggaggcgcgtgccgagcggccggcgatcgtcatgacgcacggtttttccggggtgaaggagcagtacctggaccgttacgccgaggtattcgccaccgccggcttcgtcgtgctcctctacgatcatccgaacttcggcgacagcgacggcgaaccgcgtcaggaaatcgatccggtgatgcagcgtcgcggctatcgcgacgcgatcacctggttgggcgcccaggcacgggtcgacgcgaggcgcatcggcatctggggaaccagctacagcggcggacatgtgctggaagtggccgcactggatcggcgggtgaaatgcgtggtggcgcaggtgccgaccgtcagcggccacgcctcggcgttgcgccggacccgcgccgagcagttgccggcattgctggcaagcttcgacgcggaccgcctgcggcgcttcgaggacttgccgccggcgctgttgccggcggtcgccgcgggccccgacgagccttgcgcgatggccggcgcggacgcccaccggttcttcaccgacagcgcggcgctggcgccgaactggtgcaaccgggtgaccctgcgtagcgccgagctggcgcgggagaacgagccaggcattcacatggcgcggatcagccccacgccgctgctgatgatcgtcgccgaccgggacctgctcacgcccacggacctttgcctggaggcctaccagcgggcattgccgcccaagcggctgctgatgctcgccggcggccatttcacgccgtacatcgagcatttcgacgccaccagccaggctgcggcagactggttcgtccgtcatctcggagagggcggcgagcagccagcgacagtcgtcgaataa

SEQ ID NO: 352288 - DNA, 2190 bp, Pseudomonas aeruginosa
gtggagcatgtgctgctctacatgcacaagcaggacgttcttacgctgaaccacggaatgacagtcatgcgccgggcgatgactgtggaaatcaaccctgagaagaaatcgggctatctcaaggacgactacctgaagctcgatgagcactaccgagagaagcgcattcaggtgcacgtgatgcgcgagtacgcggaagtcgcctgtgaagaaatggctgcagcgctgcgcctggtgatgcactacttcaacgacccgaaagacgagttcatcgagcgctactttgccggtcgtgaagaggttttgaagctggccaccagtgaagagtcttggcgtgcgatcgttgaaaatctaagcgttgcacagcgcgtcatcgtcgaggacaacgaagaccagaaccgccttgtgctcgcaggcccaggctccggaaagacccgggtgatcgtgcatcgtattgcctaccttctgcgggtacggcgggtacccgcgcgatgcatcgtcgcgctcaccttcaaccgacatgcagctaacgagatcaagcaacgccttctccgattggtgggcgctgacgcctatggcgtgaacgtcatgacctaccatcgcatggcaatgcgactcaccggcactcgtttcgagcgcggtgaaaccgtggaagaagggcgcctatcactcgtgctctcggacgcagtagagctcctcgaaggtaagcgccaggttgaaggtgaagacgacctgcgtgagcaattgcttcgcggctaccgctatattttggtcgacgagtatcaggatattgacgacgtccagtatcggttgattagtgcgttggctggccgcaaggctgaggaggagggaaggctttgcatcctggcagtaggtgatgatgaccaaaacatctatgcctggcgcgacaccagcaatcgcttcatcgagcagttccgcgaagactactcagcgtccagcagctacctcgtcgataactatcgttcgagtcgcaacatcatcgaagccgcaaaccaggtgattgagcgaaaccctcaccgcctcaagagccaacatccgatcaagattgacgtgaagcggactgagagtccgcgcggcggtctttgggaagagaaagaccccgcgcggagaggacaggtcctccggctactcatcgcaggcgacgaatccaagtacaacaacctccaagctcaagctgcaactgcagagctacaacgtttgatcggcgtcgagtccggtgaatggcagggttgtgccgtacttgcccgcaaccaccaatacctctggccgattcaagcatggtgcgaacaacacggggtgccgtactacctggcagcagataaagatggcgtactgcctatcaccgctcagaggggctttgttgcggtaattgaatacctgcgtgcctcaggcgagtcgttgtcacctgcgcactggtggcgtcgactagatcaaacgtccttgcagccggaatggcacaccttcatgagccaggcctttgctgagctgctagccgaactaggagattgcgagctggggagccaagcggttgtcgactggctgtacgactacgctcgcgaactgcgacagcagcctgctcaaggtctctacctgggcaccgtgcactcggccaaaggcttggagttccggcacgtcgttctcctcgacggcggttggagcaatcgctctgacacgcttagcgatgagcgcaggctctactacgttggtatgacccgggctgagcagaccctgaccgtgtgcgagtttgctgctggcaatcccttcagccgacacctcagcaacgcagcgacgagcaaagtcttccacggcgaaccgctgccggcgcttgaaaaacgctatctacagctctcgctcaaagacatcgacctcgatttcgctggacgccaaccagcggaggctagcattcacagagcgctcgccaacctcaatcctggcgatcggctccagctcaaacccagcgacggccgttatctaattctcaacgacaacggtgaagtcgtgggccgcaccgccaaatctttccatctgtcccttgagtgcgaaagttgccgggttgcggcagttctagggcgccggtcagatagctgcgaagagagttaccaggtcactcatagaatcgatcaatgggaattggttgtgccgcagttaatcagctctttgacgacttga

SEQ ID NO: 352289 - DNA, 1437 bp, Pseudomonas aeruginosa
atgaagcggttcatcgaaggtgaggctcggacgcaggtcacattgctgccagagtgcctggatgactacatcaccgatgaaaacccagtgcgagtggtcgatgtctttgtcgatgaactcgacctgagcgcgctcggtttcgcaggcgtcgatccggcagcaacaggtcgcccggcctaccatccagcggtcctgctgaagatctacatctacggctacctaaaccgcattcagtccagccgccggctcgagcgtgaagctgaacgcaatgtcgagttgatgtggcttacggggcgtctggctccagatttcaaaaccatcgccgactttcgcaaggacaacggtaaagccattcgcagtgtctgccgtcagttcgtgatcctctgtcgcaacctcaacctgttctctgactcaatcattgccatcgacggcagcaagttcaaagccgtgaacaatcgcgaccgtaacttcacccaggctaaggtgaaggcccgtatgcagcaagtcgagcagagcattgagcgctatctgacagcgatggattcggcggaccgggcaatgccggaggtagctgtggccaaggccgagcgactgaaagagaagatcgaaacgctgaaacagcagatgcagaagctcaaagacattgaaacgcagctacttcaaaccccagacaaacaaatttctctcacagatcccgatgctcgctccatgtcagttggtggtcggggcagtggcaccgttggctataacgtgcagacggccgttgacgatcagcaccatctgatcgttgcacatgaggtgacgaatgtcggtcatgatcgcggccagttgagcaacatggcgaagcaagcgcgtgaccaaatcggtactgaatcgctgaatgtcgttgccgaccggggctactacacaggcacggagatcgttgcatgtgagcaagctggaatctcgcccttcgtaccgaaaccactgacctctagcagcaaagccgaaggtcgatttggcaagcaggatttcctgtacgtctcggcatcggatgagtatcgatgccctgcggagcaattactgaccaagcgttactcaacttgggaagacgggatgctgatgcatgtttattggttctcgggctgccagtcctgcgcgatgcacaaacaatgtacgacgggcaaggagcggcggttgaaacgctgggaacatgaagcgaccctcgactcgatgcaggttcaactggagcacgatcctgggaaaatgaaggtgcgccgtcaaaccgttgagcatccatttggaacgctcaagtactggatgggggcgacccacttcctgaccaggaccctgccaagggtcagtactgaaatgagcctccatgtgctcgcttacaacctcaagcgaatgatgagcatcttgggcatcagggggctgctcgaagcgctcaaaaggtga

SEQ ID NO: 352290 - DNA, 297 bp, Pseudomonas aeruginosa
atggtcaagggctttgcgacgcatagaaatttcgtctttggcctcacccatttcagcgaaggtttggatgtgtccattcggaacgaaaacgcagtcccactggaagccccttgggccaaccggcgcaggtggcactgttccttcaatggaaccttcgaacaggcgaatctcgcgcccatcacaatagccgagtaccgtcttcgccattacagtcgtatctccgaggcccgcgacgaggttgacgaagcgatccgcctccagcttgtcccaaaagatttgagtcaatcctgccggtaa

SEQ ID NO: 352291 - DNA, 936 bp, Pseudomonas aeruginosa
gtgcacttcaatggagcgattcccacacctataattcgagagattctagccgacgaagcaaccgagctgccgcccgggtttctgatcgagcgtgacctgcttcgaaacactccctgccagtccttggcgtcatacttaactccgtggcaggcactgaggctctttcccaagaagcgcgagaacctggatcgcatttccagtgcagtcttcgctggcttcgtggagaacggaatacgctttgtcgaactacgaagcagcgtcttgtacctcgcccatctgcagaattgttcgcccacacaagcgctagaacatctgatcgaatcaaccagacacgccgcgcattgccacggcattcatcgcggtctgattcttacagtgacgcgcggcgactacggtgcggtttgcctttccacactactacaggcctatcaagacctcggtgagccgaaagacgtggtggggctcgatcttgcgggtgatgaggaaatcgcctatccatcggagttgccgtcactcttccgaaaggcaaaagatcgattcggactcggggtcaccatacatgccggagaaaccggccgcgtggaaaacgttcgggctgctgttgagttatttggtgccgatcgtattggccatgggacagcagcaggtaaggatcctcacctgctagacaaattgggaaagcaggacatctgcatcgaggtatgcccgattagcaacagactaaccggcgcggtacctttcgatgaagcccatcctcttcaagaatttcggcgctttggggttccgtttgttatctgctcagacaaccctgcaattcatcagcgcggtcttgtggatgaccaaacgatcgcgctggatgagggccttaccgccagcgacctggaccagcagtacgaagcagctaagcgctactcattcataagggatctagattga

SEQ ID NO: 352292 - DNA, 633 bp, Pseudomonas aeruginosa
gtgactccgcagagctgcagggtttgctcgctctttacgggagggcgcccaatgtcgattgatccgtcccgcttccaccccatcaacgtgacagatacgtgttcggtctggaatctcttatcttcagtcacgttgtacagagctgcgctcgccgctcaatgccacttctgtgtcaccggtttcgtgaactatgagtgtttaatcaagcctcgcacgttgccaaccgctgtcacccgtgagcttcaacatcgattggaagaggcgcgttgcgccggccagttcgaaatccattcctgtaacctggacgaccttcagatcatcagtatgctggaaggccgtaagcgactgggtaagggcgaactgtcatcaatcgccttcgctatgggccgcggcctagctgtgctaacggatgaccaaggggcaaggaagctatcatcggcagcaggtaaccaccctacgcagacgactcctcacctgcacagctggctgatctttacaaggaagcttgatgactcagaccactcgaatgtgctgagccaacaccgtcaaatggaaggcagcctggcgcgtcatctccaggatgcgtatttcctagcgcttcaatgcgctcgcaacgcattacctccaacttag

SEQ ID NO: 352293 - DNA, 507 bp, Pseudomonas aeruginosa
ttggagaagggacagtatctccgctgcccaattcccttcccagatattcccatcacaggcaaggcgaagatcaaagctaccttctgcatccaagcgcacaccgacccggagcacaccatcaactacacacgcgcaggaatgggcgtggtgtttcgccccaaggccggtgcaggcatcgaaacaagcaaagacttctttggccgcggctctcagtacaagatgacggaaaggcagttccgggacgatgcgcacaagtgggaaacctgtctgcaccgagacaggaacttcgacggcgaggactctctgatcggtccggtcttcgacatcgaataccacgcgcgcgagagcagccgtggcgtcccgccaaagtcagcaccggacgtcaattacgctctgattgtgagcgttcaggctgacgatatcccggacatctacaacctgatcaggcagaagtatcaaatccttcaaccagtcgaagtcaccgtagaaaccacaattacgatttga

SEQ ID NO: 352294 - DNA, 630 bp, Pseudomonas aeruginosa
  misc_feature (603)..(603): n is a, c, g, or t
atgcctggtgctccacggacgctccggcgccggcaagagcaccctgctgcgcacgctctacggcaactacctgccggccggaggcagcatccgcctgcgccacgccggcgactggctggaactggtcggcgccgagcctcgcgaggtgctcgccgtgcgtcgccagaccctcggctacgtcagccagttcctgcgggtgatcccgcgggtggcgaccctcgacgtggtcatggagccggccctggcccgtggctggagccgcgacagcgccgaactgcgggcgcgcagcctgctggcccggctgaacatcccggaacgcctctggcaactggcgccgggtaccttttccggcggcgagcagcaacgcgtcaacattgcccgcggcttcatggtcgagtggccgatcctgctgctcgacgagccgaccgcgtccctcgacgaagccaaccgccaggtagtgctggagctgatcggcgaagccaaggccgctggcgccgcgttgatcggcatcttccacgaccgcgccgcccgcgaggcggtggccagccgctacctggacatgagccaggagctttcccgtcaggagcaagcccatgtcgtctnaacgcgttctcagcaatgcccgggtag

SEQ ID NO: 352295 - DNA, 2799 bp, Pseudomonas aeruginosa
atgtataaatccgaggcacagacacgagccgatttgattgacctgcaactcgcgttatcaggctggaacgtcaaagaccccacccaggttgtcgaggaattcgacatcctcactgcgctaacagagggtgtggccgaaccacgcaccccatatcagggccatcagttcagcgactacgtcttgctgggtaaagacggtaagccactggccgtgatcgaggccaaaaaaaccctccgagatgccgcgcttggccgcgagcaagccaagcagtactgctacaacattcagaagcaactgggcagcgaactgccattctgcttctacaccaacggcctcgaaacttttttctgggatctggagaatgcaccgccccgcaaggtcgttggtttccccacgcgcgacgatctggagcgctttgcctacattcgtcgcaatcgtaagccgttgacgcaggagttcatcaacacctcgattgcggggcgcgattaccagattcgtgcgattcgttcagtgctcgaaggcatcgagcagaaaaagcgcgacttcctgctggtgatggccacaggcaccggcaaaacgcgcacctgcattgccatggtcgatgcgctgatgcgtgcaggccatgccgagaaggtactgttcctggttgaccgcattgccctgcgcgagcaggccttggccgcgttcaaggaacatctgcccaacgagcctcgctggcccaacgtgggtgaaaagctcattgccaaggatcgccgtatctatgtagcgacctatccaacgatgctcaatatcatccgtgatgaagtccagagcctgtcaccgcacttcttcgactttatcgtcgtggacgaaagccatcggtccatctacaacacctacggcgaaatcctcgattacttcaaaaccatcaccctcggtctgacggcgacgccgaccgacatcatcgaccacaacacattccaactcttccactgcgaagacggtttgcctacctttgcctataccttcgaagaggccgtcaaccgcgtgccgccttatctctgcaacttccaggtcatgaaaatccagacccggttccagatggaaggcatcagcaagcgcaccatttcattggaagaccagaaaaagctaatcctgcagggcaaggacatcgaagagatcaacttcgaaggcacccagcttgaaaagcaggtcatcaacaagggcaccaacaccctgatcgtcagggagttcatggaggagtgcatcaaggacggcaacggcgtgctgcccggcaagacgatcttcttctgctcctccaaggcccacgcccgccgcatcgaggaaatcttcgacaagctttatccgcaataccatggtgaactggccaaggtgctggtctcggatgacccccgcgtctacggcaagggcggcctgctcgatcagttcaccaacaacgacatgccacgcattgccatcagcgtggatatgctcgataccggcatcgacgtgcgcgaaatcgtcaatctggtctttgccaaaccggtgtattcctacactaagttctggcagatgatcggtcgcggcacccgcctgctggaagccagcaagcccaagccctggtgtaccgagaaagatgttttcctgattctcgattgctgggacaacttcgaatacttcaagctgcaacccaagggcaaggaactcaaaccccagctaccgctacccgtgcgcttggtgggcctgcgcctcgacaagatcgataaggccattgccatcagccaaattgatatcactgagcgcgaggtggccaaactgcgccagcagatcgcgacactgcccaaagactccgtggtgatcaaggatgctgctgtcgcactggcccgactggacgaagagaacttctggatcaacctcacgccccagaagctggaatttctgcgcgctgaaatcaagccgttgtttcgtaccgtctcggaagccgacttcaaggccatgcgtttcgagcgcgacgtgctcgaatactcgctggccgtactcaatgacgacaaagagcaggccgacacgctcaaagagggcatcgtcgagcagatcggcgaattgccgctctcggtcagcttcgtcaagcaagaagaagccttgatccgaaccgcgcaggccagccattactgggccacggccgacgaagagacctttgatgagttggtggccaagctcggcccgctgatgaaattccgcgagcagatggccagcccaggtccggtgcatctggatctcaccgacatactgcacaacaaggaacgggtcgagttcggcccccagcacgaagcggtgagcatcagccgttaccgggaaatggttgaagcgctgattaccgaactcactgagcacaacccagtgctgcagaagatcaagaatggcgaaacggtgagtacagacgaggccaaccaactggctgaactgctgcatgaagaacatccgcacatcactgaagacctgctgcgccaggtctacaagaaccgcaaggcgcgcttcatccagttcatccgccacatcctgggcatcgaagtcctgcagagcttccctgacgaagtcagcgcagcgttcgaccagttcattcgggcccacaccaccttgtccagccgccagatggagttcctcaatctgttgaagaacttcatcatcgagcgcgaaaaggtggagagaagagacctgatcaacgcccccttcacggtcatccacccgcaaggcatccgtggtgtgttcagcccggcagaaatcaacgaaatcctgctgctgaccgagcggttggcggcttaa

SEQ ID NO: 352296 - DNA, 282 bp, Pseudomonas aeruginosa; identical to SEQ ID NO: 341519

SEQ ID NO: 352297 - DNA, 240 bp, Pseudomonas aeruginosa
atggtggcggtgagtgatcgactcacagaatggctgcagactgtggtggaagacgaaggtatcactgatgatcagaagaaccgtttagccgagttctacccgagcaatgatgttgggcttgacgtaaacgactatgaagacatcaaaaaatgggtgttcgaggcgctggcggctggcgccctgacgcaggggggcaataaagtcggcaaccgcatcgaactcaaggctgttcagtcatga

SEQ ID NO: 352298 - DNA, 1065 bp, Pseudomonas aeruginosa
atgttgttctcgtatacctatgtgccgcatcagatggagaagatgcaggtgttcattgacttcatttttcatgaggtctggtgcaaagcaccgattggcttggtcttccatccggatctttttgacggcaacccggaactcaaggaggtcatgggcgagttcggtttttccgcgcaagcggcagagcgaggaaagacgttttacaaagatgtgaaggcaatctacgatcttttcgcatcactctctccgcgagagattgaccagttcaagctgtggtatcagggcaataacgatctggaaaaagtctgcgccaatgatccggtaacgcacctcgcccgttacgccgacatcgccgtcaatcacaaagaccttgcagctcaactcggtatcttcttcaagggactgtattcgcaatcgcttctgggtctcgctgcactgcgcgccaagatcggtgatatcgacgatcactatcaggccttcgtgtccaccaacaaaacggggaagtgtccgttctgcggcataggcgatatcaagggtgagaatcacagtaaacgcgaagcctacgaccactatctgccgaaagcgctatatccattcaattccatcaactttcgcaatctcgcacccgcctgccacgagtgcaatagcacctacaagctgagcaaagaccccgcacacaatgcagttggacggcgcaaggccttctatccgtatgccgctgtcagccacaccgttgaattgcaggttgctttgctgcatgcagacctcgataaattggggcctgccgacgtcacaattcaactcggtcctgcggcgttggctgaagaactcgacacatggaaggacgcatacgggattgaagaacgctataaagccaagttctgcgcggagaacgacggcaaatactggctgacgcaggtgctggacgagtggaaagagggcggtcgagacccctccgatttcatggccacgctagcgcgacaggtgaagaataacccgtacggtggttgcaacttcctcaaaaagccgtttctcgatgcttgccagcagattggtgctttttga

SEQ ID NO: 352299 - DNA, 5268 bp, Pseudomonas aeruginosa
atggatgttttctcactcagaagccagttgatcgaggactatagccagttcgcgagttctttcacttccattcgggcggaagatatccgctcgggcgttcatgcggcctatgacggcggccgttactggccggagccgttgatacagatcaatccgcgctatcgccaggggcgttcgacacaacagcttgccgccacgaacgaattgctggcggcaacggccgccctatttcccattgacctctacacccaccaggaacaggcgatcgcgttctccgcccgaggcgagagttacgtagtgaccacgggaaccggctcgggcaaatcgttgtgcttcttcatcccgatcgtagatgcggtgctgcgcgccaaggcccacgacagcatgcccagaacgcgcgccatcgtgatctacccaatgaacgctctggccaacagtcagcgcgaagagctgatcaagttcgtaggcaacgatgggccggtaaccttcgcgcgctataccggccaggaaagcaaggaggagcgggatcggattcgggataacccgccggacattctgctgaccaacttcatgatgttggaaatgctcatgactcggcagaacgagaccgacagccgggtgatcgccaactgcgccggcctgcagtttctggtgctggatgaattgcatacctatcgcggacggcaaggcgccgacgtggccatgttggtgaggcgcgttcgagaacggctggcaccggagtacctgcagtgcatcggcacgtccgccacgatggcttcgggcggcagtcaggaagatcgcaaccaaaaagtcgcttccgttgcctccacgttgtttgcaacccagatatcacccttcaatgtcgtcaccgaagatctggaacgggctacagagccatccgagactgccgactcggtcagatcgcaactgggcgccgccatcgacgcgggcgtttccacgcatgccgatgatgccacgttgcgacaacatcctttggcgatctgggtggaaacacgccttggcatcacgcgcgaacagggagggaaatgggttcgtgctaatcccctgacctttgccaaggccaccgagcgcctggccgaagagtcgggaagggatgaagtgattgcgggtgccatgctgcgcgccatgttgctgctggcagcccaacccgaaaagagtcgtcgtcccgatgggcacggcagcgaaaaagccttcttcgcctttcgtctccaccagttcatcagcggtgctggcgtcgtgttcacgaccctcgatgctccggggacacgccccgttgagttggagggacagcagttcctgcccggagatgagcaaaaacggttgtactccacgcacttctgccgggattgtgggcaggagtaccacccggtcaggatgcgtcgggacgatgccggttgggaggtgctagcccgcgacattgacgacatgccaaaaatgcgggacgacgacacggacgcctccgaagtcgaagaggatgccattggcgaacggctgggcttcctgctgcccctgaacgccaacgatcccatcgaatttaccggcaaggtagaggactatccggagtcctggatcgagatcacgcgacatggtgaggtgaggttcaagcgcacccatcagcgcctggaggcggaacaactctcgattcaaggcaatggcagggttgggcgaggccaggaggcctggttcttgcccggcaagtttcgttactgcttgcgttgccgcacggtgcatggcgcccagggcaaggacagcaatcgtctttcggcgctgtctgcggaagggcgaagctcggcgacgacgctgctgaccaccagtgcgctgcgctggatgcacggtcagccatccattggctcggacaagcgaaaactgcttggcttcaccgacaaccgccaggatgcagcgctccaggcgggccatttcaatgatttcaccttcgtcagtctgttgcgcggcgcgatctatcgggcgttggtacaagccggcacggcgggtttgggcgacagtggactgggtgcggcagtgcgcgcggccttgggcttcgatcagccactgagcacgacggaaaccccggaagaaagccaccggggggagtggatgcaggaaccgcaatcggtcggtcggaacctggccgatgcggaggaggccttgcgcttcgtgctcgcgtaccgcgcctggttcgatcagcgtcgtggttggcgctacaccaatccgaacctggaagaactggggttgctggaggcggactactccggcctgcaggcattttgcaatgaggcggtgcgtttcgacaaagcgcctgacctgctgcgaaacgcgacgccactggcgcgtgaaaaagccttccgttgcctcttcgactacatgcgcaaagggctggcggtggatgccgccgccctcgatcccaacctgttgcagcagcgtaaggacgaagccttgcgcttgctgcgcaacccatggggcatcggccgggaagagcgcctgctcggttggcgctggctgttccttcagcctcccaatgcgaatgcattgcgcggcaaggatgaagaactggtgctgcgcggcggactgcagacggccctgggaaagagcctgcgtagctcgactatatgggagcagccggcggcggccaacctgcgacgtgccgactatcaggccttgctgaacgccatgatccgcgccgcacaagagggcggattcattcgcagggatgaacacactctgttcaacgtaccgggctttcggctcaatgccggccgggtgcgattccatctgggcaatgcatccggcacccggccgaacgcgttcttcaaacagcaataccaagcgatcgccgcgatgcttgggcaacgggatcgtttcctgttcgggctggaggcacgcgaacataccgctcaggtcgatggtgaactgcgtgcgctgcgcgaaagccgctttcgcttcggcaacagcgagcgggaagcattgaccgacggcgaactgcacgatattgcccacaagcagggcgagcccacgcgcttcctgcccctgatgttctgctcaccgaccatggaactgggcgtggatatctcggcgctgaatgccgtgtacctgcggaacgtgccacccacgcccgccaactatgtacagcgcgccggccgtgccggtcgcagtggtcaggcggcgctggtggtgacctactgcgccgcgcgcagcccgcatgaccagtatttcttccgtgaccccaccgccatggtgcatggcgtggtcaaggcgccgctgctggatctggccaaccaggatctgatccagagccatctacaggctgtctggctggccgccagccgcaaggagctcgacagctcgatttccaacatcgtcgatcccggcgtaccgcaactgcccgtgcgagcgcacatcgtcgaagccttgggtcaggagggggtgacggccgaagcgacccggcaagccatcaacgtgctgcacatggtggaggaacacctgacgcccgaacgcgctccgtggttcaccgattgccaggcctatgcccaggcggccattgcatcggcaccggaggccttccatcgtgcgttcaatcgctggcgggatctattcacgtcggcggagcggcaaaagcgcctggccaacgaaaccttgaacaactacgccatcaccgataagcgcgagcgcgacgatgccaagcgccgttggcggcaggcctccgatcagatcgagctgctcctgcacggccgcgactccttctccagcgatttttacacctaccgctatttggccaccgagggcttcctcccaggctacaacttcccgcggctgccgctgatggcctacgtacccggtcgtgccgatgtgcggggtggcaataccttcctgcagcgcccgcgctttctggcgctttccgagttcggaccgcgcagcctggtgtatcacgaaggccgcgcctacagggtggttcgcgctcgcattgccttgtcatctgatgatcccggcagtgccggtggcacgcttagcacccagtcggtacgcatctgctcgaactgcggcgccgcgcacttcgagtcccattggaacgactgccacgcctgcgaccaatcgctgttggatgcgctgaagatcaacagcctgtatcgcatcgacaacgtcgatactgagcccaccgagcgcattaccgccaacgacgaggagcgccagcgccaggccttcgagcttcagaccaccttccgctgggcgatccgcaatcgccgcatcgacgtgcgcaccgtgttggccagagacagcgaaggcgagatatgtaccctgcgctacggtgccggtgccaccattacccgcatcaacaaggggttgcgccggcgtcggcaaccgaatgacttcggcttcttcatcaactcccggacggggtggtgggaaggagaggagcgtcgttcggccaacaccgccaacgaaggggatcgcctgccaccgcaacgcgttgttccctatgtccaggatcacaagaacgccctgctgctgcaaccttgcggcgcctgggatgaacagaccttcgtcaccctgcagcatgcgctcaagcgtggcattgaagcagccttccagctcgaagaggctgagttgctggccgaggccttgcccgatctccaccaccgcaatggcgtgctgttctatgaagcgaccgaaggcggcgcaggcgtgcttacccggctggtcaacgatccattggcgctgcaacaggcggcgcgctacgcgttgcgcatcatgcactacgacgtaccggtcgacggtggacaatggccgacgttcgagagccgccaggaacagccggacactcgctgcgtcgcggggtgctaccgttgcctgttgtcctattacaaccagcccgatcacgaactgatcgatcgccgcgacgcagaagcggttcacattctctggcgcctggcacaggtcgaatccatggcccagcagcaagaggccgaacctttactgcccctcgaaccggaagcctcgtcaggctgggcaggccagtggcgacaggcggcggctacgcacctgccggatggtcagcccccggcaagcgtggatatcgaaggtctgaccttgttgcactggcccgaccactacgccgccatcgccctgcccgataccccgcgcgacttgcaggctgcctgggaagatcgcggctatacctttatccgtttccctgccgacaccgacgcctggccgatgctgttccagcgcctgggtcgtctgctggggctatga

SEQ ID NO: 352300 - DNA, 2811 bp, Pseudomonas aeruginosa
atgagaaccatcgagatgtccattcctcaatacaccccgggttcgctgatccatgcgcgcgggcgcgaatggatcgtgcagccaggcagcgttcctccgttgttacgtttgcggcccttgtccggcaccgaagaagagggcgcactgatccacatcgatctggaacctggcatcgaatccgctcacttcccaccacccgatccctcgctggagggcagtcagggcgaagccatcctgctctccgatgcgctgcgcatggcgctgcgtcgcggtgccggccctttccgcagcttcggcaacatcgcggtggagccgcgtacctatcaactggtgccgctgttgatggcgttgcgtcttgatccggtgcgcctgttgatcgccgacgacgtggggatcggtaagaccatcgaagccgccctgatcgcacgcgaactgcaggatcgcggcgagatccagcgtatggccatcttgtgtccgccgcaccttgtcgaacagtgggtgcgcgaactcaacgaccgctttcacctgcacgcgattgctgtcaccgcgaccagtgcggcccgattggagcgaggcatcccggtcggtgaatcgttgtttcaggtgcatccggtcaccgtcgtcagcctcgactacatcaagtccgagcgccatcgtcacgacttcatccgcgcctgcccggaattcgtcatcgtcgacgaagcccacacctgcgtcagcgcgggccagggccggcagctgcgcttcgagctgctgcgtgcgttggcagccaacgaagcacgccacctggttctgctcaccgccactcctcacagcggcgaccaggacacgttctacagcttgctggggctgttgaagccggagttcgctgcgctggcgacagccagcggcgataccaaggaacggctgcgcgatcagttggcattgcatttcgtgcagcggcgccgacccgacatcgacgaatggcaggacggcagcatcttcccccagcgcgaaacggccgagctgacctatcgccttggtggcctgtgggaaaacttctttcaggacgtgctcgactactgccgtgaagtggtgcaacgcgccggtggggacgagcggagtcagcgcctcagcttctggggcacgctggcgctgatgcgctgcgtcgccagcagcccggcggcggccgtacaggccctgcgcacccgcctgctggccgagcaggtggaacaggcgcctgaagagatcctcggcccgttgttcgatggcacggaagatgccctgagcgaagacgatttggtgccagctgctgacatcggcgatcctgccctgctcgacctgttgaacaaggccgagacgctggccggcgaagagagcgatcccaaactgcgcctgctctgcagccatctcaaacagcttatcgacgatggcttcaatcccgtggtgttctgccgctacatcgccaccgcccgctacctgcatgaccatctggcgggcagattccgaggcgtcaccgtggacgtggtgacgggtgaatttccggccgcagagcgggagcgccgtgtcgatgccctgggcgaagccgagcgtcgcctgctgatcgctaccgactgcctgtccgaaggcatcaacctgcaggaaaacctcgatgccgtggttcattacgacctgtcctggaaccccacgcgtcatgagcagcgcgaaggtcgggtagatcgcttcggtcagaccagccccaaggtgcgcgccaccctgatctatggcgccaataacccggtggacggtgccgtgctgcaggtcattttgcgcaaggcggaaaagatccgccaggaactgggcgtgccggtgccactgcccgacgacgaccatacccttactcaggcgctgatgaaggccgtgatgctgcgcagcgagcgcgcaggcggcccacaacgctcctttgatttcgatcaatacccagaaagccgggcactcgacgttcgctggaccgacctggccgaaaaagccaagaagaaccgcaccgtctttgcccagcgccgcttgcggcctgctgacgtactgccggagtgggagcgcatgcgtgccgtgcttggtagcagcgatgacgtcaagcgttttgccacccaagccatggcgcgcctgggggcaggattgtcgctgcgcgcccgcggagctaccgcgcccatcagcgccttgcctgcagcattgcgcgagcggcttgcagccgaaggcgtggacggcgatttgcgcatcgacttcaaccagcccccggcgtcgcgctgccgcttcatccaccgtagccatccgctgatcgccaccctggccgacgaactgctggagcgttccttgatggcggcaacccatgacggccagcaactggccacgctgggccggatcggcgtctggcgcagcccggcggtgcagagtgtcacctcggtgctgttgctgcgcctgcggcaccagatcagcaccacccgggagggctgcaaccagaccttgctggtcgaagaagccttgcccgtggcctggcagggtcgtaccgatccggtcgagatccagggcgatcaattgctcgcctggctggaggcgccagcccaaggcaacctgccggacgtggtgcgtcagcgcgaaatgcacaacctgctggagacgttgcagcagcgccaggagcaactggaacacctcgccgatgcccaggccgaaagactgctggcagatcaccggcgcgtgcgcgaagccgccgatgcccggggccgctatgaagtacgcgcgctcaagccggtggacgtcattgccgcctatgtcctgatgcctggaggtgctgcatga

SEQ ID NO: 352301 - DNA, 4896 bp, Pseudomonas aeruginosa
atgagccgtcgcaaggatgccgtgctgcagttcgatgcgatcgccatcgaaggtggactgctgccggcggagtggctggccaaggtggccgccctgcaggctccgcaccaggccccaacggactatggggtgcccaagggcctgaatctgcgcgacgaactggggcgctactggcgtattgccgaagcgcactggaacgatttcgccgccacccgcgcgggtgcaagcgatgcccaggcattgacacaacgcttcgtcactcagctgctgcgcgaagtgttcggcgttaccgatatcgttgccggcgtcgagccgcaaatcctggatgagcgcagctatccactcacggccaccgcttgcgatggccggttgccgctggtggttgctccctgcgaccagcgtctggaggagcgtgatcgccacttgggcgatggcgggcgccagcgcagcgccttcgggctgttgcaggactatctcaatgcggccgacaccaccttgtggggcatcgcgagcaatggcctgtcgctgcgggtggcgcgcgacaatgccagcctgactcgcccggcctggatcgaagccgatctggagcgcatctttactgagcagcgcttcgccgacttctcactgttgtggctgctggtccacgccagccgcttcggccaaggccagcaactgccacaacaatgcgcactggaagcctggtacgccgccagccgcgagcagggcacccgtgcccgtgaaaaactgcgcatcggtgtggaggatgcgctcaagaccctgggccaaggcttcctgtccgaagccggcaatggcgccttgcgtcagcgcctggcgagcggcgaactcacgcccgacgattacttccagcaactactgcgtctggtctaccggctcatcttcctgctgaccatcgaggagcgtggtctgctgcacccggatcacgccgaccctgaagccattcgtctgtatcaggacggctacagcctgcgtcgtctgcgtgaacgcacccgccgccgccgcacctgggatcgccataccgacctctggcagggactcaaaccggtgtttgcagggctggccagcgggcagccgctgttggcgctgccggcgctgggtggcctgttcgcgaccgatcaatgccctgatttggatcacgcagacctgggcaacaataccctgctggccgcgactcaccggctggcctggatacctgacggcggcagcctcacccgcatcaactggcgtgacatggggccggaagagctgggcagcgtctatgaaagcctgttggaactggtgccccaggtcgctcaggatggccgcgtgttccgctttgccaatgccgagcaaagccagggcaatgcccgcaagaccagcggcagttactacacgcccgatcccctggtacaggagctgctgaattccgcgctggaaccggtcattcgccagcgcatagcgggtgccagcgacccgcaggccgcactgctgtcgatcaccgtttgtgacccggcctgcggtagcggccacttcctgcttgccgccgccaggcgactggccaatcacctggcgcagttgcgcgcccagggcacgccaagcggcgacgactaccgtcaggcgctgcgcgacgtcatcggccactgtatctacggtgtggatctgaacccgctggcgctggaactggcgcgcatgtccctgtggttggaagccatgacgcccgacaagcccctgggctttctcgatcaccatctgcaatgcggtgatgccctgttgggcgtactcgatcccgccatcctcgaccgaggtctgccggatgccgccttcactcccctgagcggcgacgacaagaccctggtcaccgccctgaagaaacagaacaagcgggaacgggagagctggcagcgcgctctgcaaagcggcgacctgttccgcgaggagcaactggccgcccgcactggcgcgctggaacaactgaccgatgacgatctgggccaggtagccgccaagcaggctcgctggcagcaggcccgcgcggccgcccggcagagccgcttggcacggctggccgacctctacttgggcgctttcctgctgcctaaggcagcgggtcagctactgcccagttcccgccacttgtgggcggtggcccacaacgaagccgagcctaccctcgacgaagcggaaactgctgcccgccatgcctgcgctcaagctcgggtgctgcactggtggctggcctttcctcatatcgctgagcaaggcggtttcagcgtgatgctgggcaatccgccgtgggaggtatcgcagctgggtgaagaggagttctttgcagccagagcccccgaaatcgcatcactgtcgggtgagcatagaaagcgtgccatcgcggctctggaacaagaacatccccgtttgtggcaggactatcaggaggaaaagcgccgctttgatgcgagcaatcttttctaccgcgccagcagtcgctacccgctgacagcggttggcaaaatcaatacctatcgattgtttgccgaggcttttctgcaaggtacggtgtcacacggcaacgcaggaattatcgtgccaacgggtattgccactgacgatacggccaaggatttttttggccatgtggcaggttcgggcaggctggtcaacctgtttgacttcgagaacagtgaaggggtcttccccggtgtgcatcgcagctacaagttctgcctgctgaccttgggccaagcagagatcgcgcgtttcgtgtgcttcgccactcaggtcagccacttggccgatacccgccgccacttcaccctgacaccgcaggaatttgcgctgatcaaccccaatactcgcacctgcccggtcttccgcagccaacgcgacgcagagttgaccaaaaagctctatcgccaggcaccggtactgattcgcgaggcggtcaagaatgcagcaggagaaatcatcgaaccagaagcgaacccttggggacttcgtttctcgcagggactcttcaacatgaccagtgacagcgcgctgttcattgctccagagcctccgctattgcccttgtacgaagctaagctgatccaccaattcaatcaccgatgggcgacgttcatcccgactgccggcaccgcctccgcagactggccaagccgggacagcaccggggaagaatatgtcgaccccgcgtatacgccgataacacgctattgcgtaaaccagaaggaagtgctggcgcagattgcccgggtgcctcgcgcgatcagcaaggcttggttggccggctaccaagccaattccccagacgcacgacgcaacgcgatggatgccttgtggctggcactggcccagtggattgccggcgagctctttcgccgtgacgcaggtaacgccgcacctgacggcagctatagcgacgcgcggaaactgaatgctacaccgcgtgtggaacgttccttggcgagtgattaccccgcctgcgccgctgctctgcgtgataacagaatcactggcaaaaaggccatcaccgagttcgccaaatgggctcagcaggacagagaccactccctgtccgacgacaaactcgccatcttgcaacgcttcgccgcacaaactgccagtgaagcccgtgacagtgccctgtacaccgaactcgatgagtggatggaccaccgcagtccacgctggctgatgggttggcgggatatttgccgtaccacggacgaacgtaccgttatcgcgtcggtgatcccgagagctggggtagggcacaccatgccattgtggctatcgcacgaatcacccagaaaacaagcggccttgcttggatgtttgaattcgctcgtcctcgattacgttgcgcggcaaaaagttgggggaacacatctcacctatggctacatcaagcagcttcctgtgttgcctcccgatagctataccgaaaccgatctggcctttatcgtcccgcgggtactggaactgacctataccgcccacgacctggccgactgggctgccgaccttggctataccgatccacctttcccttggcgccccgaacgccgtgcccatctgcgtgccgaactcgatgcctgctacgccagactctacggcctgaccgaggaagaactgcgttacattctcgatccggccgacgtggccggcgaagactatcccagcgagactttccgtgtgctccgaaacaatgagctgcgggatttcggggcttacagggagacgtcagccgcactccttcgattggccagtgtcgatggtgaaacccgtcgcgatcacgcgcagtaccgcacccagcatctggtgttggaagccttcaagcgaggtttccaggtagaagacgcattgcctgctcatgctgaagctaaggctcagcaggtcgtcgatcgagcatccctgcctgatggaatctgggcacgaccacaacaggatgaaggtgcggagacaggggtggccctggccgccttgctcaaggttgccgagaccccatggccagtgcgccatgtacgcctcgccgccgtcctggcgcttgagccaaggctgatgacgcctttgctggatgcgcaggatgctctggattggcaacgcctggtaggcgaagaagccaggccgctctccggggcggtattgagtttcataccgcgtgcaaatcaggcttggagcagggctgtgcgctttctgcgaagcagtggttgcctgattgaagatcggggggcggggacttgggccaaaggtgccgaactggatgtgcctgctgccgagtgggctgaagggcgcgcccagatgattcttgttttcctgcaagcgcgagggcaggacttcgatcgtgttattcgcgaattgcctgacgagatagggggatggattgaagccacagcctga

SEQ ID NO: 352302 - DNA, 750 bp, Pseudomonas aeruginosa
atgtcgagcgaaatggaactgcccacccttgtcgtcaaagccttaaccgacagcggctacgatttgctctccaccgccgaagacggctggtttctggctggaatcagtggaacctccatccgagtggctgtgcgtgtctccgggcagggggtcttgctcgcggggccagaatccaacgcgatggggcgtatcggcctaatctctgcaacacaacagccaccatgcggtatggccagtgcaggcttagcccaagatgctgcccagctctatgaggtgctgcgcgttcttcactccctgcaaacgcatccagcctcggtcttgacggccaaggtggaagcgcgactagctgcgatcccggcgacggagcgcactagcgaagtacgccagcgcatagggcaagacgtctttcgagaagccctgctggaactctgggaagggcgttgcgccctatcaggtagcgacttgccactttccctgctgcgggccagtcatgccaaaccctggtcgctggctgacgataacgaaaggctagatccgtttaatggcttactgttggctgttcactacgatgctctgttcgatcaaggtctaatcacgtttgatgatgaaggacgtctaatagtttcccatttgctatcttcagaaacacggaaggtaatgcatctagatggcgttacacggctgcgctttgtccttcccggccacagagactatctcaattttcatcgtctcagggttgcgagcctgtaa

SEQ ID NO: 352303 - DNA, 492 bp, Pseudomonas aeruginosa
gtgtggtgtggcgacatcacctacgtctgggcgcaaggccgttggcactacctggccgcggtgctggatctgcatacccggcgggtgatcggctgggcgttctcggccaagccggatgccgaactggtgatcaaggccctggacatggcctacgaacagcgcggcaggccacagcaggtgctgttccattcagaccagggcagccagtacgccagccgcctgtttcggcaacggctctggcgctatcggatgcagcagagcatgagtcgccgagggaattgctgggataactcgccgatggagcgcctgttccgcagtctgaagtcggagtgggtcccgtcaacgggttacctgacggcgcaggaggcccaacgggacatcagtcattacttgatgcaccgctacaactggatcaggccgcatcaattcaacgacgggttaccacctgcggtggccgaagaaaaactcaacccactgtccgggatgggttga

SEQ ID NO: 352304 - DNA, 222 bp, Pseudomonas aeruginosa
atgagcgcgaacaagaagctgcggctcggcccgctgcccaagaccgagaacgtcaagctgacctttgtctgcccggccagcctgaaagccgatctcgaccgctacgccgcgatgcatgcgcaggcgtatggcgagactgtcgatgccatgatgctgatcccctacatgctggaggcgttcatggcaggggatcggggattccggcgcggcactgcgaggtag

SEQ ID NO: 352305 - DNA, 330 bp, Pseudomonas aeruginosa
atgcgatgcgtccttgccccgtctgttgtggtacttgccgcgttgctggccggatgcagcgagcacccggccgacaaccttgccgataccttggccgccgatcccgcacggcttaaggcattgcgcgcgcaatgcgcggctgaccggcaggccacgggcgaggatgcttgctgtgccgccgccgaagccttccggcgtcgcttcttttccggcgatgccgggccggatgaataccagacgctggccgacctgccgccgatcccaccgagcttcgatgaacctgccgattgcgaggcgccggccttgcccgacccggaggacacgccatga

SEQ ID NO: 352306 - DNA, 279 bp, Pseudomonas aeruginosa
atgaaaatgacaatcccactcttgctagtcgcggcattgactgcctgcggccagtctgaggcaccgcagaaaaccaccggttcggaggcagatattccgactgtggaagaacttgcagctaaccccggaccgctcaaggaactgcggcagcgatgcaagaccgatcgccccaagctgggcgatatgctgtgcaaccgggtcgccgaagccacgcgcaagcggttctatagcgacggcgagaccccatacacgccaccgaaagagtcgcccaagttctga

SEQ ID NO: 352307 - DNA, 2667 bp, Pseudomonas aeruginosa
atggcatctgcgagacaggattttgaacgcttcgtgcgctggatttaccagccggataggcagtttcccggcgatgtgcgccgcctagctaccttggccctcgctaactttgacgaactcgcgggcacctcacgacagcgaagccagcgctccacctttctggtgggcctgatgcggagagaacttggcggcacggttgaagctcccccagccgacgtcgcggaagcaaacgccggtgcctggccatgggtcagactgcgtcacctgactcttggcccatttcggggattccgagcacctgagcctttcgacctaactaagcagatcatccttttctacggtcccaatggcagcggtaaaaccagcctttgcgaagggttggagtatgcccttctcggggatgtcgaagaagccggcaataaacgcattgcggccaggacgtatctggcaaatgtccacgacaggcgattcgatcctccagtgcttaaggccacggatcaacaaggacgcgaggtagatgttgctgcaaatctcgacacgtatcgcttctgtttcatagaaaagaaccgaattgacgcattctcaagaatcgctgcccgacccaatgcccagcgggccgaactaatcgccacactctttggcatggaccagttcaatgaattcgtaggccacttcaacgagagcatcgacgggcagcttgtcctagtcgccgagcgacaaactactttgacgttgcgccggaacgcgctgaaggcagaccaagcaaccgttgatggcgaagccgcttccctacaagcactgaacgaagaggaatcccttctagccaaggagtacgcagttgaactgacatatcaagctctgaaaggcttgattggcactgctgaagctcctggacgtcttcaagaacttgacgacattctgggtgcggtccctccgaatgttcttggcgtcacacgacaaggtctccaagacgctttcgcagaggcacaccagtgctcccaggagctcgacggggtcattgcttcgcttcgggccaagagcgaccaagtgtccttcaaggcgctgtacaactctgttctcgctttacagaagactgtcggagatcgctgccccgcctgcgacacaccactggctggagacactcatgttgctgcagatccctttaagaaggcgaccgacggcttgcaacaacttgaagagttgggcgctctccaagaacgacaaaagactatcgaagtaaaacttggccaagcctctcgcgcgttgcggcaaatgttctcgccactcagcacattcatagctgctcatcaagaagaggagtcagtagtcggtcgttgggctttgcagctgcctgcggagcctggcggtcgttggtggacagatatttatcccctaccctccacggaaccgcgcggatcgccttcgctggaggagatcctggcagtggtagaccgcatgaccgcgcaagacgaagcgtcaagggcggctcagcgggatcgacaaccgcacatcgacgagcgtcggcgactcaacgaattccagctaaaggtgcaagcgcaggacctcaaacggcaacaattacaagcggatatcgatgcagcgcgtaaccgcatcatagcgttcgacgaaacaaatgccgggctgatcgcacaagcggagcaggagaagctagatatcgcccgcgacacgccgtacaagactgcctacgacagatttctcgaagcgcttagatcttatagagatcaactccctggtcagctaatggctggcttgaatgacgccgccagagatctctataacgcattcaatcgcaatgatcgtgaggaggacaaactatcagcgctgcatctgcctttgaccggcgatgaaaagatcgagatcagcttccgtggaaatcccggggttcgcgtcgatgcactccacgttctgagcgaagggcatatccgctgtctcggccttgccattttgatgaccaaggcgaagagcatcggctgcccggttatcgttttcgacgatgccatcaacgctattgaccatgaccatcgaggtggaatccgggaggcgatttttgaaggcgaccacttcgctcaaatccaactgatcgtcacctgccacagcaacgaattcatcaaagacattcaacaacacctgcctgcccagcgcagaagtgcgtgccaggtctacctgctccgacatcacgatggcaactatcaaccgagagttaccggtaacgtaccgagcgcgaactacatcgcgaaggccagggcagcaagggaggcactcaacgaccgagacgcgctcgccgcgtctcgccaagccttagagatgctgggcgaaaagacttggcgctggcttggaagtcatgaccagggagtgcttaatctcatgctggccggggtcggtgcggaacctgggctgagaaatctatgcgaagcattggtcaaaaagttgcgagactctcagaccttcaaccatgcgaacaaggagcccctccttgccgcgtatggccgcatcttgggcattcccgtcaccaaccttgtctggacctacctaaacaaaggtactcatgaggaggcagatcgcgatgactttgatggggagctcgtggagaccgttgtccaaacccttgaagagctagaccgcctcgatctgcgaggcggacgctag

SEQ ID NO: 352308 - DNA, 1353 bp, Pseudomonas aeruginosa
atgagctttatttgtccgggttgcgtgggtgagccatacttgcggcgcttgattgaagaggcggcaacgtctgagaatccgtgtgaatactgcgaggagaatcagcagtcagccgatctttggatggtggccaatctgtgcgacgaagtaattgatacgttcttcgaggaatccagccacacaatggcagtagtgcattttggccgcactcccgccggccaagacttgcacgagacgatttcacaattgactcaagcgccacaggacgctgttgaggtcatcgtcgagtacctaggaaacctctggtttgatgctgactcgggagagtctcgatatggtgatgatgacccgtggtttgttcgcaagccgtccatggcagagccgttagggaacgcctggagggagatggaggaaagcctccatacagatgttcgcttcttcaatccaaaagcgacttcactgctcgacgagattttcggcgagatcgccgatgaccgcgacggcgaggggcagccggtgatcataccggctgggccggaggctccgttaggaacactttaccgtggccgtgtattccagacagacgagtccatggcatctgcacttcgctggccagagcggtttttgggatcgccgtccgcggggatcggcgccgctggtcgcatgaacggacaaggtcagcctgccttctacggtgccaccactcctgagatatgcatcgccgaagtgcgccctccggtcggcagtagagttgcgcttgccgcctttgaagtgactcgtcctttacgactgttggatcttcggcgcttggctagtgtggaacttaggaacggggccagcttatttgaccgcgcgacccgctctgcagcgcaacgccgagattttctcaggacacttggtgaccgactgtcagcaccagtcgttcccgagctgcaggatcgcaactacctggtcactcaggcggtcgcagactatctagctgcgcatggcacgttgaacgttgatggcatcatttatccatccgctcagggacgacgtccgggcgaacgagtgggcggcgacaatgtggttctctttcgcaaggcttgtgaagtcaccgatgcagatggatctcaagcgacggccgacatcgcactctgggagtacgaagaagatggcccgggaaagtggttcagtccgtcgattctgttcaaggagcgtgagcttccatggtacccacaccgctcagtgcatcccgcgctgagaatgaagcgtgattcattggttatccatgacatcaccgcggtgagctacgacaccaagccacattcggtatccgaggtgtcatcgctcaacgaccggcattacggttag

SEQ ID NO: 352309 - DNA, 939 bp, Pseudomonas aeruginosa
atggcgacggtaatggtttcaccaatccatttcgaggatttcagcggcatccagtttgagcgtctcgtctttgcgtaccacttgcgggccggttggcgtgacctggtctggcgcggtcagtcgggaggtgatcagggtagggacatcacaggcaccgagccctttgatgacaggccatctcgcaagaccatcattcaatgtgcgaaccggagcaccttgacgttagcgaaagcaagaggtgacatggaaaagtcgatgaaagccgcaggtgcagcgccggacgcgtttaagttcgtttcgcgcggtgcggtctcggacgcaagccgcagtcggattgaggaagccgcgggcgctctcggtgtggaccatgtcaccatctggtcaggtgtggagtttgaggagaacttgcggcttcgcgctgagtacctactgcatcgtttcgttcgagggatcgagtttcccgatgcggaggcggacattcgcagctttgttgatgactttccagatctgtccgataccgacgcactgcagttgatggccgcagtattcaaccgatctgcttttcgcacgccgtttcagcaagaaagctctctgcctgctttccagcaggcaatcgaagacactattcgcgcactaaataccggtgtatggcggactcgcgaaggcgatgagattagacgtatcccgtcgatccacaacctgagggataggggcattcgaacgacgctggagaaggtcgtccgccatgtcgatgatcttcgtcgtattttcgtgactgggcttagggaaggcgaaataagaccttgtggttgtggagttcccgactgccccacgtttgagctttcgcaacgcagtgcagatcagttggactctgtcaggcgccaggttctgacaatgtttcgttcggtatatgcaccgttcaatgtaaacctcgaatag

SEQ ID NO: 352310 - DNA, 378 bp, Pseudomonas aeruginosa
atggagaataccccgtcaggcccagtgggcagagcttatgactcgaagagcagcctcactgccccgctgccgggctcgaccgcctatgaggagcttcctcagtttccaaagtcctgcgccctgcccttccgtcgcaccatacgcagaaaggagctgcatctgatcgttcctttagctgaaacgaccatctacgaaatggagcgccgcggcgagttcccgcgtcgctttaatctgacgcctcgttgcgtcgtgtgggacttggccgaagtggaagcctggatcgaagaacggaaacaaacctctcgcggcagcagctccaaaccggatgtccacctacgaaaaacccgccctgttcgggcgggttcgagccaggaatga

SEQ ID NO: 352311 - DNA, 753 bp, Pseudomonas aeruginosa
ttgggcggtgcggtcaatctcaactcgctcatcacgtcgggatggtggtaccagacggccaatgcacaggccgaaagtggggcgaactacccggtcccccgggccggcttgcttcaagtgcataatgcaggcaccaatttcatctaccagacataccaggtttatgacggtgaagggttctattttcgttgccgctacaccaacacctggtatccatggcggcgtgtatggcatggagcggacttcaatccgaacgactatctgctgaaaagtggctttacgtgggccgccctgccaggaaagcccgcgacctttccgcctactggccacaaccacgacgccgcccagatcacgtcgggcatcctgcctctggcgcgcggcggtcttggttcgaatacggcagcgggggcgcgcaacaatatcggggctggggttcccgcgacggcgaaccgatcgctgaatggctggtggaaggataacgatacaggactcatcgtgcagtggatgacagtgagtgtcggcgatcatccgggtggaatcgtcaaccgctcgctgacctttccgatcgcgtttcccactacctgcctgcacgtggtgccgagcgtcaaggaactggggcggccggcgacgtcggcatcgaccgtcaccctcgcagatgtcagcgtcagcaccacggggtgtgtgattgtcgctaccgagtatcacggtgcggtccagaactatgcgatcaggcttgtggccattggctgttga

SEQ ID NO: 352312 - DNA, 198 bp, Pseudomonas aeruginosa
atgcctgatttcttcgaactcagtgcaggtgaccaaggagatgtgttggaaacagctgcgcagacgcttggccggccggcctatgtcctggagaaagacatctacgtcgtgtgggttctggggaggattttttctgccccaattggtgatcacatcaccttggggcgaatagagaaaacggaaaaaatcgtacgctaa

SEQ ID NO: 352313 - DNA, 210 bp, Pseudomonas aeruginosa
atgaaagcgaaagcctatggcttgggtgtgtttgggttcgggatggcagcggttggacagatgactcctgtcctactgggtgatgacatgatgagcaactggcagttcgcagggctcactctgactgtgttgtcggccatgttctgcggatacaagtcgctcggcgtgaaagccgaatcgccgagcactcgagttaagggaaaccgttga

SEQ ID NO: 352314 - DNA, 366 bp, Pseudomonas aeruginosa
atgaagcccaaggaattgaaaacgtctgccaagttgattctatctggcgatgacaacgtaccggacatgccgatgaacgacgctcaggtaaatcacttgcgccgacttctggcctggatgcgctgtgagtggatgctggacgatgacatgcagcgaggcttcatcagcggagctcagggctgcgtagagatgggggcggcgacaccagaagaagccggcgcactgcttgctgagcgggccgagaagatcaagcaatgcccagcctacgtccgccaggccgttaagatgctgacgaaagccttgcgagatcatgaacgggccgctggcatcttggagcctcacggcggtggcgaggtggagccatga

SEQ ID NO: 352315 - DNA, 192 bp, Pseudomonas aeruginosa
atgcagctgtatctggaaggccacaacgtgcatcggggttatgcagtgagcattcagtatgccgattgtgaaatcaccgctatgcccagtgtgatgggtgatgcgcagatcgagccagtccgctactacaaaaaccgtcgccgcgcagatcgcgtgattgttcggttcaatcgccgcttcggcaccaagtag

SEQ ID NO: 352316 - DNA, 225 bp, Pseudomonas aeruginosa
atggccaagctgaccgacagctactgggtgcagtggcgcagctacaacgccaagcatggcggctgttgcacacacgcgactgaggctggcactgatcgtgccctctgtggcgttcaaacagtagacggcgctggccagacccttacggatacggtaggccatgtcggctgccgtcgctgcctgaaagtgcttcaaaagcgcggcgtcatcccggttacggactga

SEQ ID NO: 352317 - DNA, 828 bp, Pseudomonas aeruginosa
atgatgaagaaccgcagtatcacgatccgtaccgggctcctcgccgcggctattgctctcctggttgggtgctcatccgcgccgaaggcacctaccgtcgaactacctgaccctaaggatgtgccgaaggaaaaatggtccgacgccatgcatgttctgacggccatgaggatttctggccagcgtgacgttccccatgagttggcctcatccggcccgacaaccgccactccaagtacaggtggctcgagtgcggtggacgctgctgttgccgcaggcggctcgccaggcatcagcagcaatgcagctcttggcctgggggtaggcctatttctccttggagggtcaagcgatccagttcggggatatcaaacagccgcgtgggttccatccacactagttaagtcccccgaagaagcatcagatcttgtactaaagctttttgatgaggcccgccttaaagctttccctaataaaagatcaacactcacacctaaagctggaaaatatccagctggtagtgggaaagcctacgctgaccctatggcgatctggaaagagaccccagttccgttcgacggtggagcgtcaactcctccctctttcgtcgctgcttccgaggtatacgggccgatatttattcataatggccagtatacaatcgacgcgaataaaaacgatatatctacactggacgccatgattaaggtttcggagaaactacctgaatggtttttcatgtaccacccaggtgagaggcttcgaaagaactctattccagcgcgcattataaacaaaggtcagtcgatgtattttgtcgggaagtag

SEQ ID NO: 352318 - DNA, 723 bp, Pseudomonas aeruginosa
atgaggtgccagatcacagtccgccccagtaagaaacatacaaaactaatcgaagaaatatacacaatgacccatgccgaactttgtgaagtcgccaaaaaatggctggttcgtccgaacagtcgccgcgggcatggttgccacgttgccttgtcggaatgcagatccggctggtgtggtgaaatgccagacgctattggcttccgggcagccagtcaggttacagagacggttgtagtggaggtgaaggtctcccgagcggacttcctggctgattccaagaaggcgcaccgagctgagggtgcagggatgggcgtctaccggtacttcatgtgccccgagggtttgattcaggcccatgaggttcctgcgcgctgggggctgctatgggtcaatgctcgcggcagggttaaggcagtgcttggcccagtcgctctgtcgaacaacagcgggacgtttgatgctctcgctgtaccttggcagcacgcccggaatgccgagcgcgaaacgtggctacttgtcagagtcatggccaggattaacgacccagacaaagtgaagaactcactcaacgctgctcagcgtgaacaagcgcgactggttaatatctgcaatgcccaggctgaagaaattagggctttggagatgcagcgcagtacgcctggatttagcgatgagatccccaaagccacgccgcgccaggtgcccccaaagagtatgtga

SEQ ID NO: 352319 - DNA, 753 bp, Pseudomonas aeruginosa
atggggcagagctacaccgacatcgccgtgcagacagcccttatggaacagttgcctggcgcggtcgacaaaaccctgaaggatcgtgaggctgagaagatcaacgcagctaaagcgaagatcctctcgaaatggagcggcgcagctgacaccaacattgaaggtcggcacatctacggcagcatggacgcccagttcacattggtcgagttcagtgacctggaatgcccctattgcaagcgtttccatgacacaccaaaacagatggccgacaagtccgaagggcgcatcaactgggaatggcagcactaccccctggccttccacaaccctgcggccgaagcggcagctcacgcatctgagtgtgtgggagaggttgccggcaacaaagcgttttgggcctttactggcgaatggttcacccgcactcaactcaacggccaaggtgtcgaggacgtcgaacgtcttgcacaggaagttggtgctccccttgattcctatcgtcagtgcatggaaagcggcaagtaccgggccttgatcgaaggccaggtgaagaaaggtacgaacatgggggtcaccggcacaccagcaacggtcgtagtcgacaacctgacaggcaataaactgctggtgaagggcgcacaaagcacacaggtgctactccagaccatgcagcagctggtcaaaatgcgcaacgaggctcccaaccaagacaagtcggccccccctgccgaaggcgcggcccatgagtaa

SEQ ID NO: 352320 - DNA, 252 bp, Pseudomonas aeruginosa
atgttccaggccaactgtgctgattctgcaaatgtggcgcaggcctttgctctcggccaacccgctgcaagcgagcgcatcgtcaccctggccaacgcggccggctcggtcgatgactacatcgccgtccgaaacaagctctgcaaaggggctcaacggttgagctacgaggagtgggtaattctcgtcgaaggcactccgaaggatgtccctcttcacctgaaaccctcttcttccccctcctataagtga

SEQ ID NO: 352321 - DNA, 534 bp, Pseudomonas aeruginosa
atggctcgcggcgttaataaagttatcctggtcggcaatgttggtggcgacccggagacccgctacctgcaaaatggtaacgcggtaaccaacattacactggccaccagcgaaagctggaaagataaacaaactggtcagcagcaagaacgtaccgagtggcaccgtgtggtgttcttcggccgtcttgctgaagtagttgcggaatatgctcggaagggttctcaactctttgttgagggcaccctacggactcgcaagtgggtagggcaggacggccaggacaggtacaccacggaaattgtggtggacatcaatggcaatatgcagctgctcggcggtcgacgagaagggcaggagaacgcccatagtccccaggggcaagggcagcaacaacgtccgcctcaaagaccacgtcaacagagtcagcagtccccgcagaatcaacagtctgctccgggacctgactatgattcttttgacgacgacatccctttcgccccgattagccgtttgcttctaaacatcatctaa

SEQ ID NO: 352322 - DNA, 1092 bp, Pseudomonas aeruginosa
atgagcgataacttccaaaacgcagttgcgattattgcgaagctagaagataagttcagcaagctagtggagtcctcgaagactgaagtgatgttcaagaatgagctgctttatgcatcgcaggccatgatgaacaacgactatctgtgcagatgcgcgacgactaacccgctaagccttagaaatgcgttcagccaggttgcagcatacggactgacccttaatccatctcgacagcttgcgtacttggtgccccgagacgggcaggtggttttggacgtgtcctggaggggcatggtcaaggtcgctgtgaacgacggtgcgatccgtgattgcatcgttgaattggtctactcgaaagacaagttcgagtaccgagggaagcgacaaagctcgacccacacgttctacccgtacgacaagaaggctgatcgtggggagtttgtaggttgctacgtcgaagctcttctgcctgatggccgcgttcacgttgaggcggttaccgctgatgatatcaatgctgctcgcgatgcttcggagctgtggaaacgcaagaagaaaggcccctgggtcgacttcgaagattccatgcgcaagaagtcggccatcaagatcgcaagtaagtactggcctcagaccggcacaaagctggatggagtgattcagtacctcaatacagacgctggggaagggttctcttccaacgatgtaccagttgaagttgttgagcgatacatgggggctgctgatgtggtgggaactgagccgttgccgacctctaaccaggttgatcagcaatcagcacccaccgcgaaccccgagcagaccgctaagcctgaggttgcagatcctgccgcggcagatgatgtgatggaaggtgaagtagtcagtgacggaagccaagttccgccacctcctgatctacctgcaaaggtgatcaagaaggtcgcggaagtcgttcggcgagctcgcgatgccaatagttgggagcccgcgttcgagtacgtttcgacgtggcccgtagacttgcgggattacgctgtaacccagctaaaagctgctcaatacatcgctcagtcgcaaggcgagtga

SEQ ID NO: 352323 - DNA, 180 bp, Pseudomonas aeruginosa
atgcggacttacatcctatcgatgaccatcctggatacacagcagaaggctaccttccgttgcgaagcaatcaccttcagcgaagcgatcgaaaaagcagagaaggcccatccgggctttttttcggttctgaccaactcccttccaagagagcagaacaatgcgaccgtcaaccgttga

SEQ ID NO: 352324 - DNA, 504 bp, Pseudomonas aeruginosa
atgcgaccgtcaaccgttgagcgcctgaaggaatcccttgctagctggggggagatgaaagaaaagggtggtgcgtacgcggaatacgctgacgaaatgatcgagcgatttcaggtgaagctcattctcctggaacacctgctctgtcagttcactatccatggccttggcttgactctgaagcatcacagccgggatgcctggggggtgcttctctcagatgcatctcagctagggcgctttcggtggcaggcgtttcaacgtgatggcttcacgggtcactgcacgcatgacacgccggagctgtgcattggcgacatgcttgatgatggttacgtgcttctcgatatgggggcgttagatcgattgtcgagcaccgctgaatggcagtgtgggatggagatcgtcgcggtgattcaggcttgcaatgcaggtcagatgaccttagaggatgccatgctcaagcgtgaagaaatctactcccgctacgcgaaggttgcgtaa

SEQ ID NO: 352325 - DNA, 1044 bp, Pseudomonas aeruginosa
atgaagatcgttgacatcgcgcagaggactcccgagtggcatgagtggcgaagggaaggcattagtgcaaccagttgcgcggttatcatgggtgagaacccagataaaacgcccctggaactgtggaaagaactggttggaattgtcgagccaactgacttgtcggtaatcccgcaggtcaggaggggagtcaaatttgaaccgctagcactacaagcctttgaggataagtacggcaagattgctttgccgttctgtgcagagtcgaccgagcacccgtttattcgggcctcgttcgatggcgttctggatgacaagtctccggtagagatcaagaacctctccgaaacgaaccatctggaagtgctgcaactcagggagcaaagcaaggcattcaagctgtaccgctggcaaatcatgcaccagatgatcgtcagtggagcgcggcgcggatacctttggtgttggtcgccgaagcatgaaccctgctgtttgatcgttgactgggatgacctcctggtaagacgaatcatccaggcagaagaaatcttctgggggcaggtgatgcgcggtgtgccgcctgacgccgacccgaagcgggacattattccgctggataggctgaacatggttgcatggcgtccgcttgcaaaggccagaagggagaaggagagcaaaatagctgagttgaaagcccagctgaaggtgctcaccaaggaagcaaaaaaccttgaggccgagatcctgccgttactgggggagttccgcagggccgatgccctgggggtgaaagtcacgagctacgaagtggctggcactgtggattgggaaggtgttgcgcatgagctggaggcgaatatcccgcccgatgtgatagcaaggcaccagactggttcgtcaatggctacgcggttcaccgtggatgcttcctacgatgaaagtaaggccaaacctgagccgctgccccgcgtacggcaaaaggtggaggcagcaaatgagacggtcgaagagccgtcacagtttttcggaaccttctggttctag

SEQ ID NO: 352326 - DNA, 2703 bp, Pseudomonas aeruginosa
atgagacggtcgaagagccgtcacagtttttcggaaccttctggttctagcccctcagcccggcagttgccgggctttttttcgaccacaaaaccgcctgaaaacgaaactcaaggcggtatccctcacgcatcattctcagcacacaacatggccgagaagcgtatgcctccattttcattcctgaaacgcctgtggcctcgaagcgagcgtgccctcacggatagcttcgcgcacccggcggagcagatgattactcctgaaatcaagcgctacctggagaaccataactggcgaaatctccggtaccccccttaccaagagggttatccggggctggttagcgggcagtggttcatgcgcaactatcagcacgagttgttcgatcggatcattcattcagtcggaatgcctgccagtgacctcaagctctacgttgagccgatcctggtgaatttcgccgaattggcgcatatgctgccggcgtcggagaaccaccatcactcaggacctggtggattgctccggcatagccttgaggtagccgcgctcaccctggatgggtgccttacgaccgcctttgatacaaacgagaccccggcacggcgaagcatgcgcctgcgtcggtggtacgtggcgggaatcgcggcagggctgctacatgacgcagggaagcccctcacagacattcgcgccaccgattttgaaggcaacaaccagtggatctacgcgcaagagacgctgcatgactggtctgtgcgcaacaagttgacccgctacttcctgcattggaattccaataggcatgggaaccacgttcaggtttctgtagcgcaagcaacacggatcattcctccagccgttcaggcgtggctgatcgagggtggccacgacatttacgaagcgctcctcgatgccatttccggtaccggaagctcgccactgaccgacttggtgaagtgggccgactctgcatccaccaagcgtgacctcaatcgcggctcgaacaatgctggtggcagtgcaacaggcgttcctgtgccgcggttagtgtcggatgcaatgctgcggttgttgagtgacggaacctggaagatcaatacgccagctggccgcgtatgggttgcgacggatggcgtctacattgcttggaaccagggggctgaagagattgtaggcatgctggtcgatgatggggttgtagccatcccgcgatcgcctgacactctgattggcaccttggtagaacacgggatagcggagagggcccctaacggcgacctgtactggctggttacgcctcaccttttgcgcaagaacggcaaaggaccggcgctgcgctgcatgaagcttgtgaatccggacatccttttcccaaccacaccgattccgccgccggtttctatcagccttgggaaagaaggaaagcagaaggatgtcattgctcctaacgatacggctggcgcagcagcgaacgcattaagtgaccaccaggaggacctgtttggggctgatctgactggggacgcgagcggggaggctgacgctgatttggagcccacacctcctacagaatccgcatcgtcgaagccggcaagaaagaaaaagccgcgtccaaggcaagtagctccggtgccagcagctgcctcttcaggggttagcctcaaacaagcgcagatccccacggaggacgcgcctgttgatgcgaagtcagatccggtagctgacgatatggcagttaccgctccctcccaaccagaggaggttatggatgcggaggaggaggaagaaactgcccaggagcctcctgccagcctcgaggaaatgttgctcttcttgagtcctcactcgccggcggctgaggcccctcaagaagaaccacttccgactgctgaggctgaaagtagcaccgagcgctctgacgctgatacccaggccgggtcagtgcaaggggcccaggaactattgcctcgccaggaaaagatttccctcaactccatcatggggcaaggcaaacgcacgcctaaagctacggctccgttgggaccgaagaagcagaagggcggaggagcaggtcctgtggcaaatgaggcaccagctgctgccagcatcttgccggccgatgtcgtctcgaagctcaccgcgcacgaatgctacctgctggagcaacaacctgatcttgcccaaaagctcattactgcggctaaagatcccgagaatgcagcactagcaagaaacaaggtattcgttcgactggggaaatcttctttcctcgctgaagacatcctcccgctcgtccatgcgggctggttgtggcaggacatcacggtcgaaggcccagccctgacccggaccctacagtcgcgtgaagggttcatgctcaccgcggacttcagcgtcatctactgcaagttagcggagctggactgggctattcctcacatatctcggcttcgtgaggccgacattccaagcctcgagcaagctgtgaaatctctgatcgagaaggcagtacttgaggaaataggcgggtcaccggtgctcagcctcacaacctacatgctcacgaatgtcgctgagcagttcggtatcacatcgacatccctagagaacgcagtctactgcttccgcgatgctgtcaaggtcgccaagcgcagaaagatcttcgttcgccccctttacgaggagcttcccaaaaaatga

SEQ ID NO: 352327 - DNA, 1833 bp, Pseudomonas aeruginosa
atgagtgaatgggactacaccagctattggcggaagaactacgaggctcgagaagctgttgcgtggggggcctccatgcttgccggcacagccgtgcaactgatgacggacatgccggtaaccccatacctgatcacgttgggcgtgcaggctggattcggcctggcggccataccaagggcactccgggttcatagggcaaaagcatgtctcgctggagtagatctctcgttcatcaccttggaggaggtcatagagctggtgaagagacaccctcacgaattctatttcggcgaggccttcccctggcggcagcggcacggccagtatgcatttgagcttcaggcgaaggatatcgaggccattatcggtaagcgtggccgccgcaacgctgcggttaagggaacgaaatggatccacgggatcggcatggatgaggaggaaccatgtttccggccagcagaccagcgctcgatccaccacctagtactgggcacaacaggggccggtaagacccgctggttcgacttggccatatcccagtgtatcgctcgtggtgagccagtaatcgtgatcgatccgaaaggcgataaggggctggctgaaacatgtgagcgaacatgcaaagcgatgggaaaggccagcctgtttaaatatttccaccctgctcaccctgacaagtcggttcgtctgtctttgaccaagaactacggccgcgcaactgaagttgcctcccgtgtggcagtgctgatgaaaagcgaagccggcgatccattccaagcctttgcacagatgtccttgaacagcgtgattcaggccatgttgatctgcaacattctgcccactcttgtcggcctcaggagaacccttgagggggatgttccagggctgaccattaaggtagtcatggcctggggttcaaaggtgttcggtgaagatgagttcgcgaggatggcgcaagccgcaattctttcgaacaaggcgtctaatcacatagatttgaaggcgaaagtattgcggagggtctattacgaggatattgcgaaggtgaaagccaataccgatatcgaagggcttcttaccatgctcgagcatgagcgatcgcacttcagcaagatgattgctggtcttcttccaatcctggtgatgcttacctccggagaaatggggccactgctttctccacacaccgacgatgaagacacccgaagaatcagtgacctgaactcgatcatcaatgccgaccaggttctctacctaggcctcgattcgcttcccgactcgatggtgggctcaaccatcggctcgcttgctctggccgatctagcgtcgacagcaggtgagatttacaaccataggttgcctaagcctgtgaacatttttatcgatgaagctgccgaggtgatcaatgaccagctcatccaactgctgaacaagggccgtggcgctgggataaatctctacatcgcaacccagaccatcgccgacttcaaggctcgcatgggtgacgaagccaaggccatgcaggttctggcgaacgcgaacaacatcatctgccttcgcatccttgacaccgatacgcaggagtttgtggcgaaaaagatgacgccaactcgctacaaatacgtgatgcgtacacagggcaactcggcaggtgaaggcggggtggtgcagggcgggaatgttggagagcgccttatgcaagaggagggtgagcgcttcccaacagcgcttctcggcgagctaccagacctcgaatatctcgcagtgttcgcgggcggcgatatccgaaaagggcggctgcccattctcaccggcccgactgccaactga

SEQ ID NO: 352328 - DNA, 357 bp, Pseudomonas aeruginosa
atgactgtctcgatcccactagaaattcagcgtctcactggcctggatgaggcctcaacaactcgactgcgcacgtttgacttggaatggcgttgtggcacgcaattcatcttcaagttgcttgaggcggggcacaaacccgaggtgattggcgcagccctgattgacgtgctggtggcttaccagcgtatgtgtcgcgagggcatcagcgacttcattcggctccgggtggtactcggccatatcctccagatcctcacgaacgccggtaacggccctgcaccggatgatgttgtcctgtggtgcgaaacaaccaatgtcccgcaacctatccgggagttcctgatcaatggctga

SEQ ID NO: 352329 - DNA, 648 bp, Pseudomonas aeruginosa
atggctgagatgcttgaggagaagtggccaaagggcgttatggcctctatagcgttcttctttgtcctgatcctgatgctggcgaccgttgcgccgaacaagcttgtggatacggtgatgctgaaagagcggaaatggggtatcgagttgcttggcgattcggacatggagaaggtgcttgaaaagaccaatcgctactactctgcgcttgtcatcgactccggggcaaaaaagattgtctccgacatgctgatgcctcgaggcggcaccgtggatgctttcgaaaagaacgtggattggtggtttcaatatcttgagtcccgaggtgaggctgtccagaagatcatctaccaaatggtttaccggatcgtcttaacgatctactggttgccactgctgatcgtggttcttgtgccggctatttatgccggctggatgcgctggaatgccaagcggcatggattcgactactcatcaccgtttctgaataataacgctgcgatcgtcctgtcatggagcggaatgctcatcgtgctcagcgtgctgttgccattgcctttaccgccgctcgtcatctcaactttcatcgtcatcatgctgcctgtcgtgctgtccgtgctgatcagtaacctgccaaagcgcatctga

SEQ ID NO: 352330 - DNA, 771 bp, Pseudomonas aeruginosa
atggcaacgaaagctatccccctcgctatcgctatcacagcccttgctaccgctgtggtagttggttcctaccactatttcaccaccgtgagcgagcttgaaggcgagatcaatacgctcaaaggtgagctgtctgttgcgagagcacaagcaatcgatcccgcgtccatccaggagattgtcgataacctccaacgggctccagaagaggatgtccccgcagctccggacaactggatctacggctcatcatctgctcggtacacgctcgtcgagatgacggatacggaatgtccttactgccgcgaccactttccccttctgaaagcgcttatcgagtcgtcagcagggcagatcaatgccgcaattctccatgtcccagcacttggcgaggcatcacgccggcaagccctggcgatcgaatgtgctggtgagcaaggcggctcagatgctgcctggaagtacacccagacggtgttcgataaaaccggaggcaacggcaagggggtttcagaatcactcgtttcccttgcgaccaagcttggcctggatgggaagcggtttgcagcctgcacagattccaaacaggccattgagcgggtaactggcgacctcgatcaagcaataaagctgggcatccagcagaccccttcgacgcttctgctggacaatcagacaggcatgtcgatggttctccaaggtgctaacgctagtcatgaaggcatcctcaaagggattgccagcctcagcaacgcaggaggtgccaagtga

SEQ ID NO: 352331 - DNA, 1650 bp, Pseudomonas aeruginosa
atgaatcatagaaaatttagtagcagcatgaggttgatacgctcattgggcatgatgttcataactttcatgctcgccagcatagcgaaggcggaattggtacaggtggaatacctatcatccaacggccaacgaacagtatctgcatcgaaagagatattcatcaaccctaaaggtgacttaagcgtctatttaagcgcaggtgtagaccgaaccctgaaagcccggctactgacctcaagtggctctgtagttgcagaaactaagagtggtttgttgggtgcaaatgacaaaattattgttaataacgtttcatactacggtgccgttttaaaactgcccgctcccaagtctggaaattatactcttatagctgagattttgaattctgacggcagtgccgtcctgcaaagcgacagctacaatctccaggtcgacgtaacctccccagttatcggaggggaaatagtacgtactaatggtggctacaactatcccattagcgtgttagcaccgctagcgtggggtgaagacgccggcggcacagttacagtttcagggctagctgatcaaagttcggggatagataaagttgagttcttcgcaatagactcaggcggggtacgaagaacgtttcagagccttgttaatatcgaagcagccagtgcaactgcaaagattactgaaatcacaaacggtagcttaacgccttacgatagacaaatttataccatgggctttcgcgtattcgataaagcaggtaactacaccgacaaaagtttgcccatagctatagaccgaaaggttcctgaatatttgcgtatagaggtatttgacttaaagacaaatagctggattgcatatacgccaaagatgacggtctattcaaatccggtaaagattagatatgtccgcaagaagcttgatcatactagtttcaatggcacactgtttgggtggggggacagtatctacaatagtcaggacgctgaatttttatatttcactaccgatttggagtatccaaaaaattctacaaactattttgtacttcagaacaaagcagggctggcaaccgttcagtactattccaatttcatctttacgttagcccctggggttgaaggcggtcctgtaccaaccggaattacgtatcaaatccaagggagagagtggacgaaaagcgacacaatacgagagtcgaagccatttacagtctcgcttgtaaagatttcaactgaacctagagggtataatcaaatagctggcgtcaatggtgtgacatgtgctattcctgctgggcaaactgaatgcacaatgaatcctaatattaacatctccactggtcgtggatatgttccttatccatatttcgtatctaaggatgaccgcacctttgcaaactatggcgggtatttatatacgtattgggatttcaattcgccaaaggtgtcgggtattgttgttgatttttctaagcgtgaagttgtagcgactgtagtcgatgacgatcgcatgctcaattggcagcattatatgtgggatacacaagagtttagaatgactcttgaggctggcgggaaaaagacaattgtacctcctttttctaggcggttgcaggagctgagtgcaacacggtcattgaattga

SEQ ID NO: 352332 - DNA, 618 bp, Pseudomonas aeruginosa
atgcaagaacctcagaacgacacagtaatgaattttggtccgaatctctttggaggccaggggggcttcgcgtccaacccttccgctgatgatgccgatgcttcgaatgatgccctggaagatacggcgagtttctctaaacagatgactggatgtagtactgccgaggagacacccgaggccgccgttggcgaatctggtgaaaacagcactccctcaagcggcggtgttgtacctggtcgacagggatccactcaaacgaaggcagggaagtcggaggtaggcaccagagcttggtctagcgcgaaagccgctgtaaaggttttcgagagcattaacggcttcgacgagcaaagcgcggcccagcgtgccgttgttcgcgatctgatgtcgaagcagtcagaagcaatggaactcaaacttcagggcaagaaacctcccgagggtgaggattttgattcgattgctaagctgctccggcgcgagaacaaccgcctcgacactctcctggaaggaaaggaatcactgtttggaaaggctcggaaggccgcagaaattgcgatcgaaaacatgcagagcataattgccgaaataaatcgtttggaggaggagggctag

SEQ ID NO: 352333 - DNA, 126 bp, Pseudomonas aeruginosa
atgactgatgagcaacctgaagggggctcgcgcacactgcccataggcggccccggcttgctgtttctggtgggctacgccggcggcagcacccacgcccgttacgcccgcgccgatcagcagtaa

SEQ ID NO: 352334 - DNA, 360 bp, Pseudomonas aeruginosa
atgtctaaactcgcggcgttccgggaagcagaacgtaaacttcaagaacaaatccaactcctggaacgactcaagagcgacagccacttgaagaaggagttagagtttcgcgatgaactggaggggctcatgaagaagtacgacatgagcttgcttaacatcatcgaaattcttgacccaggttaccaccatagagttacacctcaggctggcaagcctcgtgctcaacgagcagtcaagatctaccgcaatcccaatacaggggagactgttgagaccaagggaggcaatcacaaggtgcttaaggagtggaagcaagagcacggcgctgatgtagtggaaacctggcgaacccagtga

SEQ ID NO: 352335 - DNA, 1260 bp, Pseudomonas aeruginosa
atgagcaagctgactcccaagttcgtcaaagatgttgaccagcccggctcctaccaggacggtcgagggctgattcttcgtgtgtcagctacgctgcggaaacggtgggtctatcgctatatgctggcgaagcaacgacacgatctggccctggggacataccccgccttgagcctcagagacgcgcggctggaggctgacaagtaccgactcgacatcgcacgtggcttagatccagccgctgagcgtgcgaaggccaaggccgctaaagcctcaataaccactacgagcaacacttttcggtcgttggcggaaaggtacatacgcacgcattcggcaagttggtctaagaagcaccaccagcaatggcagaactcactcgcgaagcatgtctaccctgttataggcggttttcggatagccgaggttgacaccgacgatgtcctggatacgctgacgccaatctggaacaagattcccgtcaccgcgaaccgcatccggaatcgcatcgagctcgtgctcgatgcagccaaggcattgaagcttcggcaaggtgaaaacccagcacgttggcgtggtcatctcgacaaactcttgcctaagcaatcgcatacggtagcccccttcccgtctccgacacctttacgcactgccgagctgctggccatgctcgactccctgggcggggcagcagcgcgtgctgttgaattcgctattctgactgcaacccgtaaccaagaggtgagcggggcccagtggtcggaaatagattgggaggagaaaatctggtccatcccggcgcatcgcatgaaggccggcaaggctcaccgcgtccccctaacggagcaaatgctcgaggtgctacggcagcaggtcggaaagcatgacaagtgggtattcctcaactcctggcgaacaggccctatccccggcaatgcaatggcaagggtgctcaatcagctccaggccgatgacgtggtaccgcacggattcagatctacttttcggacgtgggccgcggaggaaaccgatcaccagcgagaggtttgcgaaatggctcttgcacataccctcaacaatagggttgaagcagcctataaccgaggtgacttgctggataagcgtcgcgcactgatgaaggattgggggggctttcttgccgccaatgctccccaggtgagaggtatggtatcggatctggcttcggagcttgcctctgatgccgggtctggcctggcagacgttcagccggcggcctga

SEQ ID NO: 352336 - DNA, 678 bp, Pseudomonas aeruginosa
atggaaattttgcacatcagtgatcttaagactcttcaacagtcgcaccaaaaggaaatcctacgactggcaaggcgcaacagccttcaacttatgaatcggcccataaaacctactcacccgatgtatgggctgacttgtgcttggatgctgtcggatatcaggcttcaactagatccctcgacaagtcgaaaattgggctcagaacttatagctgcacagaacaacgactcaaagattgtcgggttcttaaccttcacacgcgcaaataactcttcttcagcttgcggtattaactatgtatgtgtcgaacccaagtacagaagacaggggctcatgcgcagcatgattgacttggtaaaattgaagtacacagacattgcactggcatgttttcctgagctagttggaatgtatgaaaaactcgggttcgtaatgtgcgaagcccaaggagcccaggtggccatgcggataggcgacgcatacgaaatgaataaaatcaagcctgagattctaatgaacgaacaagaggtaatatttgagtcagatctactcataagtaaaaacgggaaaaagaagtccattaaaataaacgaaatctttgacgccgagactaagacaatttctcaacgcgtcgaattgtttgtccagaaccgtagaaacaacgccaaaacctaa

SEQ ID NO: 352337 - DNA, 840 bp, Pseudomonas aeruginosa
atggctaaatcaagagtcgcaaacgcaaagactgaggcctcgagcccggcagaacaccgcaaaaacctcattcgcctgctcaacgcaaacagccaccgccaccacttgtgggatgtgttcgccgacttctgcgaaatgggagctctagcgatgagcaacagcgtggacctggcccagcgcaatgagcgtgaaaatcgctacctgaacgtcatcaagaagtatgagccgagcgaggtgaatcggtttccccagatgctcgccgaactcaccatggcaatggaatatgggcctaacgatgtgcttggccaggtgttcggtgagttggagttgggcaatagtgcaagagggcagtatttcacgccctattcagtgtgccagataatggcttctcaactgatcggcgacggagaaagtctgctccaacgatcgcaagagcttggtttcattacacttaatgagccagcctgtggagcgggcgctatggttatagccttcgccgagtccttgggtaattcaggacttaattaccagaagtgcttgcatgtaactgctcaggacatagaccaaagagctgtacatatgacctatctccagcttagccttctacacataccggcgataataattctaggaaatacaatctctctggaagagagagaactttggtatacacctgcgcacatacttgggggatggagcttcaagattagcgagcgccatacaaaagcagaacagcaaaacctatcctatccagaacctgggtacacggttatgggtcaaaacgaaacagcggtaactacccaacaaaacaacagctctctacagtacgcacttttttga

SEQ ID NO: 352338 - DNA, 447 bp, Pseudomonas aeruginosa
atgaggttcaagaagttcctggttcgtcacgaaaaacgcactctttccgagcgaatgaagaaggcttttgagcgcaaacaggcgcgagaagccgaatcactgccactcttcggggatcagattcgcgagatccaacacacctgggaagaagaaaaacgtctgcgtgaccttcacgaggggaaggtcgccgatcgtatgcgtcagaaccatgccgccgtgtggcgtaaagcacgagctgcgtatttcgccttgaatactgaaacccgagctaaatgccgcgcagcctggaacgcctgggtgggcccgagcgatccgctgtacctgatctatgtcgtcaaccagttcaacggcgtaggtgccgccagagaggccataatggccgcagaccgacaggccatgaacagccgaatcatggcccgcattcaggctcagcctgagttgctgtga

SEQ ID NO: 352339 - DNA, 258 bp, Pseudomonas aeruginosa
atgcgatccccgacattcaaaacgagctatttgccggaataccttgcatggctcatgttcctagccggggtggccaatgccacactgatctggtctggggtatacgcagctgcgcctcagaccctcctggtccttttgggtgggcttttgggcaccactgggatcgccctcctcggcttactcatgttggccacttggtgcgctctgggattactgctagccgctcttacccgccgggtactggagggtcggtcatga

SEQ ID NO: 352340 - DNA, 315 bp, Pseudomonas aeruginosa
atggcgaaatacaaagttgagcagttttcgagcacgatcaaagacaatgggcgtgggcatgacaacctgttcatccactgcaaattgatcaactcggctgacaatgcaacatcccgtgaataccggatttcaccggatgaacggtttccgaacctgcaagagctggccgggctcatcactcttggcttcaatcaggcgaaggcaaacgggaagtcggtcgagatctctgagtacaaggagcgtgcatacctgtttctgaccatgcctgacgtcaacaatggtcagcaaattcaggtttcaggcgagcgcgtttga

SEQ ID NO: 352341 - DNA, 198 bp, Pseudomonas aeruginosa
atgaaacgtgacttgcttgcctgtataggcgcgaatgccagtccattggagaaagctgccaagcaagtgctgcgcgaggcgctggattgcataacggtgcatccgtgcgacgaaggcgatgatgccgtagcagccaagcagctttcgcctgaattgcaggcattgctccaggccctcaccgggcacaatgtaggttga

SEQ ID NO: 352342 - DNA, 291 bp, Pseudomonas aeruginosa
atgaacatcattgccaatgacccaatgggtcgcctgctgcgaattactgcggcgctgtgcattatcttcggcgtcattgcgctgaccgactgtttcagcctgttccgggcgattggcgtcatgtgtgttgcactgtcacctatcgttttcgccttcggctatttcctgcgcaacctttggggtactcgggtcggtacgagcctgctcatcactggcgttatcttctggttcatcaacgcagacatgggctggcaggatcgctactgcatcctctccccgcttggctgctga

SEQ ID NO: 352343 - DNA, 285 bp, Pseudomonas aeruginosa
atggccaccatcccccgtaagtacatccgcacggaacccccggcgctattgaccgagcccctggccgttcacctggatcgcagcaccctggtccagctgaatgattaccggcaggcgcaacatgcctggctgggctgtattggggatgccgcagagcataatcgccggcataaggtgatggagggattcggcgccctgctggctctggatattaccaatcaagtagcgcttcagttgggcgagtccccgaactgggccgccgacgagcaggaaaaccgcaagtga

SEQ ID NO: 352344 - DNA, 276 bp, Pseudomonas aeruginosa
atgaccgaactatcgcaggaacacccttgcgcggcctgcggtaagccggccgttaagtttggcaagttctgtgcggcgtgctacggcggtgtgttgcagccgaagggattgccgttgaccccaggcgatccgaacgacccttaccgggagttcaacgcagaggcggatgcgtatgtgtttgatcagaaaatgccaccccctgagagtgtttgggtcacgattcaaatgatcgctttgcgtcgaagacgtcgcggtgatgataattacgaggactga

SEQ ID NO: 352345 - DNA, 774 bp, Pseudomonas aeruginosa
gtgaaaactactgaccgcatcaaggccattggcctctctcccgatgcagtgcttcacctgacgcacttgtgcaacagtgtgcgccttgcggagcgcacggctgaacttggcaaggcagaagcccaggctaatggttttgtcgagggcctgcggctcggcgggggtatcagcgagcatcagaaagagcaactagccggtttgttccatgaactggtcgcgcgaactagcgcgcagcacgctgtcgctataaccgacacgaactcgaacacagctgaacctgactttgctgcggagaatcaggcatttgaaagcgctgctgcggaagtcggtctccagttggacaagctgccaggcggcttctacgtctctcaagcgacacagcatgcctgggcattctggcttcgccgtgccgctatttcaggcgcagatgcaaaattattcgctgcgcagaaaccggatgtgtcggtggggtttatccaagacctgctagccgacaccatccgagatttggagcgccaggtcagcccggagtttcgcggtcagtactatggcgagtgtcgcggcctgctcaaagccatgcgtgtggcccagttgctagatgaggcacaacgcgaccaatggagcgcagacatctaccgtgcatcgcttcaagcggctgagcagtgctcgactgctgggcagcccgcggatgaatcagccgtgattcagcaacggttccagttagagcaactggcacaccgaggtatcaaaccgcgcgcagtattaccgcgctaa

SEQ ID NO: 352346 - DNA, 987 bp, Pseudomonas aeruginosa
atggacggtcagatcgaaatcgccatctaccaagccgaaagtcaactggttgaagtacgtctccaaggggaaaccgcctggttgaggcaggaccagatggcagatctgttcggccgtgaccgtacagtgattggacggcacatccgcaacgtgtttgctgagggagagctgccgagggaaagcaatgtgcaaaatctgcacattgcaaattctgacaagccggtcagcctctacagcctggatgtgatcatctccgtaggctaccgggtcaagtcaacggaaggtgtgcgtttcaggcaatgggccacccagatactgcgagagcaccttacgcgcggtttcacagtgaaccgtcagcgcttcgaggccaacgctcgcgaactggaggcggccttgagtatggtgcgccgactgtctgcaagccctgaggtcagcgctgaagcaggtcgaggacttgctgatatagtcagccgctatgcgcaaacctttctgctgttgcaacgctacgacgaggggcttcttacggagcctgtggtacaggtaggagggtgcttgccttcggccggcgaagcacgtcaggccttggcgcagctcaaggctagcttggtatcgcgtggtgaggccacagagctgttcgcctgcgaacgtggtgatgggcttgcggcgctgcttggcaacctcgatcagagtgtgttcggcgagcccgcctatcctagtgttgaggccaaggcggcgcacctgctgtatttcgtcatcaagaaccatccattcgccgatggcaacaagcgtagcggggcgtttttgttcgtggacttccttcaccgaaatggccgcctgttggatgcgagcggccagccggtgatcaacgacattggactggcggcgctggcgttgttggtggccgagtccgacccggcacagaaagacacgctgatccgactgatcatgaacatggtcgcccctgccgggccggcaccgagaggatag

SEQ ID NO: 352347 - DNA, 483 bp, Pseudomonas aeruginosa
atggcggctatcaccgatccgcacaatgcgctagtcagcttccagaaagctctgcttagtggaaccatcaaacccaaacgctgcaaggtatgccgcgagttgtatttcctacgcgacaagccaacacctgacaccattcgcatgacatacgcacaggttgttgggcgtcaggtgaaggccttggccatgtacgttgaagttgcgccctacgaggggaaacgctgctttaacgtggggtatgcggtggctgtgccatatcgcaagaagggtttggctaaagcactgctcaccagcagtctggaagaattttcgggattgcttgcgaaggaactggcagagccaggtttctacgttgaggctgtcgtcggcgttgataacgagccatccaaacgtgtagccgggcagttcttcaccgagccgaaagagactgtcgatggtgaatccggcctacccgctcttcactacatcaaactcgttgagtga

SEQ ID NO: 352348 - DNA, 285 bp, Pseudomonas aeruginosa
atgagagctctgaattcgctgacccagaacctgatcgacaacctgacccagatcctgcagaaccccgaggaagatgccctgcagacgctcaggatatgcgctcctgtactgatcgaagagttgcagcagattcaactgagggcggtcgatcgccgggatatcgtcccgcagataaagcagctcctggatgaatggctgcaacaacatccacagcctgatacggcccaacaggcgctcatcgaggccgtggaccgcgcggaaaccccacagcggaggcaagcgtga

SEQ ID NO: 352349 - DNA, 591 bp, Pseudomonas aeruginosa
ttgctgaacaccgtaaacaacatcgccgaacgcgaccagttcaagggccggcccatcgtcaagatcaccgatgaagggcacatcatcaccaagcacccgctgctgctgccctacgccatgaagatcaccaagatgtggcggaaactgggtgcctggttctggctcgccacccagaacatcgatgacatcccagcctccggggcgccgatgctgaacatgatcgagtggtggttgtgcctgaacatgccccccgacgaggtagagaagatctccaggttccgcgagctgtcgccggcgcagaagtcgatgatgctctcggcccgcaaggaaagcggcaagttcaccgagggcgtgctcctggccaagggcaaggagtacctcttccgtgtggttcccccgagcctctacctggccctggcaatgaccgagaacgaagaaaagaaccagcgctacaacatcatgcaagccaccggctgcgacgagctcgaggcggccttgcaggtcgcagcggatctcgacaaggcgcgaggcctgccgcccttccccattattttcccagaccaaccggcagtggagtgccaggacgaatga

SEQ ID NO: 352350 - DNA, 2349 bp, Pseudomonas aeruginosa
  misc_feature (2258)..(2267): n is a, c, g, or t
atgagcctctttcaaaatcttctgcgcggtcgcacacagcctcagtcggtaccggcagaggctcccgaagattcaggagcgctggacgtagcggccgcggaagaagcgactgagcgctatctggcgcgactggccgccatgggtattcctctgcccaacaccgggagcaagaatggcgccacgcaggctgaagcgtcacgcctctacgatcacgacccatcgttcgtagacctgctgccctgggctgagtacctgcccgacgagcaagtgatgctcctggaggatgggcgttcgcgcgccgcgttcttcgagctggtgcccttgggcaccgagggccgcgatcccaattggatgcagaacgcccgggacgcattgaaagaagccctgcagaactccttcgacgagcacgaaacctcgccctggatcgtccagttctacgcccaggacgagatcagctgggacaatttccaggagcagttgaggcagtacgtccatcctcgagcgcgaggatcggccttcagcgagatgtacctggcgctcatgaagcatcacctggagggcatttcgaagccgggcggactgttcgtcgacaccgccgtcagcaagctgccctggcgaggacaacagcggcgcgtgcggatggtggtctaccgccggatccgcaacgcggatgcgcagattcgcggacaggacccggcggcgtatctgaaatccatctgcgagcgtatccaaggcggcctggcgaacgccggtatcgtcgcttcgcgcatgagcggccaggagatcaggaactggttgatccgctggttcaacccgcacccggatcacctcggcaagaccgatgcggatctacgtcgtttctacgaactggtctgccggccggacgaaccgatcctgcaggatgaattaccactggccgacggcaccgacttctcccaaaacctgttctatcggcagcctgtttccgatgccacccagggcgtatggctcttcgatgccatgccgcaccgagtgatcgtggtcgaccagttgaacaaggcgccgctgacagggcatttcaccggtgagacgctcaagggcgatggcctcaacgccctgttcgatcgcatgcccgaggacacgctgctgtgcatcaccatggtcgtgacgccgcaggatatgctggaagggcacctgcagcagctctcgaaaaaggccgttggtgacacccaggcatcgatccacacccgagaggacgtggccaccgtaagacgcctgatcggccgagagcacaagctctatcgcggagcgatcgctctgttcgtgcgtggccgcgaccatacccagttggaggaacgctgcatcaccctgagcaacgtgctgctcggcgccggcctggtgccggtcgaaccgcagaacgaagtcgcaccgttgaacagctacctgcgctggctgccctgcaatttcgatccgaacgagaagcgagccctggagtggtacacccagatgatgttcgcgcagcacatcgccaacctgtcgcccatctgggggcgcaccaccggtaccgggcaccctggcttcacgctgttcaaccgtggcggtgcaccgttgaccttcgacccgttcaacaagctggaccggcagatgaatgcccacggcttcatcttcgggccaaccgggtccggcaagtcagcgtccctgaccaacctcatcagccagatgctcgccatgtacctgccacggatgttcgtcgcggaagcgggcaacagtttcggcctgctggccgacttcgccaagcggtttggcctctcggtccaccggatccgcctcgccccgggctccggggtcagcctggcgccgttcgcggacgccatcaagctggtcgagagccccgacctgatgaagatcttggatgccgaagacatcgaggactcggttaccgtccagggcaacaagaccgacctcgaggacgaccagcgagacatcctgggcgagatggagatcgtcgcgcgcctgatgatcaccggcggcgaagagaaggaggacgcgcgcctgacccgtgccgatcgcagcgccatctgccaggcaatcctggcggcggccaggacctgcgccgccgcgaaccgcacggtactgacccaggacgtgcgcgatgcactctaccaggcctccaggagcgatggcaccgcgccagaacgacgcgcgcggctggccgaaatggcggaagccatgcagatgttctgcatgggcgccgacggcgagatgttcaatcgcgaagnnnnnnnnnngatctcaccgtggtggatttcgcgacctacgcgcgcgaaggctacgccgcccagctcggaatcgcctacatctcgttgctga

SEQ ID NO: 352351 - DNA, 1776 bp, Pseudomonas aeruginosa
atgctcaccgtcggcgtaggccaggatttcaaaccccactaccagatcctttcgggcaaggaaaagaccgtcgcacggctgcaggagctgcggcagaaagccgtggaagtctacgtcgcatccgacccggatcgggaaggcgaaagcatcggctggcacatactccaggctgccgggatcaagaactacaagcgcgttgccttcaaagagatcaccaagtcatgcatcagcgccgaactcagctcgccgcgtcgcctggacctcccgaaggtcgcctcgcaggaatgccgtcgcgtcatcgatcgcctggtggggtatctggtcacgccagagttgcggcgcgtgatgggcaggccaaccaccgccgggcgcgtgcagtccgtcgctgtgtacctggtggtcctgcgagagcgggagattcgcgccttcacaccaatcaagcatttcggggtggaactggccttcgtttcgcccagcgacggccgcacctggaaggcggagtgggatccagtgcccacgtttgccagcgaggaatttccgtatgtccaggatcgtcaactcgcagaactggtgggggctatacgcaatgtgatcgtcgagacctgcattgatggcgaagaaaccgatacgcctccggcgccgttcatctcctcctcgctccagatggcagccgggaatgcactgaagtggtcacccgacaagacgatgaaggtcgcccagcggctgtatgaacaggggctcatcacctaccaccggacggacaaccccaatatttcgaaggactcgatgccggatatccgtgctgtcgccaaggccttgggcctgaagtgcgttgagcaacagcggatgttcaaggctgaccaggacgcccaggaaggccaccccgccatcacccctaccgactggatggccgctaccgccggtgaaactgctgatgagcaggccctgtaccagctcattcgagttcgcgcgcttgccagccagatcgaagctgccgtgtacgcagtgagaaccatcaccctcctgggcgtcggccccgacaaaaagccgctgcgcttcggcgccaaagggaagctgttgaacgtgcctggctggagaaaactgctgcagggcgatgatgccgaggagcaaaagaacgaaacgccctcaaaccccatcccggcgctggagccaggccagatcctcaaggtctacagcggcgaggtcctggagaagaaaaccacccctcccaaacgcttcaccgatgccagcctggtgggcgagatgaagcgccgcgggattggtcggccatcctcctacgcctcgatcgtgaagaacatcatcgacaagggccaggtgcagatgaagggccgaagcctgatccccggcgagctgggcgaggccaccatagcgcttctggagcacaacttcagcttcctcagcctcgactttacccgcaacttcgaggtcgccctggaccggatcgccaacagcgaggacacctacatgaacgtggtccagcagttctaccagctcctgcagtcagagctgcagacactccgcgcgctccccagcgcacaggacgaaccacgcgcaagctccaccgccaatgtctcctcggcgccgaccagcgactacctctgcggcaagtgcggtctgcccctggtccgccgcaagaaagccggcaagggcggcttcgacttctggggctgcagcggctatcgcagcaccggctgcaaagtcagctaccccaccaaggacggccaacctgacttcgacaacccgcgcgggctatag

SEQ ID NO: 352352 - DNA, 168 bp, Pseudomonas aeruginosa
atggctgacgtcactgcctaccgaccgctcgagcacttccagaaaggcgagctgatgctcgagctcaagttgcgtgaaggtccttcgtgtatcacctggatggcagcggcgcacagccctgccctgactgcggaaagtcgcgctactggaccagcggttggagtgtag

SEQ ID NO: 352353 - DNA, 195 bp, Pseudomonas aeruginosa
atgcagctagcctgcgcgcatcgcctggcgttacagcgcacatggagcgatgcgggggctgacctgggcgaagtacatgcggcgttgaaacgctgggtaaccgaggcggaagccagcgggatacgtccgttgagggagtttgccgggctactgtgcagctacagcctgtacgctccgcggcagatcgtgccgtag

SEQ ID NO: 352354 - DNA, 1071 bp, Pseudomonas aeruginosa
atgggccaggaagacatcggagggaatgcgctcctggagcagcagctcaaccgcacggatcatcggctcgcgatggaagcgagtgcgcatccgcccctcatcgagggcgttggcgatcgccacgatgctcatgccctggtgatgggccatatagctgtggacgagcgccaccgccgtcgcgtcgggcagccgcgacggcgtgaagtccagcgcttcgtagaagccgtagcgcccgcgcgcacccagttcggccaggcgcgcgtagttaaacaacgccgcacgcggcttgatcatcgccgccaaccccgtggcatacggcgccaccaccaggttctcggccagaccgcgcttaagccccagccccggcacaccgaagttcgagtactggtaggtgaactccaggtcccgcgcgttgaaggccgactccgagatgccccagggaacacctttcttccgcccgtaggcctgctgcccctccaccaccaggtgattgctctgttccagcaggctgccgacgggcgcccgcatgaccagcgatggcatgagatattcgaacatcgagccagaccaagatatcagcgccgatgccgtccccaccggtgtcgccgtacgacccaggcggaaccagtggcgggtagggacatcgcctttggcgatggctatcaggctggccaagcgcgcctccgaggccaacaggtcgtagcaactgctgtccaggctgttgtcggccagggaataaccgatagaaaacaggtcacgctcggtattgaagaggaacgcgaaatccatcccggcgacgaaggcccgggcctgcttcgccacgctccgcacgcgagcctccagcaacggcgcagcggaaagcaggcggtcacgctggtgttcgaccacggagttcctcagtgcgtcgagccagaacagaagctcatcagaaactgcgtccactccccggggggccgatgccacggcatctctcacggctttctccgcgagccgccgcaatcctgccaagcccgtctcggcggactgcggaccatcgatctgcgcctggatctcttccacggtcgtacgtag

SEQ ID NO: 352355 - DNA, 498 bp, Pseudomonas aeruginosa
atgggtagcctggcttacttcccggcgatggatatggtccgccaggcgctgccgatggtgatgtcattcctgaagatggccatggtcatctgcattccgatggttctggtcatcggcacctatcaactgaaagttgccatgacgatgacggtcgtcttctttgcaatgatattcgtcgacttctggtttcagttagccagatatatcgatagcacgatacttgatgctttctatggttcgggatcaccacatctttcgttcgacccagtcatgggactgaatacggcgactcaagatgcaatcttgaacttcgtgatgggggcgatgttcattatattgcccatgctgtgggtaactgctgtaggctgggcaggcgtccaagttggagctctcctcagcgatctcagtaatggagtcaaaggggtccaacaggctggggcacagggtggtggcgtagctaagcaggcaatatcgtcgttctcacccaaaggggactaa

SEQ ID NO: 352356 - DNA, 492 bp, Pseudomonas aeruginosa
atgcaagcgttgagcgacaacatcgaagcgcgccggcgcttcctcaaccacctccacatcggaagccagtcctgcacgggcgaatatgccctcgaacaaatcatgactgagaacgctgttttcaccgatgcggccggccatggcggcttcaaaggcatctacatcgtagatacccttgccggtgtaagagccttcgccgaacaggtcctggtagacatccgagaccgcggctgcatatggatccattccacccggtccggagaacacccgctgataaagcgagccttctcggccaagcggcagtgccggcgtaacccggggctggaggatagcgtagccactaactacgcgctgagtcgccgcctcgaacagcggctggttcaaagggtgggccatcttgccgatcagacgccgcaacgtctcacgtggcagacgtgtgtcagcatccagggtaatgacgaaccgcaccccggaaggcaccgtcggtcctga

SEQ ID NO: 352357 - DNA, 681 bp, Pseudomonas aeruginosa
atgggcagtgccgtgggtcggccgcagcaagatgctcgacaacctgcgccgttcgctgcttgcgccttccgccgcgctcgcgctgctgttttcctggttgctgccgatgcctcaggcgttgttcggcagcctgctactggttgggagcctggcactcccggcctgtctgccggtgtgcctaggactgtggccacggcgtcgcggtatcggcctgcgtcatcacttcagcgcctgggccgccgaacttcggcgcgctctgttacagacgctgctgtccctggcttttctggccgatcaggcttggcgcatgggcgatgcgatcgtgcggacgttgctgcggatgttcgtcactcgtcgccatctgctcgagtggaccacctccgcgcagtcggtggggaaaccgcgtcccgggttggctatcagctatctacagatggttggcggtacctccctgatacttggcgcggcggcactggtgctgtatttgcagccgtcctccctggctctgggcgtacccttcatgctgctctgggcactggcgccggccttggcggtatacagcagtcgagtgccgcggccgtcgaagcgcaaggtcctggcgccggaggaggcaatggggctgcgtttgatcgcgcgacagacttggcgattcttcgaaacctttgtcggcgccgaggataa

SEQ ID NO: 352358 - DNA, 621 bp, Pseudomonas aeruginosa
gtggccatccttggccggtgctgcaggggggaacacagtggtggattcaggcttcttagtcggagcggggctggttgtgatcggcgtcggcgttggcaccgaggcgaccacgacgggcgactccagcgtgctgactttttccgtggaggagggttgcgctaccgccgctggagttggggcagcgggcttcgcatacagttgctggaccggtttcggcctcggcgccgggggaagttgatagcccgggcgcagtacgaagcagacctgccgcgccacttcgtcgaccttcacctgccaggcagggccggagaggacttggagggtgttgcgcagggtcatggggccgagcttgtactgagctgccggcagcggccgggtgtagaggatgttcacatgaccggcctctgccgggcacagcgagtaacccgagcggctcatcacgtactgcatggcgtccttgacactcgggttcatgctcgacgggatggtcacgtcgatgatctgtgccatcaggtcgcgctggccagcgtccggctggctccttctccggttgtacgccattcgggtacaggtccggagagagcaggtccggattgcggctgctgtcgaaggctggcctag

SEQ ID NO: 352359 - DNA, 609 bp, Pseudomonas aeruginosa
gtgatttccaacgaccagaacaaccagctcaacaacctactgctccaggcgcccgatggccggctccggctagcaaacctcatgccgtccctgaaacagggctacgacctggtgctgatcgacacccaaggtgcgcgctccgctttactcgaaatggtcgtgctcgcatcggatttggttgtttcccccctgcagcccaacatgctcactgcccgcgagttcaaccgcggcaccatgcaaatgctcgatggactgcgcccctacgagcgcctcggcatgcggatccccaaggttcagatcgtcatcaactgcctggaccagaccaatgactcccgggcgattcacgagaatgtgcgtgccatcttcgatgagcatcaggatatttctgtactcgaaacgactgtcccggatgccgtcgtgtttcgcaatgcagcatcgcgcgggctaccagcgcaccgcctcgaaacgcggcaaccctcgaatcgcacatcagcgcccgcgctggaaatcatccgtaacctggccatcgaggtctttcccgagtggactgaccgcttcctcgcgctgacgccggaggcggtagcagcactggtcaagggagggcgctga

SEQ ID NO: 352360 - DNA, 831 bp, Pseudomonas aeruginosa
atgtcgctgtcgcgtgccacgggcaccctgaccgttaccgaccgtccagaggtcctcaaccgtgtccagcagctggtcaaccgggagaacgagagcatcaccaagcaggtgctgctgaacgtcaacgtgctctcggtcgccctgaccgacaaggatcaactggggatcgactggaacctggtctacaagtcgctcaacaacaagtggggcatcggcttgaagaacaccatgccgggcatcgatcaaagcgcgatctccggctccgtgagcatcctggataccgccaacagcgcctgggcaggatccaaggccatggtccaggcgctggcccagcagggccgcgtctcgaccgtccgctccccgtccgtgaccacgctcaacctccagtcggcgccgatccagatcggccgctacgacagctacctggcctccagccagatctccaacgtcgcccaggtcggcagtaccacctcgctgatcccgggcgccgtgaccagcggctacaacatgagcctgctgccgttcgtgatggaaagcggcgagatgctgctgaagataaacatcaacatgacctcccggccgacgttcgaaatgcagaccagcggggactccaaagcccagttcccgagctacgacatccagctgttcgaccagaaggtacgcctgcgcagcggcgagaccttggtgctctccggcttcgaccagaccaccgaggacaccaacaaggtcggcaccggcgacgccggattcttcggccttggcggcgggctgacccgcaataccaaacgcgaggtcatcgtggtgctgatcacccccgtcgtgctgggctga

SEQ ID NO: 352361 - DNA, 318 bp, Pseudomonas aeruginosa
atgcgcctgatctctgccatcgactgggcgaaactgttcgaaagcgtgagcctggttgatgcccgcttggatgcggacggctccttcggcaggatggacttccccacccggaacctctatcgcagcgccatcgagcaactggcccgcagcgctccgctcagcgaactggctatcgccgaacaggcgctggcgaaggcacactccaccgcggcgcccggcatactgggtcattgtggctcggtcgtctcggcggacgtctggggatcctcggctatgtcggcgcaacgctgctgctcagcgggcttctgctcggcgtga

SEQ ID NO: 352362 - DNA, 186 bp, Pseudomonas aeruginosa
atgcgtgcccccctgaagaacctcttgccttgcctcctgatccccgcgctggccagttgctcggtcacgcgggtgaacgagtcggcggatcgtgtcgaagctacggcagattccgcgtcgacgatcgcagcacagatgcgcaacacccgcccggatcgccgcgatacggtggtgttctccgactaa

SEQ ID NO: 352363 - DNA, 156 bp, Pseudomonas aeruginosa; identical to SEQ ID NO: 338804

SEQ ID NO: 352364 - DNA, 567 bp, Pseudomonas aeruginosa
atgtcttttttcgattcggaaaaactgcaaagcgcacagaaagccaaccttgacctgttgcaacagatcagcggcaaagtattcgagagcgtcgagcagctcagtcagttgcaattcaaggcgctacgcgcttccagtagcgagcagttcgacagcctgcgcaagctgctgtcggtgcgtgacccgcaggccttcgccgagttgcagacgtccttcactcagccagttgctcaggctgagcgcctgctggagttcaatcgagaggtgtatgacctggtctctagtactcagacggatattgccaagctcgccgaacgccaagtcgaggccggtgccaagcatgtgcaggaattggtggatgtcatcgccaagaacgccccagcgggcgcagagccggcggtagccgtcctcaagtcggcactggaaagtgctggcagtgtctatgaaagcgcacagaaagccgccaaacaggcagccgagatcgccgagaacggcatcgcagccgccgcttccgcggcaggtcaggccacccgtgaagccagcaagactgcgggcgggcgcaagtaa

SEQ ID NO: 352365 - DNA, 2547 bp, Pseudomonas aeruginosa
  misc_feature (436)..(436): n is a, c, g, or t
atgagccaggaaagtttttttgcaaagcgagaagagagtttttcctcattccataatctgttcgaacacctcggacgcctacagcagctgcacgggaagctcctgctcgatgcctttggccaacgccatgagacgctgctcgcgcccctgagagaaggtcgcctgcgtgtccccagcgcaggcgattgctgggaatacctggtcgacttcggacagcgaggcctgctgttctgggatgcactgcgccaacgtggcgacaataccctggcccacgagcgcgccggctatcccctgctgctcaagtttccctatgaggtgctgatcgacggccatgacctgccccacccggtcaactactccctgctacacatccttccaggggatgaacatccgagcgatgccacgcgccagccggtcatcgtcatcgacccgcgcngcggtcacggtgccggtatcggcggcttcaagcaggactctgaaatcggcgaaagcctgcgcgccgggcacccgacctatttcattgctttcagccatgcacccgcacccggccagaccctgattgacatcgccgatgctgaggcccgctacatcgaaacagtcagcgcgcgccatccggagtccggcaagcctgtggtgattggtaactgccaggccggctgggcgttgatgggactggccgcggcacgtccggaactgccagggctggtgatcatcaacggtgcgccgctgtcctactgggctggagtcaacgggcacaacccgatgcgctatgccggcggtctgctcggcggcgcctggatgacccgcttgggcagcgacttgggcaatggccgtttcgacggcacctggcttgttagcaacttcgagaacctgaacccggccaatacctactggagcaagtactacaagctgttcagcaacgtcgataccgaaaccccgcgcttcctcgatttcgagcgctggtggggcagcccaaccctgctcaacagcgaggagatcgaggtgatcgtcgacgacctgttcatcggcaaccgcctggctggtggttccgggcgcaggaccaccagcatcgacctgaaacgcattgaggcgcccgtggtggtgttctgctcatacggcgacaacataaccccgccgcagcaggcactgaactggatagccgacgtctatcccagcgacctggcactgcgcaacgctgggcgcactatcgtctacctgcagcacgccagcatcggccacctgggcatcttcgtctccggcaaggtcgcccgtcgtgaacaccggcaactgctcggcgccatcgatgccatcaccctgctgtcgccaggactgtacgagctggtgatcgacgacctgccggcatccgccagtgacgaccaggcgtatcaggtacatttcgaatcccggtgcatagccgacattctcggccacgatgaggatggccttagcgacgaacgtgaattcgccctggtcgatcgcgtctccggattcaacagtactctctacgactggttcgtgcgtccctggatgcacagggcgatcaacgaaccactcgccgaatgcttgcgcaagagccatccgttccaccagcagcaagtcgtctggagcagtctcaatccaaccctctggtggctggcgggccatgcagccctgacgcgcgccaatcgccgcccggcatcacccgacaatcccctgttcggctggcaagaggcattctccagctcggtcgaggctctgctcgatggctatcgtgacgtccgcgacgcggtccaggagatgctcttccatagtttctacggtgggcttagcaccctgactggcggccagacaccacgctcgccgcagagctacgtagagcagcgcgataaggctctggtcgagcatctgcacaactcgcttctcaaggggggggagcaggaagcgctcattcgtattctctgcctgctcgcgcatgcaagcggcagctttggcaaggaacgtatcgaacagctcgcccagcaggcccgcgcgctctcgcaacaactcggcatcgacccgctttccgtgcgtgacagcgtccgcctgcaggatttactggtcttcgccctccccgaagagagtttgaagatgttgccattgttgcttcccgaggctaggcagcgtgaggcagtgctggcagccgccgtgcacctcgtgcccgaactactctacgccgagggcgcagtgggcgaactctggcgccgtttgcacgacctgcttgaacaccccctgccggccttcgcacggccatccgttccgctcatcgctgtggacagcgcgccagaacaagccccgtcagggctgctcctccccgaggcggatgtccatgcacccagggccggcgcacagccaaggaagaaaaactctgcccagcctactgaggcgcagatcgataccagcccacccccagtggcggccgagagcaagggccccgtggccgcggtgaaaaaagcgggacgcgccaaggcgacccgctccgtgcccgcccatgtccccgcgagcaaggacaaaggaggccgcgccgaatga

SEQ ID NO: 352366 - DNA, 933 bp, Pseudomonas aeruginosa; identical to SEQ ID NO: 350067

SEQ ID NO: 352367 - DNA, 1209 bp, Pseudomonas aeruginosa; identical to SEQ ID NO: 350068

SEQ ID NO: 352368 - DNA, 441 bp, Pseudomonas aeruginosa
gtggtggtgaccgacgagcaggacctggtcctggaagtcgagcgcttcaccgagggcaagggcgtcaatgtcatccttgacgaattgggcggcccgcagatgaccctgctcggcgatgtctccgccacccgcggcaagctggtgctgtatggctgcaacggcggcaacgagtcggcgttcccggcctgcgccgcgttcaagaagcacctgcagttctaccgccactgcctgatggatttcaccggtcatccggagatgggcctggaacgcaacgacgagtcggtgagcaaggccctcgcgcacatcgagcaactgacccgcgatcgcctgctcaaaccggtggtcgaccgggtattcgagttcgaccaggtggtcgaggcgcaccgctacatggaaacctgtccgaagcgtggccgggtggtgatccacgtcgccgattga

SEQ ID NO: 352369 - DNA, 1236 bp, Pseudomonas aeruginosa; identical to SEQ ID NO: 330660

SEQ ID NO: 352370 - DNA, 603 bp, Pseudomonas aeruginosa
atggcacgaaaggccaaaaagatggctgctgccatcgagctcggccaggaggaacttggccaacttctgacgtacgaccccgactctgggcttctccgatggaaagagaaaccgctattggggttgccatcagatcgcctggccaaggggtggaaccgaaagtttgccagtgctgtggccggtactcgcaagcaaagcgccggaaaggaatatacccagatcaacatcaaggggcgctattacccctgccatcgaatcatctgggtcatggtgcatggagcgattgatgaaaccttggtgatagaccacatcaatggagatggccgcgacaacaggcttatcaatctccggcttgttacccactcccagaaccaaagaaaccaggtaaagcgtcggacgaacagcagtggagtgacgggagtttaccgttgctgcaataccggcaaatggactgggcaaatcaccgtggatggtcgccatctgagcatcggcagttatgcgctgctagaggacgcggcgaaggcgaggaagcgcctggagcgcgagcatggctatcacccactacatggcatggccgcaagcctgaaggcgatgtcgatatag

SEQ ID NO: 352371 - DNA, 243 bp, Pseudomonas aeruginosa
atggcgcaagtcctggctgccgtaccggtcgccggactcgatgccgtgctggtagccgttgagctggtactggagagcggcagcctgagcgccgaacacatcctcaatgtcgtggcacggctgacagcatccgaaccaccacccagcgtcgaaacccacttatcgctcaaggaagcccccgtcgctaacacggcgcgctacgaccgcctgcgtggccaggccgaggaggtcggtcatgcgtga

SEQ ID NO: 352372 - DNA, 726 bp, Pseudomonas aeruginosa
atgaccagccgcgagatcgcggatcttgttgggtcgcgtcacgacaatgtacgcgtgaccattgagcggctggccgagcgtggggtgattgctttacctgcaatgcaggaaaagcccaccgctggccgccccactcaggagtatgtcttcaccggcgaccagggcaagcgcgacagcatcatcgtcgtcgcccagctctgcccggagttcaccgcgcggctggtggatcgctggcaggaactggaacagcaggcttcccggccactgaccgccgccgagcaactactggccagcgtgcaactcaccgtcgatctggagcggcggcagcggcagaccgagcagcaggtggcagcgctgaccgaaaccgtcggcgacatggaccgatcgcacccgctgctcgactcgatccccaacggcatggagagcatcaccgctatccggcagcggatagggaagcagtacggccttccgcccagggtgatcgacgcggtggtgcgcgacatgccgcacagcccgcgccccttcgccatggtgcgcagcaagcacgaggaactgaacgcgcgcccctacgcggtctgggcaaaggccgagatcagcagggtgttcgagcgcttcgcgcgcggctgcaccttcgtgacccaacaccgagccacgcacccggatttcggcgccggccgggagcgcttccagatgcgcggcaccccttcgcaggagatcggcgaatga

SEQ ID NO: 352373 - DNA, 975 bp, Pseudomonas aeruginosa; identical to SEQ ID NO: 335832

SEQ ID NO: 352374 - DNA, 231 bp, Pseudomonas aeruginosa
atgaacgttctctgctggctgctgatattcgccggcggcatcaaggagcaaggagccgcgaacctgctcgcccgcccttggctctccatccctaccggcgctctgcacgtggcggccctggccctcacagatcaccctgcactcgcggcttcgagcctgctggtgcaaatggcttgctacgccctcgcctaccaggcagtgcgcagcgccaagcaagggggtgacctatga

SEQ ID NO: 352375 - DNA, 813 bp, Pseudomonas aeruginosa
gtgagcggcctttcgaacggaacggcaactcatgccatcgaggtgcgcgcgctggacaaccgcttcggcgagcagcaggtgcaccagaacctggacttggacgttcggcgtggcgaaatcctgggtgtcgtcggcggttcgggcaccggcaaatcggtcctgctgcgtagcatcgttggtcttcagcgcccgcatgccggcgtggtccgcatcgaaggcctggatctgctgcagctccacggcgcagcgcgcacgcatctggaacggcgcttcggcatcctgtttcagaagggtgccctgtactcgtcgctgagcgtgaccgagaacgtcgccctgccgctgatcgagcacgccggcctgccgcgtgcccaggccgagcacctggcgcgcagcaagctggcgctggctggcctgccaccggatgccggcgacaagtcgccggcatccctgtcgggtggcatggtcaagcgtgcggccttggcgcgggcgctagccttggacgcgggcatcctattcttggacgagccgacggcaggactggacccgatcggcgcagccgcgttcgaccagctgattctgaccttgcgcaatgcgctggggctgaccgtgttcctggtgacccatgacctggactcgctctacacgatctgcgatcgcgtggcggtgcttgccaatcggcaggtgcttgtcaatgacagcatcgaggtggtggagcgcttcgaccacccctggatccaggcctatttccacggaccgcgcggccgcgcggcggcgcaggcgcgcgccggatccacgagcgcggcgccgccgtga

SEQ ID NO: 352376 - DNA, 930 bp, Pseudomonas aeruginosa
atggagccccgtgcccgccacgtcgccatcggcgtcttcgtccttttcctggccgcgctcggcttcggcgtcgcgctgtggcttggcgacgcccgttccgaccgtgacttccactactaccgcgtcatgttcgacgagccggtgaccgggctctcgatcggcagcccggtccagtacagcggcatcaccgtcggtgaggtcgctgctttgtcactgctgcccgaggacccgcgccgggccatcgcccgtgtgcgcatcgagacctcgattccgattcgccaggacacccgggccgaactggtgatcaccggcatcaccggcgctgcggtgatcgagctgagcgacggtggtcctgacgtgccgctgctacccaggaaagagggcgaggaaccgctgatcctggcgccgcgctcggctctggcttcgctggtctccggcgacggcaacaccatgaccacgatcaacggcatcttgctgcgcacgcatgaactgttctccgaagagaacgtggcactggtgcataagaccttggtgaacctcgaggacaccaccggcacgctcgccggacagcgcaccgagctggccgggctggtcaagaacctgaccgaagcgagccgggaatcaaccgcggcactgcgccaggccaatgccgtgatcgacgatgcccaagcgatcctcaacgaggagggacgccccgcactggccagcacgcgtgaggccatggcctcgctggagcgtagttcggcgcggatggaagccctattgcagcgcaatgcggcctcgctggatcagggcatggccgctaccggcccggcgatgaacgaactgaggcagtcactggccagcctcaacaccgtgctgcgccgtctggatcgcaaccccgccggctacctgctcggcagcgagaacatcgaggaaaccaccccatga

SEQ ID NO: 352377 - DNA, 711 bp, Pseudomonas aeruginosa
atgacccatgcttcccgcaagctgcccgcgaccttcgcggcgctcctgctcgccgccacgctgccggcctgcagcatcctgcccaagcaggcgccagccgccacctaccaactgccgttgcagcacccggcacaggcgcgcagcggcgtacatgggccgcgcgccgatggccccatactggtcatccattccccggcgagcaatcgggtgctcgattcggaccgggtcatcattgcccagcccgatggacgccttgcggcctggcagggactgcgctgggccgataccgcaccggtcctgctgcgcgaccgcctggccgaagccttcatccaggatggacgactgaccgtgcacgtggacagtgcggcgcccgccgccgaactggacctgctcggcgcgctgcgggcgtttcaggtcgaacagcgcggcaccgcgccggtggtggcgatccggctcgacgcgcaactggccgagcgcgaccgtgcgggcgccggcgtcagccggcgctttgaggtggtgcatgccgccgcgagcaaacgcgagaccgacgtgatagctgcgttcggcgccgcgtcggatgcgttggctgcccaagtcgtcgactgggtcctggagcagcccacggcatccgccaccggttcggacgcgcgcgcgcgccacgccgacctgccatcccccgctgcggccgagtcgtcgcactcgactaggtaa

SEQ ID NO: 352378 - DNA, 288 bp, Pseudomonas aeruginosa
gtgacgagcgcccagactttcggcgcggcccggatcctgcagtggatcgttgatccggccaagttcatcgtctcactgaaacagctggcactgcgcgccggtatccgcatccacgtgcgcagccaggtctccggcatcaacgaggttggtgcgggagtgcgcgtcgataccttcgccggtaaggtgacggccgccaaggcgatgccgtgggtcagcgccttgccgccgtcacattcacaagcctgccaggttccgcctgcagcctttctgcttggggttctatcatga

SEQ ID NO: 352379 - DNA, 1152 bp, Pseudomonas aeruginosa
atgctgcacatgatcgcggcaggtacgcgcgatgtttcgcagcagcaaacaccctacttggcgcaggcgcgcgataccggattcgtctaccagcctggcgagctgtgcggcctgaatcgggaacggcgagaactgcagatcgccgcagtctacgctgacgacgggcgacttctgattcccggccgcatagttggatatgacactctgattattgccatcggcagtcaagcgaacgacttcaggacgcgtggtgccgcaaaccactgttaccggatcgactcgcgcgagcaggccgatgcattcaaccgggagattcgacttcgtgtcctgcagtgcgtggcgcaggatgcccaactctcaatcgggatagttggcggcggcgccacaggcgtggagttggctgccgaattggtgcaactggccgaatcagcggcggcgtatggcgcccacgacctgatgtcgcgcatgtcagttgctttaatcgagagcggaccgcgattactggccgcctttcccaaagacatctctgaagctacccgagcgcgtttggagcaattgggtgtccgtgtgtacaccgacacacgggtcagcgcagtggatgccgatgccttcctgtttagcgacggcactcggcgggaggcatccctaaagatctgggcggccggggtcaaggctgcgaacttgctgtcgaatctagcggggctggaagcgaatgctatcaaccagttactggtacggccctcgctgcagacgacgcaggacccgcggatctacgccgtgggcgattgcgcgagccttactttgtcgggcaaccagcgctccttgccgccgacagcacaggttgcacatcagcaggcgcaatacctcatccgccaacttccgcgcgtgatcgagcgaggcttgacgccccctgacttcgtgcaccgcgaccttggatccctggtgtcactaggcgagtacgacgcatttgcgtcgctgggcaagttcggcctgctcaaggggacaacgctacgcggaaggctggcgcaggccagccatgtgctgctctatcgtagccaccaggcacgcctgcacgggatcattcgcggtagtctcttgtggctggttgatcagctcaacgcacgtttacgtggatcgatacgacttgattga

SEQ ID NO: 352380 - DNA, 810 bp, Pseudomonas aeruginosa; identical to SEQ ID NO: 169898

SEQ ID NO: 352381 - DNA, 867 bp, Pseudomonas aeruginosa
atgacgccagaatcaaaagcacgccagcagattgaccaaaagctcgagcaggctggctggatcgtccaggacatgaagcagctcaatttgggtgcggcgcgtggtgtggctgtgcgggagtttcacactgactccgggccggcagattacatgctttttgtggaccgggccccagtgggggtaatcgaagctaaaaaagacagcgcgggcgaaaacctcaccgtcaccgaaagccaaaccgagcgctacgccaacgccacactcaaacatcgtaaggacaacatcccgctgcgtttcttgtttgaggccaccggccagattatccgctttaccgatggcgcagatccggtgccgcgttcgcgcgaaattttccacttcttcaagccggaaacgctggccgcctggctggcgcagcctgaaaccctccgtcgccgtctggccgaacaaatgccagcgctgccagaaagaaatctacgcgactgccaaatcagcgccgttagcgggctggaaaaatcactggctttgaacaaaccccgcgccttggtgcatatggccaccggcgcgggcaaaaccttcaccgccatcacctcggtctatcgcttactcaagttcggtggtgctaagcgcatcctatttctggtcgatacccgcaatctcggcaagcaggcccatcaggaattcatggcctacacgccaccggacgatggccgcaagttcactgagttgtacaacgtgcagcggttggcctcgcccaatatcgatccgcattcgcaggtgtgcatcagcaccatccagcgcatgtactcgattctgagtggtgagccgattgatgagtctgccgaggatgtctcgctcaacgaagtatag

SEQ ID NO: 352382 - DNA, 678 bp, Pseudomonas aeruginosa
atgatcgcggcatccactcaagcgaacgccctgagctacatcggcggcgttccaaagagcctgtcgtccaaccgaaccgtttcggacccgaacaccgtgccggacgagtgcggattctatggcatcggcgccggtccttactcgaacttgccgccaggcatcgatgctctgaaccccatcggatcgatgctctatcaccatccatacgacgtcgcgaccgcagtgcaactattcgtgccgcggacctcgaacatcctgtatttccgcaggagggtcgccggggcgtggcagtcgtgggttcgcgtgctgtccgacgctcagttgctgggtacagtggctcagtctggaggagtcccgcttgggtcgatattggagcgaggcagtaacgcgaacgggcaatacgcccgactcgccgacggcacgcagatttgcacgatcagcctgcttggcgccaacgaccgcatggcgaacacaagctacacactcacattgccggcggcgttcactccagattggaccgtgggggtatcggtatcctgggcgtcgcacgcaacgaaccctgcaacatacaacggcgtgaaggtggcatatgcgaacggcacctcggtgacgttcatcctggctgagaacctcacgacaaaccgtttgatcttttcctgcatagggaggtggttctga

SEQ ID NO: 352383 - DNA, 228 bp, Pseudomonas aeruginosa
atgagcctgatggagaacgtgtcacccgtgtacgaggccgaagacggccgccgcgttgaggcaatcgcgaagaccctgatgtccgagtttttccagcgccagctgaccgaagaagccagcgagcacaccacgctgcgcgccatggcgagaaggagtgaaccgcttgcccttcagtgcgtgaacgtggccgccgtgctggtcaactatctgcgagaagaactggagtaa

SEQ ID NO: 352384 - DNA, 207 bp, Pseudomonas aeruginosa
atgaacactcaagctcaagcattccacctcatgatcgaggtcaagtatggcgatagcccgtcgcattggcatccggctttcgaagctgagacccaagaggaagccaacgagctgatccagcacttcccgctggcctacggtgaagtttcccgccgcatcgtggtaggcgccccttccatggactgcacagaactgcggccctgctga

SEQ ID NO: 352385 - DNA, 192 bp, Pseudomonas aeruginosa
atgagaggctccgacattccaccaccaccagggtatcaccctaccccgctcgccaccctcggccagcagttggtccgcctgggccaggcgatgcagaaccccaacaccaagctcggcgagttgaccgaactggtccaggcctgcggggtcgacctgcggatctgcgacacgaacaaggagagccggtcatga

SEQ ID NO: 352386 - DNA, 729 bp, Pseudomonas aeruginosa
atgctcgcggcatccactcaggcgaacgccctgagctacatcggcggcatgcccaaaagcttgtcgtccggtcgcgcagtaagcgacccgaataccgcgccggacgaatgcggcttctacggtatcggagcaccgccgtggtcgaacttgccgcccggcctggagtcttttaaccctatcggctcgatgctctatcaccacccgtacgacgtaagcaccgctgtgcagatgcttatcccgcgtactctcgatttcatgtacttccgtcgcaaggcggttggaacgtggcagccttgggtgcggatgctttctgataaccaactcgtaggtacggtatctgtcgatgggtcgaatgctccgaacggcgcgattatgcaacagaacgggaccacggctaccaacgttggcaccagcctgcgttttgccgacggtactcaaatcgtctacgcgaggcttcgtctagacttcagcgcggttgacatcctgacccgtcagtacacgttccccatgtcttttttctcgccgccgaatgttaccgccaccttgatccaaggccagcaggcggatatcaacccgttgcagttccagcagctcgggccggttctcgtcgctgctattacggtcagctcgtgcaacgtccgagtcatgcgcccgacctacgtgtcgggtagctgggctgcggggaacttcatcgaatgctctgtgattgcttcggggaggtggcgctga

SEQ ID NO: 352387 - DNA, 363 bp, Pseudomonas aeruginosa
atggcaaccccaccctatcccgaggacgagcattcgagacaggcctacgtcgaccaactcggtctgctggaaaaaggtgcggacgaggtattcgaggaaatcctcgccgccgctacgtcctacttccagacgcccatcgcgctcatttccatcctcgaccatcagcgccagtggtttcgcgcgagcatcggcctcgatatccggcagacgccgcgacgggattcgttctgcgcctatgcgatcctgggcaagggagtattcgaggtggccgacgccaccctcgacccgcgcttccgggacaacccctattgtagcgcggcgcgaaatttggcgcggatttgcgcaataaatgacgcgccctaa

SEQ ID NO: 352388 - DNA, 1365 bp, Pseudomonas aeruginosa
atgaacttcgcctgcgaacaagaagcccaggatttcctggccgccaatcccgatatcgaactcttcgaactgttcatcctcgacgccaatggcgtgccacgcggcaaactgctgcaccgcgacgaactgctggccgtctaccgcagcggccggccgctgccgagcaccatcctcgggctgacaatgaacggcgaggatgtcgaggactccggcctggtctgggacgtcggcgacatcgactgccgcgcctaccccctgtccggcagcctggtgcgcctgccctggcggcagatcccgacggcggcggtgcaggtcagcatgcacccgagcgagggcctgcccgccagcgtcgccgatccgcgccacctcctggtgcgcaccatcgacgcgctgaagagcgagggctatcacccggtgatggccgctgagctggagttctacctgctcgaccgtgagcgcgacgccaacggccgcccgcaaccggctcgcgacgccgatggcggccgcccgcgggcgacccaggtctacggcctgcgcgaactggagcagatcgagccgttcctcgccgacctctatgccgcatgcaaggcgcagggcctgccggcacgcacggcgatctcggaatacgccccgggccaggtggaaatcaccctcgaccacggcgacgccctagtcgccatggaccaggcgatccgctacaagcgcctggtcaagggcgtcgcgcacaagcacggaatgctcgcctgcttcatggccaagccgttcgacgacctggccggcaccggcatgcacctgcacgtcagcctggccgacgaacaaggccacaacctgttcgccagcgacgaccccgccggcacgccgttgctgcgccaggcggtcggcggcatgctcgccagcctgctcgactcgctcctgctgttctgtcccaacgccaactcctaccggcgcttccaggccaacagctacgcgccgctggcgcagacctggggcgtcgacaaccgcaccgtgagcctgcgcgtgccgggcggcccggcctccagtcggcatatcgagcaccgcatctgcggcgccgacgccaacccctacctggccgccgcggcgcttctcgccggggtccaccgcggcatccgcgaaggcatcgatccgggcgcgccggtggagggcaatggctacgcccaggccggcaagcgcctgcccaccgactggctgaccgccctcgacgccctgcaaggctccgagtgggcgcgggaagccttcggcgagccgttcctcggcgtctacctggcggtgaagcgcgcggaataccggcaattcatgggcgaggtcggcgagcaggactggcgctggtacctgacccaggcctga

SEQ ID NO: 352389 - DNA, 1311 bp, Pseudomonas aeruginosa
atgaacgcagcaatccatccccgtccggccgcggaacgcgcgccgtcctactacgccgccacgctcaacgaggaaaccgactatccgaccctgctgggcgcggtgacggtcgacatcgccatcatcggcggcggcttcaccggcgtcgccacggcggtcgaactggccgagcgtggctacaaggtagccctggtcgagacccatcgcatcggctggggcgccagcgggcgcaacggcggccaggtcaccggcagcctgtccggcgacgcggcgatgcacaagcagatgcgccaatggctgggcgccgaggtcgaggacttcatctggcacctgcgctggcgcggccacgagatcatccgccagcgggtggagaagtacggcatcgcctgcgaccttcgccatggccacctgcacgcggcgatgaaggccagccacatgggcgagctgcaggcctcctacgaggaggcggtgcgccgcggcatgggcgaccaggtggtcctgctggacaaggccggcgtccaggcccacctggagaccgagctgtactgcggcgcgctgaagaacacccgcaacatgcacctgcacccgctcaacctgtgcatcggcgaggccagggcggcggccggcctcggcgcgctgatcttcgaacattccgaggtgctggatatcgtccacggcccgcggccggcggtgattacccgcgagggaaggatcgaggcgcagcagatcctgcttgccggcgatgtctaccacaagctcgaacgcaggcagctcaaggggatgatcttcccggccatgggcggaatcgttaccacccggccgctgggcgagctggcacgggagatcaacccgcaggggctggcggtctacgattgccgcttcgtcctcgattactaccgccccaccgccgacggccgcctgctgttcggtggcggcgccaactactcgggccgcgactcgcgggacatcgccgccgagctgcggccatgcatcgagcgcaccttcccgcgcctgaagggcgtggagatcgagttccagtggagttgcgccatgggcatcgtgatgaaccggatcccccagctcggcaagctctccgacaacgtctggtactgccagggctactcggggcatggcgtagccaccagccacatcatgggcgagatcatggccaaggcgatgagcgggagcctggagcagttcgacaccttcgcccgttgcaagcacctcagggtgccgctgggcgacctcttcggcaatccgatgctggccgccgggatgtggtactaccagctcatggagaagctgcgctga

SEQ ID NO: 352390 - DNA, 240 bp, Pseudomonas aeruginosa
atgacccattctgtcgacgccattctcgacgccaccggcctgaactgtcccgagccggtgatgatgctgcacaacaaggtccgcgacctggcgcccggcggcctgctcaaggtgatcgccaccgatccctcgacccgccgcgacatccccaagttctgcgtgttcctcggccacgagctggtcgagcagcaggaagaggcgggcacctatctctactggattcgcaagaaggccgactag

SEQ ID NO: 352391 - DNA, 1059 bp, Pseudomonas aeruginosa
atgaataccctgttgatgcactgccggccaggcttcgaaggtgaagtctgcgccgaaatcgccgagcatgcagccactctcgagattcccggctacgccaagagcaagccggccagcgcccacgtcgagttcgtctgccaggacgccgacggcgccgagcgcctgatgcgccgcctgcgtttcgccgacttgatcttcccgcgccagtgggcgcgcgggcccggcttcatcgaattgccggaaagccagcgcatcgaggtactgctggcggaactggcgagttatccggtttgcggcagcctctggctggaggtgctggacaccaatgccggcaaggaggtgtcgaccttctgccgcaagttcgagaaaccgctgcgcgcggcgctggtgaaggccgggcgcttgcaggaggacccggcgctgccgcgcctgctgctgaccttccgctccggccgggaagtcttcgtcggcctcgccgagccgcgcaacagcgcgctctggccgatgggcatcccgcgcctgaagtttccccgcgaggcgccgagccgttcgacgctgaagctggaggaagcctggcaccagttcatcccgcgcagcgaatgggacaagcgcctggcgccggacatgctcgccgtggacctcggtgcggcgccgggcggctggacctggcaactgtttaaccgggagatgcgggtgaccgccgtggacaacgggccgatggcggagaacctgatgtattccgggctggtcgaccaccagaaggtcgacggctaccagtaccgcccgcgccagcgggtcgactggatggtctgcgacatcgtcgagaagccggcacgcaccggtgcgttgatcgagacctggatcggcgaagggctttgccgcgaggcggtggtcaacctcaagctgccgatgaagcagcgctacgccgaggtgcgcaagatcctccagcgcctgcgtgagagcttcgacgcgcgcggcctgaaggtagcgatcggctgcaagcagctgtatcacgaccgcgaggaagtgacctgccatctacgccgcctcgaacgctga

SEQ ID NO: 352392 - DNA, 2733 bp, Pseudomonas aeruginosa
atgcctgctttggacagcctgaaaacccttcgcagtctcgctgtggacggcaagacctaccactactacagcctcccggaagccgcccggaccctgggcgatctcggcaagctgccgatgtcgctgaaggtcctgctggaaaacctcctgcgctgggaggacggcagcaccgtcaccggcgacgacctcaaggccctcgccggctggctcagggagcgccgctccgaccgcgagatccagtaccgcccggcgcgggtcctgatgcaggacttcaccggggtgcccgcggtggtcgacctggccgccatgcgcgcggccatggccaaggccggcggcgacccgcagaagatcaacccgctgtcgccggtggacctggtcatcgaccactcggtgatggtcgacaagttcgccagcgaatcggccttcgaacagaacgtcgagatcgagatgcagcgcaacggcgaacgctacgccttcctgcgctggggccagaacgccttcgacaatttcagcgtggtaccgccgggcaccggcatctgccaccaggtcaacctggagtacctgggccgcacggtctggaccaaggacgaggatggcaggacctacgccttccccgacaccctggtcggcaccgactcccacaccaccatgatcaacggcctcggcgtgctcggctggggcgtcggcggcatcgaggcggaagccgccatgctcggccagccggtatcgatgctgatccccgaggtcatcggcttcaagctcaccggcaagctgcgcgagggcatcaccgccaccgacctggtgctgaccgtcacgcagatgctgcgcaagaagggcgtggtggggaaattcgtcgagttctacggcgacggcctggccgacctgcccctggcggaccgcgccaccatcgccaacatggccccggaatacggcgccacctgcggcttcttcccggtggacgagatcaccctcggctacctgcgcctgtccggacgtccggaaagcacggtcaagctggtcgaggcctacagcaaggaacagggcctgtggcgcgagaagggccacgagccggtgttcaccgacaccctgcacctggacatgggcgaagtcgaggccagcctggccggaccgaagcgcccgcaggaccgcgtggccctgcagaacgtcgccagcgccttcaacgagttcctcggcctgcaactgcatccctccagcaccgaagaaggccgcctgctcagcgagggcggcggcggcaccgcggtcggcgccaacgccgccttcggcgaaatcgactaccagcacgacggccagacccaccgcctgaagaacggcgcggtggtgatcgccgccatcacctcctgcaccaacacctccaaccccagcgtgatgatggccgccggcctgctggcgaagaaggcagtggagaaaggcctgcaacgcaagccctgggtgaagagttcgctggcgccgggctccaaggtggtcaccgactacttcaaggccgccggcctgacccgctacctcgacgaactcggcttcgatctggtcggctacggctgcaccacctgcatcggcaactccggcccgctgctggagccgatcgagaaagccatccagcaggccgacctgaccgtcgcctcggtactctccggcaaccgcaacttcgaaggccgcgtgcacccgttggtgaagaccaactggctggcctcgccgccgctggtggtggcctacgccctggccggcagcgtgcggatcaacctcagcgaggaaccgctgggcaccggcaaggagggccagccggtctacctgaaggacatctggccgagccagaaggaaatcgccgaggcgatccagaaggtcgacaccgagatgttccacaaggagtacgccgaggtcttcgccggcgacgagaaatggcaggcgatccaggtgccgcagtcggacacctacgagtggcaggccgactccacctacatccagcatccacccttcttcgaacacatcgccgaggcgccgccggccatcgccgacgtcgagcaggcgcgggtgctggcggtgctgggcgactcggtgaccaccgaccacatctcccctgccggcaacatcaaggccgacagcccggccggccgctacctgcgcgagcacggcgtggaaccgaaggacttcaactcctacggctcccgtcgcggcaaccatgaggtgatgatgcgcggcaccttcgccaacatccgcatcaagaacgagatgctcggcggcgaggaaggcggcaataccctgtacgtgcccagcggcgagaaactggcgatctacgacgcggccatgcgttaccaggaggacggcaccccgctggtgatcgtcgccggcaaggaatacggcaccggctcgtcgcgcgactgggcggccaagggtaccaacctgctgggcgtgaaggcggtgatcgcggagagcttcgagcgcatccaccgctccaacctggtcggcatgggcgtgctgccgttgcagttcgagaacggccaggaccgcaagagcctgaagctgaccggcaaggaggtgctgaacatccgcggcctcggcggcgaactcaagccgcacatgccgctcagcgtggaagtgacccgcgaggacggcagccaggacagcttcaaggtcctctgccgcatcgacaccctcaacgaggtcgagtatttcaaggccggcggcatcctccactacgtgctgcgcagcatgctctga

SEQ ID NO: 352393 - DNA, 1566 bp, Pseudomonas aeruginosa
atgcgcaacaatcagcccatcacccagcacgagcgcgtctatccggcggaacaacgcctgatcaccaccaccaatctcaaaggcatcatcacctactgcaacgaagccttcatcgacatcagcggcttcagtcgcgaggagctgatgtccgcgccgcacaacctgatccgtcaccccgacgtcccgccggcggtgttcgcccacatgtggaccaccctcaaagccggccgcccgtggatggggatcgtcaagaaccgctgcaagaacggcgaccactactgggtcagcgcctatgtcacgccgatctacgaccagggcgcggtggtcggctacgagtcggtgcgggtcaagccgaccgccgaacagatccagcgcgccgaggccctctaccgtcgcctcggcgccggcaagccggcgatcccccggcgcgaccgctggctgccggtactgctcgactggctgccgttcatcctgatcagccagatcggcttcctcatcggtatctggctgaactcctggtggggcttcatcctcgccggcctgctcgccgttccgctcggcctggccggactgcgctggcagaagcgcgggctgaagcgcctgatgcggctcgccgaacagaccacctccgacccgctgatcgcgcagatgtacaccgacagccgcggcgagcaggcgcgcctggaaatggccatcctcagccaggacgcgcgcctgaagacctgcctgacacgcctgcaggacaccgccgaatacctcaccgaacaggcgcgccaggccgacaccctggcccaccacagctccgccggtctggaacagcagcgcgcagagaccgaacaggtggccaccgcggtcaacgagatggccgccaccacccaggaagtggcgaacaacgtccagttgaccgccgacgccacacagaaggccaacgaactgacctcgcgcggccgcgacatcgccgcggagacgcgcaacgccatccagcgcctgtcggagtcggtgggcgagaccggggccgcggtgagtcgcctggcccaggacagcaacgagatcggcggcgtggtcgatgtgatcaagggcatcgccgaccagaccaacctgctcgctctcaacgccgccatcgaggcggcgcgggccggcgaccagggacgcggcttcgccgtggtggccgacgaagtgcgctcgctggcgcaacgcaccgcggcctccaccgagcagatccaccatctgatcgccaagttgcagaacaccgccaacgatgcggtacataccatggagagcggcctgcagcaggccgaagccggggtccagcgggtgctggaagccgacagcgcgctggtcggcatcagcgaggcggtcagcaacatcaccgagatgaccacccagatcgccgccgccgcggaggaacagagcgcggtggccgaggaaatcaaccgcaacatcagcaccatcgccgccctggccgagcagacctccgacgaggcgctgcgcacggcgaaactgagcgaggaactgaccaccaccgcgcagagccagtattccctggtcgagcgcttcaaccgctga

SEQ ID NO: 352394 - DNA, 1158 bp, Pseudomonas aeruginosa
atgaacatgcatgccgacggtgagcagatcaccgctatcgatacccgcgaacgcatcctgctgacgggggccaccggctttctcggcggttcggtcgccgcccagctgatcgccgccgggcacggcgccaacctgtccttcctggtccgcgccgaatcccgccagcaggggctcgaacgcctgcgcggcaacctgctgatgcatggcgtcgacgaagccgactgcctggcactgcgggcggagcagatcctctgcggcgatttcctcgacacctcctggctggcccgcgagacgccgcgcctgatgcaggtggagcgggtgatcaattgcgccgccgtggcgtcgttctcgaagaacccgaccatctggccggtcaacgtcgacggcactttcgccttcgccgacgtgctgagccgttcgaagcgactgaagcgtttcctccacgtcggtaccgcgatgtgctgcggaccgcagcgagagtcgccgatcagcgagtcctgggaattcccggcggcggagcagcaactggtggactacaccgcgtccaaggcggaaatcgagcggcgcatgcgcgaggaactgccgggcctgcccctggtggtggcgcggccatccatcgtggtgggccaccgtacccttggctgccaggcctccggcagcatcttctgggtcttccgcatgggcttcgccctggaaagcttcacctgcggcctggacgagcagatcgacgtgattccggtcgactactgcgccgaggcgctgatcggcctggcgctgaagccgtgcctggggcacagcctctatcatatctccgccggccatcgcgcggcctgcaccttcggcgagatcgacgaggccttcgcccgcgccaacggggcggcgccggtaggcgagcgctaccgcaaggtggaggtggacgacctcaaggaactggcgaagagcttcgagtcgcgcatcggcccggccaatccgcgtctggtcctgcgcgcgttgcgcttgtacagcggctttgccgacctcaactacctgttcgacaacagccgtctgcttgaggaggggatctccgcgccgccgcgcttcaccgactacctcgacgtctgcgtgcagtcgtcaagcgcggtgagcatcccggcgcagatgcaatgggacttcaagtga

SEQ ID NO: 352395 - DNA, 633 bp, Pseudomonas aeruginosa
ttgtcgctgaaatggaaccgcccggccggctcgctgtcggccaccctgattcttgcccatggcgccggggcgccgatggacagcccgttcatggagcgcatcgccgaactgctcgccgcccagggcatcgccgtcgcgcgcttcgagtttccctacatggcccagcgccgcgaggacggccgcaagcgtccgccgaatccgcaggcgcagttgctcgactgctggcggcgagtccatgcgcaggtccgcgagaccctggacgggcccttggccctgggcggcaagtcgatgggcgggcgcatggccagcctgctggccgacgagctgggcgcggatgccctggtctgcctcggctacccgttctacgccgccggcaagccggagaagccgcgggtcgcgcacctcgccgggctgcgcacgccgaccctgatcgtccagggcgagcgcgacgccctgggcaaccgcgaggcggtggcgggctatgcgctggcgccgacgatccgcctgcactggctggccgcggcggaccacgacctcaagccgctgaaggcctccggcctgacccacgagcagcacctggcggcaacggcgcgggaggtggccggcttccttcgcgggctccagggccattaa

SEQ ID NO: 352396 - DNA, 1428 bp, Pseudomonas aeruginosa
atgagcaccactaacccagagtccgcctataactacaaggtggtccgccaattcgccatcatgaccgtggtctggggcatcgtcggcatgaccgtcggtgtcctgatcgccgcccagctggtatggcccgacctgaacttcggcttgccgtggacgagcttcggccgcctgcgcccgctgcacaccaacgcggtgatcttcgccttcggcggttgcgcactgttcgccaccagctactacgcggtgcagcgcacctgccaggtgcgactgttctccgacaccctcgcctccttcaccttctggggctggcaactggtgatcctgctggccgccatcagcctgccgctgggctacacctcgtccaaggagtacgccgagctggaatggccgatcgacatcctgatcacggtggtctgggtcgcctacgcggtggtgttcttcggcaccctggtcaagcgcaaggtcaagcacatctatgtgggcaactggttcttcggcgggttcatcctcaccgtcgccatgctccacgtggtgaacaacctcgagctgccggtgaccttcaccaagtcctactcgctgtacgccggcgccaccgacgccatggtccagtggtggtacgggcataacgccgtgggcttcttcctcaccgccggcttcctcggcatgatgtactacttcgtgcccaagcaggcggagcgtccggtctactcctaccgcctgtccatcgtccacttctgggcgctgatcgcggtgtacatctgggccggcccgcaccacctgcactacaccgcgctgccggactgggcgcagtcgctgggcatggtgatgtcgctgatcctcctggcgccgagctggggcggcatgatcaacggcatgatgaccctctccggggcctggcataagctgcgcgacgacccgatcctgcgcttcctggtggtgtccctggcgttctacggcatgtccaccttcgaaggcccgatgatggcgatcaagaccgtcaacgccctctcccactacaccgactggaccatcggccacgtccacgccggcgccctcggctgggtcgcgatggtttccatcggctcgctctaccacctgatcccgaaggtcttcggccgcgagaagatgtacagcctgggcctgatcaacgcgcacttctggctggccaccatcggtaccgtgctttacatcgcctcgatgtgggtcaacggcatcacccagggcctgatgtggcgcgcggtcaacgaggacggcaccctgacctactccttcgtcgaagcgctggccgccggccaccccggcttcatcgtgcgcatgctcggcggtttcatcttcctgctcggcatgttcctgatggcctacaacacctggcgcaccgtcagtgccgccaagccggccgaatacgaagccgccgcacagatcgcctga

SEQ ID NO: 352397 - DNA, 609 bp, Pseudomonas aeruginosa
atgaaacacgaaatactcgagaagaacgtcggcctgctggcgctatgcatggccgtggccgtgagcatcggcggcctgacccagatcgtgccgctgttcttccaggacgtgaccaacaccccggtcgaaggcatgaagccctataccgcgctgcaactggaaggccgcgacatctatatccgcgaaggctgcgtcggctgccactcgcagatggtccgtccgttccgtgccgagaccgaacgctacggccattactcggtcgccggtgaaagcgtctgggaccacccgttcctgtggggttccaagcgtaccggtccggacctggcccgcgtcggtagccgctactccgacgactggcaccgcgcacacctgttcaacccgcgcaacgtggtgcccgagtcgaagatgccggcctacccatggctggtggagaacaagctcgacggcaaggacatcgagaagaagctcgaagtgatgcgcaccctcggcgtgccctataccgacgaagacatcaagggcgccaaggactcgctgaaaggcaagaccgagatggacgccgtggtcgcctacctgcaggtgctcggcacctcgatcaagaacaaacggtga

SEQ ID NO: 352398 - DNA, 186 bp, Pseudomonas aeruginosa
atggatatcgggacgctgcgaggactcggcacgctgctgatcatggtcgccttcatcggcctggtgatctgggcctacagcggcaaacgcaagaagagcttcgacgaagcgacgatgctgcccttcgcagacgatcccgaagccaaaaagcacgtcgagcaagcttctaggagtaacaaagaatga

SEQ ID NO: 352399 - DNA, 927 bp, Pseudomonas aeruginosa; identical to SEQ ID NO: 319742

SEQ ID NO: 352400 - DNA, 624 bp, Pseudomonas aeruginosa
atgcgggttgaaccagcggatcaaccagttcctgatctcctgtccgcccatgcgcgaagcgacgatgccggcgttcgccaggccgccttggatacgctcgcagatggatttcagatatgccgccgggtcctgtccgcgaatctgcgcatccgccttgcggatccggcggtagaccaccatccgcacgcgccgctgttgtcctcgccagggcagcttgctgacggcggtgtcgacgaacagtccgcccggcttcgaaatgccctccaggtgatgcttcatgagcgccaggtacatctcgctgaaggccgatcctcgcgctcgaggatggacgtactgcctcaactgctcctggaaattgtcccagctgatctcgtcctgggcgtagaactggacgatccagggcgaggtttcgtgctcgtcgaaggagttctgcagggcttctttcaatgcgtcccgggcgttctgcatccaattgggatcgcggccctcggtgcccaagggcaccagctcgaagaagacggcacgcgaacgtccatcttccaggagcatcacctgttcgtcgggcaggtactcggcccagggcagcaggtcgacgaacgatgggtcgtgatcgtagaggcgtga

SEQ ID NO: 352401 - DNA, 228 bp, Pseudomonas aeruginosa; identical to SEQ ID NO: 324380

SEQ ID NO: 352402 - DNA, 657 bp, Pseudomonas aeruginosa
atgaacgctcagacccaaccggccgccctggccgccttccccctgaacatcaacctgaccgacttcatcgacgagttcggcgacgagctcctggagtcgctcaatcgctccaaccccccggtctataccggctccgacaacgctcaccgccagttggtggttgcagtcaatcagggcgatggcgcggtcagccatgctcatgacacctcacgctgtagcgcaccacgccccaaaccagcaactcatccccttccaggatgtacctgggcgcgtaccgaggatctcggcgcgcagcaccacctggctcccatccttcgccaagcgtttcacggtaggctcgccgttcaccgctgcaatcacgatgtctcctggctcagcttctcgggatcgatccaccaccatgaggtcgccgtcatgaatgccagcgcgaatcatgctgtcgccgccggcgcgtaccaggtacgtgtgaggcgctcgaatctgcagaatctcatcaagcgagatctcccgctccaggtgatcctgcgccggacttgggaagccggccgacaccttgctggaatacaggcgcaaggaagccccagacccagcgactgggccgaggatagtaacgggcatgggatgaaaacctctgtatactgtctgtttatacagtag

SEQ ID NO: 352403 - DNA, 2091 bp, Pseudomonas aeruginosa
atggaccgactcaagcgcaagcccttcgcggcccaggccgaggtcgtccaggccatcaccgccctgctgctggaccgtaacgagcaggccggaatcatcaacgccgagatgggcaccgggaaaaccatgatggctatcgctgtcgcagcggtcatgcacgcggccggctatcgccggaccctagtcgtctctccgccgcacctggtctacaagtggcgccgcgagatcctggagaccatcccagccgcccgagtctgggtactcaatggcccagatactctactcaagctgctcaagctgcgagatcagatgggcgacgcctacgacggacgccaggagttcttcatcctcggccgcgtgcggatgcggatgggtttccactggcggctcgcctgctggaagaaacgcgccgccggcggccaactgctcgctgcgtgcccggattgcggccaggtcctcgaggacctggaaggcaacctggtcacggtggaggagttcgagcgtggtgatcgtcgacgtacctgctcctcctgccgtggggcgctctggacgctgatccggccaggcaagcccgacggcggaaaccggcgcgcaacgatcctcaagtcgatgtgccggataccaaccatcggcccggtcagggcggagcgcctgctgaacgacttcggcgaggacttcctggccacgatgttggtggacaacgtctcggagttcatcaacctgatggacgccaagggcaacttcgtcttcagtgatcggcaggccaaacgcatggagcgatcgatggcgaacatcgagttcggcttcggtgaaggcggctaccaaccgactgagttcataaaaaggcagcttcccaacggctacttcgacctgctggtggtagatgagggacatgagtacaagaacatcggctcggcccagggccaggccatgggtgttctcgcagccaaggcacggaaaaccgtgctgctgaccggaacgctcatgggcggctacgccgacgatctgttctatctcctgttccgcatcctcacccagcgcatgatcgaggacggctatcggcccaacgcgcgcggcagcatggctcccgcagccatgtcgttcatgcgcgaccacggtgtgctcaaggatatctacaccgagcgcgatggtgattcgcacaagacagcgcggggcaagaagctctcggtacgcacggtgaaggctcccggcttcggcccgaagggcatccaccgcttcgtattgccgttcaccgtgttcctgaagctcaaggatatcggtggcaacgtactgcccgactaccaggaggagttcgtcgacgtgccgatggcgcctgatcaggcttcggcctatcagcgcctggcggccacgctgacagctgagctccgccaggctctggcgcgacgagataccacgctcctgggcgtggtcctcaacgtgctgctggcttggccggactgctgtttccgaccggagatcgtcaagcatccgcgaagccgggacacactggccttcgtgccagcgatcttcggcgacgagcagttgatgcccaaggagcaggcgctggtggacctctgcctcgaggagaaagcgaagggccgcaaggttctggcatacaccgtctacagcgggacgcgcgacaccacgtccaggctgaagaaagtgctcgagcaatccgggctgaaggtggcagtgctacgtgcttcggtcgataccgctcgacgcgaggattggatcctcgaccaggtcgatcgcggcatcgatgtgctgatcaccaacccggagctggtgaagaccgggttggacctgctggacttcccgaccatcgcgttcctgcagacggggtacaacgtgtacaccttgcagcaggccgcgcggcggtcgtggcggatcgggcagaagcacccggtgcgggtggtgttcttcggctacgccggcagctcgcagatcacctgcttacagctgatggccaagaagatcgctgtggctcagagcacgtcgggagacgttcccgagtcaggtctcgactcgttgaaccaggatggggactcggtggagatggcgttggcacgacaactcattgcagcatga

SEQ ID NO: 352404 - DNA, 606 bp, Pseudomonas aeruginosa
atgctggcgaatgaaggccgcttcgacgctgtccccggcgaaccagtggttgcagcggcagaaggccggatcgactggttgttgctggcgcttcatctcggtgaccaccacctcgacggcctcgatcaccggcacgccgacgtagccgtcctcgattgccacgcgatcaagccagcgcaccagagtttggaggctttcggccagtttgctgtcgcccgatcccggcgcggggtggggtcgctcgccggcattacccggtccggatacaggttcgccgccaggattgcccggctccgaactcgctccagccccgctcagcgccgccagtgcgatctgtcgcatgttcgccgccggcaggttgtcttgttcgggacaggggaactcggcgatggtgcggagcgccaggtgtgcgtccccgtcagcaaagtgcgagataaccgcacctgcgcgcccgattgctatgggcattccattccgcaggtatgggcgtaccgagtcgatctgcatgcccatgcccgagcggagaacgatagtgatggagttcatgatcagttgctccctgctgccttggtcaacgcattgagcagagcccgcttctgttgctga

SEQ ID NO: 352405 - DNA, 216 bp, Pseudomonas aeruginosa
atggctctgacagcgcagcagatgctcgacaaatacttggaggccgaggccgccgtgctggaagggcggacagtgatcttcaacggacgcacccacaccatggaggatatcgagaagatccgcgccggacgccaggagtgggagcgccgcgcagccgcagagcgggaccgcgccgccggtcgccgtcctggcccggcactggcggagttctgctga

SEQ ID NO: 352406 - DNA, 1125 bp, Pseudomonas aeruginosa; identical to SEQ ID NO: 324437

SEQ ID NO: 352407 - DNA, 696 bp, Pseudomonas aeruginosa
atgcccacaatgcgggcacgggatgtagtaccgcaggcgacgcggagactcatcggccgccttcgtgatctggcattggccctcggtaccaggcgtcgatccacggatggacttcgggtaaacagcaccgcgcagacgttggtcgccaaggaacgttggggaaccttcaccttcaatatcggcgtcgaacttcgacagctcgtcatagatcacctcgtcggcagatctctcacggtagttgcgagcagccttgccgccgagcgtccaaagggtccgccggtttgcaaacaccttggtgtcgagcgtgttgtcgctatgcttgcggccataccatggggccagcgccagcagcaccggaacatcgcgaatcaggccattaacgtggctcttgctgatcccctcggcgtctgggtcagtcgggctccacatcagcacattacggcgcttgtgctgaatcttgtagccgatgttggccatcagcattttcgtgtagccgatgcgtgccgacttcacgaagtttacgacccgaatcaggtcgttacccatggcgttcaggatggcgacctgaaatggcgccgtcttccacttgccctcgttgtacgaggattccgccgacatgtagaaaccgtcgtcgggatcttccgcccactccaccgccgtcatcggcggcgacttgtacagcccctgcaaacctag

SEQ ID NO: 352408 - DNA, 327 bp, Pseudomonas aeruginosa
atgtcggatgagtcgaactcgctgttggctgaccttccgccgctgacgcaagaagctcttgaagaagaggtgttcaacgcgtccagcaaggctaagttcgcctgggagaacgccttcgctagccgctttctggtaacgaacctgttgttggcgttgcatcactcgaaggtgctggatgggcatgggctgctgctggcgctgcaggctcaggtgcaggcgcagtcccctgaagtgctgcaaaccgctgatcgacgagccctgctagatatgctcgaagagctgcagaaaatgctcctcgctgcgcctgtaagtccgggcgttcactga

SEQ ID NO: 352409 - DNA, 753 bp, Pseudomonas aeruginosa
atgcgggcaagcaatatgcaggcgcagccggtgcggagactcttccgccgccttggtgatctggcaagcgccagcgaccccaggcgtagatccccggatagacttcgggtagaccgcaccgtccaggcgcttgtcacccaggaatgtcggcgagccttcgccctcgacgtcggcgtcgaatttcgacaattcgtcgtagattacctcgtcgggcgacttctcccggtagttccgagaggccttgccgccgcgtatccagaggttgcgccggttcgcgaacaccttgttgtccaaggtgttgtcgctgtgcttccgaccgaaccagggcgccagttccagcatgaccggcacgtcgcggatcaggccattgacgtggctcttgctgatgtcctcggcgtccgggtcggtcggactccacatcatcacgttgcggcgcttgtgctggatcttgtagccgatgttggccagcaacagcttcgtgtaaccgatccgggccgacttcacgaagttgaccactcgaatcaggtcgttgcccatcgcgttcaggatcgcgacctggaatggcgcagtcttccagcggccctcgttgtaagaggactcggccgacatgtagaaatgcttgtcggcccactccaccgccgtcatcggcggctctttgaacattccctgcaaacccagcttgaccgcagtgcgcagatcactgatccagggttgcaaggtactcatcaaggattcccgggatgtcgtcgctga

SEQ ID NO: 352410 - DNA, 546 bp, Pseudomonas aeruginosa
atgagcaaaaacgaaacaaccaagcagcgcggatggttgaacaagtccgagatggccgcgagcctcggaatttctccgcaagcctttgataaatggggcgttcaaccaatcgagcgaataggtcgagaggccttttacacggtggcggatgtggtcgaaaaccgcatccatcacgccgctcggaaacaacaacctgagggggagctaccggaaggtctcgatccctacgctgaagccaagctgacacaggagcgactccgcctcaccaaggcccaggcctacgcccaagagcagaaaaaccaggtccaggacaaactcctggtcccggtcccgttcgccactttcgccttggcgaaaatcgccgccaagatcggctcggcgctggagaccgtctgcaaaacggtcagtcgccgccacccggatgctgatcccttggtgatggagtccttcgagcgggagatcgccttggcgcgaaacctttccgctgagttcagcgacgacatcccgggaatccttgatgagtaccttgcaaccctggatcagtga

SEQ ID NO: 352411 - DNA, 1272 bp, Pseudomonas aeruginosa; identical to SEQ ID NO: 337686

SEQ ID NO: 352412 - DNA, 363 bp, Pseudomonas aeruginosa
atgggatggcttttctcacatcagacgaaggaagacctgctgcgtaagctgctggccccaaccagtaccttcgcaggcagcaccgaggtgctggcacacgcagtctccggcaatgaactttggactgtcgtaaaacgaaccttccaccttgccggattctatttcggcaagccggccggtcactcgatcaccatgatcgagctgcacttgctggactgctcggccgggcaatggggctacaagaccattccggagaaagcaggcccgttctactacggctgtccgctggagttcctggacctggctcacgatgagatcaaccaggaatggcgtgaacgcctgacgcacgaacaccaagcctga

SEQ ID NO: 352413 - DNA, 363 bp, Pseudomonas aeruginosa
atgggatggcttttctcacatcagacgaaggaagacctgctgcgtaagctgctggccccaaccagtaccttcgcaggcagcaccgaggtgctggcacacgcagtctccggcaatgaactttggactgtcgtaaaacgaaccttccaccttgccggattctatttcggcaagccggccggtcactcgatcaccatgatcgagctgcacttgctggactgcttggccgggcaatggggctacaagaccattccggaaagcgccggcccgttctactacggctgtccgctggagttcctggacctggctcacgatgagatcaaccaggaatggcgtgaacgcctgacgcacgaacaccaagcctga

SEQ ID NO: 352414 - DNA, 729 bp, Pseudomonas aeruginosa
atggctgaaacccatcggcttcagatcggctctctccgcagcgatgtcaaactgacgcttcacacctatcacgccgcccgcatctggacaggccggcagaagtcggatgccaagcacagcatcctcggcctctccggcttctgcgcatacgtgaatcgcatgcaccgcggggcagcacaggacgatccgtactccgactggtggctggttcagatcgaagagaaagtcgagagctgccaagccgcgctcaaggccatcgaccagcgcctggatgacgtaatggccaagctgccagcgaccctcgatatctccgagaacctgtccgtcacaccggtcaaggtcccgttgttcatctccaaccctctgggcttcaaggcagtctatctcctgaccaactacgacgaactcgcccgtcgaatcctgctggcccagcacgtcgggctggtcggtcgacgcgacatggaggtctggctcgacgaaggtgcgtcggtgctgcgcagcctctttggtctggcccagagctaccagttctcgggcgccaatcgcgacgacttcgccgcaaacaacgctcgcgccgaagccgcgcggaagatgtacgagaagttcggcgagatcccgcaggacatcctggagggtacccgacgctcgaacttcgctccgccgatcacccggggccgctctgacggtgatgccgatgatgacgctgaccgtgtcgagctcgaggactga

SEQ ID NO: 352415 - DNA, 1095 bp, Pseudomonas aeruginosa
atgtactccctggcctcggcgctttcaggccagttcgaaggcgacttcctggcctgctggaaggtcgacgaggaccgctacgcactggtcgccacgctcgatggtgcgatcgtccccggccaggacctggtcactaccttcgacgaagccagggaccggatcaggaagctctctacgcgcggcgtgcttcgaaacgcacaggtcttcgttcccgaaggattcgatttccccgtcaaggacttcgacatcgaggaactgctcgcgccgaagcgcctgcggcgcgactaccgcctccggcaactcaccttcggcttgtccgccagagagtggacggcagtggccctgctcggttgcttggtaggcgggtcgctaaccgcctactacctatggaatgcccaccagcaagagctcgccagacaagccgcgctcctcgaggagcagaggcgcctcgccgagctggccgagaagaacgcccaggccaagcagccgctggacctggcttcattgcagaagccttggacgctcatgcctgacctcgaggacatgctacgcgcctgtagcaaggcaacgggggtactgtcgctgtcgatccagggctggctcttcgaatccagcaagtgcgacggcagggtcctggtcgccacctaccaccgtaccggcaacagcacggcagccgacctgacagcggccagccagcacctgttcgctgaccgccccgccttcgtcatcgacaacggcaacaccgcggccctgaaggtcgacctgaaagtcgccatcggtagcgatgagccgctgcagccagccgacgacgcgctgcaggcgctcaccagccatctgtaccgtcagggtgtcgagcccaagctgtcgatcagccaggagacaactccgccccttcctggcgcggaagcggcgacggagcagcaagtggtgttgccctcctggaagaaattcaccttcagcgcccagaccaggctcccggcagacctgaccttccaggggctgcccgccgccggggtccgcatcaccaacctcgaaaccacgctcaaggacagccagttggactggactgtcacaggagaaatctatgcgaactga

SEQ ID NO: 352416 - DNA, 840 bp, Pseudomonas aeruginosa
gtgctggctggctgggaagaggccgaagaaaccttcccgctgtggaccaagtccggcattctcactgacttcaagccggcgcgccgcgtcgggctgggcgagttttcctcgctgcgtcaggtgcgtgagggcgccgagtacaagtacgtcaccctcggcgagcgcggcgagcagatcatcctggccacctacggagagctgttcagcatcactcgtcaggcgatcatcaacgacgacctgcagatgctctcggatatcccgttcaagctgggccaggctgccaaggccaccatcggcgacctggtctatgcggttctgaccggtaacccggcgatgagcgatggcaaggctctgttccatgccgaccacagcaacctgctcactggcgcggcttcggcgctttccatcgacagcctgagcaaggccaagacccagatggccacccagaaagcccaggtagagaagggcaaggggcgcaccctgaacatccgtccgggcttcgttctgactccggtggcactcgaggacaaggccaaccagatcatcaactccgagtccgtgccgggcgccgacgtcaatagcggcatcgtcaacccgattcgcgcattcgcgcaggtgatcggcgagccgcgcctggacgattcctcggcgaccgcctggtacatggctgccaagaaaggctctgacaccatcgaggtggcctacctggacggcgtcgatactccgtacctggagcaacaggaaggcttcactgtcgacggcgtggccagcaaggtccgcatcgacgccggcgtggcgccgctggacttccgtggcctgcagaaatccaacggcgcctga

SEQ ID NO: 352417 - DNA, 630 bp, Pseudomonas aeruginosa
gtggccaaggaggtggagcgaatcgccaacaaggccgcagaggtagaggctggtaatgccaaggctgcggatgacgtcaaccgcctgaacctggccgacctcgaggagcgcatcaaggctgtgcaaaacgtcgaggtgtcgttcggaatggacttcgaaagcgcggagaccttgaagcaacaggtcgccgacatcgccgccggcctggctgagcaactcgtgatacctatcacgctggttccgcctccggagatgggcttgcctggcgtgcccagcatcacccccaagatacccgggtttgccactggtacgcagagcgctccccctggtatggcgtgggttggggagcgtgggccggagttgatgatgatgcggggaggagagcgcatcttcaacgcggtgcagtcgctgcagatgtcgcagaggtatcaacgaactctccccgagatacccgagattccgaccgcggcgcttcagcaggcgaatccgctggcagccatgcaaaacctgggatcgctgaccctcaacctgggtggagacgatgccggcttcaccgttttcgggacacacgacacgctccgagacatacgcaaggccgcctcgaagttcgggcggacgcgcccaaaatga

SEQ ID NO: 352418 - DNA, 546 bp, Pseudomonas aeruginosa
atggcaactattacgcacgtcctgtccggcgccggggagccgctcgatccgcctccaagcattggtgctcactacgtgaacacgaacaacggcgcgctataccttgcgaagggcatcgcgagcggtgccgattgggtgaagctgggtagtggcggcggcagcgctccgagcgaggtgctgcatgtcaacaccgacggccagttccttctcgagcctcaacactcatttgttgaggcccgtctgttcgcaattcccgagctcggcactgccgcaattggaatcgatcccagcacatcccgacagttcgacctgaatatcaggaccgcgggtccgagcgggcagcaactgcagatcagagttacgtccggtgaattgcccggagggatgtcgatcgttggcacaaccaggcagtgggctgttcaggagtcgtatggattcttgatcaatgcaaatgacctcaacggcgaagtgtgggcgcgcgtctatttcgatgctgacgaactcactctgtcgatgcttgtgttcagcgatgtgccgaacgcgtag

SEQ ID NO: 352419 - DNA, 411 bp, Pseudomonas aeruginosa
atggcgagagcctggatcaacaactggaagacgacgctgagcgccggcctttcgcctggcgaattgagcctgacggtgccggatgctgccgccgcgctgctgccgctctctggcggtaactgggtgctgttgacgctggcggatgctgccggcgctcagcatgagatcgtgaaagcaacctcccgcgccggtggggtggtgacgatcgagcgcgcccaggaagccaccgccgacggcaactggccggcggggtcggcgatctatgcagccgtcacggccggcgatctcatggcactgcaagcgcgaatcgcggcccttgagggcggcactcccgaaggagccctggtcgatgcgagcggttcggctctcgtcgatggcgccggaaacaacctgatcatggagaacaactga

SEQ ID NO: 352420 - DNA, 363 bp, Pseudomonas aeruginosa
atgggatggcttttctcacatcagacgaaggaagacctgctgcgtaagctgctggccccaaccagtaccttcgcaggcagcaccgaggtgctggcacacgcagtctccggcaatgaactttggactgtcgtaaaacgaacctttcaccttgccggattctatttcggcaagccggccggtcactcgatcaccatgatcgagctgcacttgctggactgcttggccgggcaatggggctacaagaccattccggaaagcgccggcccgttctactacggctgtccgctggagttcctggacctggctcacgatgagaccaaccaggagtggcgagaccgtctgacgcaagaacaccaagcctga

SEQ ID NO: 352421 - DNA, 276 bp, Pseudomonas aeruginosa; identical to SEQ ID NO: 342263

SEQ ID NO: 352422 - DNA, 198 bp, Pseudomonas aeruginosa; identical to SEQ ID NO: 324448

SEQ ID NO: 352423 - DNA, 417 bp, Pseudomonas aeruginosa
atgccgctggagatcaccagcgtgaagagcgatgacggcaccactacctacgaagagttcgacgactggaacatgaccggagctggcctcgaaatcgttgaagggggtgcgatctctgcggccacaccgatcaaggtgacctacaagtccgccaccgtcgatgtgattgaggcgctgaccaacagcggcaagacgttcgagttcctcttcgagggcgagaacgccgctggtacccagcggcgcatccaggcgcgctacttcctctgccgcttaaacccgtcgagccagcaggattggatcaacaccgaagacttcctggccgccgaggccactgccaaggtgctgatggacccaaccaaggtcggtgctggaaagtcgaagtacttcaacatcaagaaggaactggcgacggtgtga

SEQ ID NO: 352424 - DNA, 198 bp, Pseudomonas aeruginosa; identical to SEQ ID NO: 332040

SEQ ID NO: 352425 - DNA, 198 bp, Pseudomonas aeruginosa; identical to SEQ ID NO: 328577

SEQ ID NO: 352426 - DNA, 162 bp, Pseudomonas aeruginosa
atgaacaagctgtacggcgaggccttcgccgccgtctacgtgcaaccgggcgcgcgcgtcgccgtgcatctcgatcagcaactggcgatcgactacgaactcaagggccgaaaggtcgattacagctctggagccgctcatgcaacagcagacctggactaa

SEQ ID NO: 352427 - DNA, 162 bp, Pseudomonas aeruginosa
atgaacaagctgtacggcgaggccttcgccgccgtctacgtgcaacctggcgcacgggtcgccgtgcatctcgatcagcaactggcgatcgactacgaactcaagggccgcaaggtcgactacagctctggagccgctcatgcaacagcagacctggactaa

SEQ ID NO: 352428 - DNA, 222 bp, Pseudomonas aeruginosa; identical to SEQ ID NO: 346438

SEQ ID NO: 352429 - DNA, 153 bp, Pseudomonas aeruginosa
gtggcagcctcccgccttgccgaacggctgttcggcgaggacaacgcctacatcacccgtatgccggcacaggcaggcgaccacgaaaagcgcatcgagagccgctgggaactgtcctgtagaaatcccaaggaggtagcgcacgatgcctga

SEQ ID NO: 352430 - DNA, 1191 bp, Pseudomonas aeruginosa
atgaacgctctgacccaaccggccgccctggccgcctcccccctgaacatcaacctgaccgacttcatcgacgagttcggcgacgagctcctggagtcgctcaatcgctccacccccccggtctataccggctccgacaacgctcaccgccagttggtgatggaccgactcaagcgcaagcccttcgcggcccaggccgaggtcgtccaggccatcaccgccctgctgctggaccgtaacgagcaggccgggatcatcaacgccgagatgggcaccgggaaaaccatgatggccatcgctgtcgcagcggtcatgcacgcggccggctatcgccggaccctggtcgtctctccgccgcacctggtctacaagtggcgccgcgagatcctggagaccatcccagccgcgcgagtctgggtactcaatggcccagatactctactcaagctgctcaagctgcgagatcagatgggcgatgcctacgacgggcgccaggagttcttcatcctcggccgcgtgcggatgcggatgggtttccactggcggctcgtctgctggaagaaacgcgccgccggcggccaactgctcgctgcgtacccggattgcggccaggtcctcgaggacctggaaggcaacctggtcacggtggaggagttcgagcgtggtgatcgtcgacgtacctgctcctcctgccgtggggcgctctggacgctgatccggccaggcaagcccgacggcggaaaccggcgcgcaacgatcctcacgtcgatgtgtcggattccaaccatcggcccggtcagggcggagcgcctgctgaacgacttcggcgaggacttcctggccacgatgttagtggacaacgtctcggagttcatcaacctgatggacgccaagggcaacttcgtcttcagcgatcggcaggccaaacgcatggagcgatcgatggcaaacatcgagttcggcttcggtgaaggcggctaccaaccgaccgagttcatcaagcgctacctacctgatggctacttcgacctgctggtggtggacgagggacatgagtacaagaacagcggttcggcccagggccaggccatgggcgttctcgcagccaaggcacggaaaaccgtgctgctgaccggaacgctcatgggcggctacgccgacgatctgttcgtgcgacgtgaagtcgcttga

SEQ ID NO: 352431 - DNA, 294 bp, Pseudomonas aeruginosa; identical to SEQ ID NO: 332106

SEQ ID NO: 352432 - DNA, 867 bp, Pseudomonas aeruginosa
atggacatcctccagagttcctccgccgcgcccctcgcgccgcgggaagcggccaacgcccccgcgcagcaggccggcggcagcttccagggcgagcgcgtccactacgtttccgtttcgcagtcgctggccgatgccgcggaagagctgaccttcgccttttccgagcgcgccgagaaatccctggccaagcgccgcctgagcgacgcccatgcgcgcctgagcgaagtccaggccatgctgcaggagtactggaagcgcattccggacctggaaagccagcagaagctcgaggcgctgatcgcccacctgggcagcggtcaactgagcagcctggcgcagctcagcgcttacctggagggcttctccagcgagatcagccagcgcttcctggcgctgtcgcgggcgcgcgacgtcctggccgggcggccggaggcgcgggcgatgctggcgctggtcgaccaggtgttgctgcggatggccgacgagcagggcctggagatcgaactcggcctgcgcatcgagccgctggccgccgaggcttccgccgccggtgtcggcgatatccaggcgctgcgcgatacctaccgtgacgcggtactcgactaccggggcctgtcggcggcctggcaggacatccaggcgcgcttcgccgcgacgccgctggagcgggtcgtggccttcctgcagaaagccctgagcgccgacctggacagtcagtcgagccggctcgatccggtgaagctggagcgggtcatgagcgacatgcacaagctgcgcgtgctcggcggcctggcggagcaggtgggggcgctctggcaggtgctggtgacaggggagcggggccatggcatacgggccttctga

SEQ ID NO: 352433 - DNA, 342 bp, Pseudomonas aeruginosa
atgatggagaaagagattcgctgggtcgggtcggcctacgacgacctcttggcctttcccgtcgaaccccgccggcaggcagggttcctgttgggcaaggtccaggcaggactggagccggaggactggaagcccttcgatgaagtgggggccggcacccgtgaaatccgcatccgggaagctaacggtgcgttccgggtgatgtatgtggccaagttcgaggaagccgtgtacgtcctgcactgcttccagaagaagacgcaggcgaccagccagcaggacaagcgcatcgccgaggcgcgctatcgggccatcgtcaacgcgaggaaaagcaagccatga

SEQ ID NO: 352434 - DNA, 261 bp, Pseudomonas aeruginosa
atgtcccgccacgacgcccctcaaggcacggacaacgtactgctggccctcggcttcgacgacgcgggggcactgtcggcgaaggcggcgcttgcgctcaagctcaacgagctgatcgaccagcgcggactggaccaggcggaagcggtccacatcatcagcatgaccccgcccgaggtgtcccaggtccgccgctacaagctccagaacattgcgctggagcggttgatgcaggcgctggcgagaatgtcgtatcactga

SEQ ID NO: 352435 - DNA, 975 bp, Pseudomonas aeruginosa
atgaaagaagagaacagcacgcagatgataaatttttcagaaatcgaatctcccgcgaaatttgaacagttcgccacagatctacttgaaagcctaggttacgaaattctggttcgccctggagaagggaacgacggcgggaaagatctgatcgttgctgatgtatttgaaggtaaacacggacgacggcaggttaaatatctagttagctgcaagcacaagttgtctagcgccgtgggagccagcgacgaagaggaaattgaagggagagttaggagtcaccactgcgatgcattcatgggggtttatgcaaatcacgtcacacagggccttatagacaaagcagaagggcttaaatctgcaaaacgggactcgggaaactttgacattgtattcattcaggacgctgacattcgtaggcacctattagaattgccggacggatctcgtttggttaggcaatggttccctcgcggttacgcagcatacatccacaccatctctgagagctttgtttataacaagcgccctgtaatgcagtgcaccacctgcaaagcggatcttctccaagatttttcaggtgtcgtcatctacgaggccagtcacgaacctgcaagatttccaactatcgacccagagcgagacagacgacaccgataccatattctcgacataaagccttattgcgcagagcatattccacccccttctcgcaaaccatataacgacgccagcatgaagtttgatctacgtgacttggttgatcctaaaaaatatatcaagcgcgtttttgaagatataaagttcatgtacgcttggccgccttatttcgccagcatggatgtttttcgcaagtggaaccaccttacacatattctttactactttgtcgcacgcggacagcacagaccaaagcccctaccttcagaatcctccgcatttcatctattcaacgtagatgaatggaagctttaa

SEQ ID NO: 352436 - DNA, 297 bp, Pseudomonas aeruginosa
atgacgacgcgcaagccatcgttgcccgatgctctgcggcggatcaggaaggcacgcggcctgagccaagaggcgttctcggacgtgtccagccgcacctacctgagttcgctggagcgcgacctgaaaagcccgacgctgaacaagctggctgaactgtgcgaagtcatggaagttcatccgctcacgctgctgacgttggcgtatgcaggcaacgacgcacatcagatcgacgtgcttttggcacaggtacgacaggaattggaggctgtggctaagaaaagtgatgcgtcttaa

SEQ ID NO: 352437 - DNA, 348 bp, Pseudomonas aeruginosa
atgaagcccctcatcaccgacgcgcagcgcgcgcaactgctcgccaacggccgcgcccgcgccgagggccaggccctcgacccgctgccggtggttcgcttgttcaccctggacgcgcacgccacctggctgctcgccgccctcgatcccgaggacggcgacaccgcctacggcttgtgcgacattggcatcggtatgcccgcgctgggcaccgtgcggctgtccgagctggcgtccatccttgggccgctggggcggcccatcgagcgcgacctgtatttcatcgcgcagcgcacgctgtcggaatacacgcggctggcgcgcctcaacggctcggtcatcgactga

SEQ ID NO: 352438 - DNA, 786 bp, Pseudomonas aeruginosa
atggcagagcccgccgccgatcactggcaccccggtgccgcctacctctacgtcctgcacctggacggcccggcgctggcctgggaatacctgcgccgccacccggactaccgacgcgactggctgcaccgtcgccgccatcccgaggcggcccagcgctggggcctgcgcctgctggaagaccccgccctggatgcgcgcgacgcgcacccggcctggttccccgaccatgacagcgtagtgcagctccaccccgacgacgacccgccgcccgacgccctggccttcgacttctggcgcattcccggccacaagcaactgctccacgacggccggcggctggtgctgctcacccgctggccgggccgccacgcgcgcctggtgtttgcgcccggcctggcgcacggcatggcctacacctacgccgtgcgcgcctccgcgcagccgtacccgcgcttccgtgcactgaccgaggaactggacaagctggccggcgccgcgccggtggcggcccggccacgccccgcagccaccgcgctgctggagctgcacaccctgcaagcgctcgacggcaccctggcgggcgcgtccctgcggcgggtggccgacgtgctgttcggcgccgacaccttcaagcaggactggcacgcagacggcgcgctgcgcgcccgcgtgcgtcgcctggtgcggcgcgggcaacggctgatgcgcggcggctaccgccgcctggcacagcttcccgcgcttgcacagggacgttctgccgtgcgtgcaaaacgtccctga

SEQ ID NO: 352439 - DNA, 546 bp, Pseudomonas aeruginosa
atgaccctcaccgcgcaggcacagacccatgaaagcgcggctgcgccgccaccttcaccgcaaccgctcgccgcgctcgacagccgcgtgtcgctcacgcgcgtgtcgctcgcctacctcgcgcagcgcatcaacctctacctgcgcttcggccatccggcgcgcaccgtgcagctcgaccgctggcggcgctgcgcggtgtttctgccggcgtcgatcttctgccgcatccgctgggagtccaacgactacggcaccgtgcgctggcagctcatggtgctgcaagcctgcacgccgctggacgccatgcagcgcattcccggcattcgccccggcgcgcgcatcctgctgcacgccgaaggcgaacagaaagtgcgcgccgtgctcgcgcggatcgacgccatcgaggcgctgggtatcgaccccgccgaggtgtcgcccgcgtactggcgcacgctgggcaaccgtctggccgcacacctgccattgccggactacacccgcgaacggcacgcggctttcctggccgggaggaacctgcaatga

SEQ ID NO: 352440 - DNA, 564 bp, Pseudomonas aeruginosa
atgaccgccacgaccgcaacccttcctcgctcgcgccgccgcgcgcgcatcgtcttggccgcactcgctgcctgcggcctcgctgcgctggcctgggcagctttcgtgcagcctgcggtgcgcatcgtctacaacccgtccgacagcgtgccggtcggctggtatcgcatcgaccccgccgactcgctgccccgtccgttgtccgtgggcagcatcgtgctgaccaccttgccggcagacgccgccgcgctggccgcgcagcgcggctacctgccgtcgcacattccgctgctcaaacgtgtgggcgcggtcgcgcctcaacacgtctgcatcgtcaatggccgcgtgcgcatcgacggcgtgccggtggccgccgtgctgcgcgccgaccgctggggccggccgctgccatcctggccgcagtgcaggcagctcgcccagggcgaactgttcctgctcagcgccaccaacccggcgtcgttcgacagccgctacttcggcccggtcagcgcatccgccgtgctcggcgtggcgcagccgatccgcctggagacacggccatga

SEQ ID NO: 352441 - DNA, 249 bp, Pseudomonas aeruginosa
atgaacaagatcatgtcgttgttgtttgttgctgtgctggcgggctgtggcccatccgaaccgatagaaaccgtggagtcgctggcatccaatcccgagcggctgaaggaactacgtcagcagtgcaagctggaacgcgccaagatgggcgatgcactgtgcaaccgagtgtccgaggccacgcgcaagcggttctatggcgacggcaaggtgccgtacacgccaccggaaaaccctcccaagttctga

SEQ ID NO: 352442 - DNA, 465 bp, Pseudomonas aeruginosa; identical to SEQ ID NO: 82640

SEQ ID NO: 352443 - DNA, 291 bp, Pseudomonas aeruginosa
atgcgatgcactcccatcctgctgatcttgatgctgtcggcgtgcggcccgcaaccgaccgaagaccaggccgacatgcttgccgccgacccggtgcggcttaaggcgctgcgtgcgcagtgcgcgacggatcggcaaaccgtgggtgaaaccacttgccagatggctgccgaagcctttcgacggcgcttcttcgccggccagactgggccggatgagtaccacacgctgatcgagttgccgccgattccaccgagcttcgatgagcctgttggggaggagatgccatga

SEQ ID NO: 352444 - DNA, 231 bp, Pseudomonas aeruginosa
atgaacacaccgaccaaaaaattacggcttggccctttgcctcgccaagaagtcacgaagctgaccttcgcatgccctgccggcctgaaagccgacctcgaccgctacgccgcgctacacgcgcaggcctacggcgaagcggtcgatgccgtgacgctgatcccgcatatgctggaggcgttcatggccgccgaccgaggttttaagcgacgtaattatcgagaagattga

SEQ ID NO: 352445 - DNA, 2181 bp, Pseudomonas aeruginosa
atggaagggtttggggtgcctcgtcaacagaacgaggaatctatgcacgtatccaagctcagcctggtcaactacagaaactttgccaatacaaaactactattccaaaaaggtatcaacacaattattggcgaaaacggatcaggtaaaaccaacctgtttcgagcgatcaggctactgcttgatgacaacatgatccgctccgcctaccggcttgattcaactgactttcatcgcggtttggaacgatggcaagggcattggatcattattagcctggagttcgaggagatttcggcggatgaagcagtccaagccttgttcctgcatgggacggccggcatcgatgatgaggcaatcggtaaggccacctacagcctcatcttccgcccaaagaaagagatcaggcttcgcctttctcagttagacgatggcgaccacgctggtctcgctgcgatcctgaatgctgtcactctagacgactacgaaaccatcttcacgggccgaagcgacgctgacttcaacgatgaagccttctacaaagaggtggttggtgactttgaaaacgcccgattcaacgaagaaatcgaatttcccgccatcggcgccaagattccaagtgtgctatcggtttccagggagatttccttcactttcgttcaagcgctgcgagatgttgtatcggagtttcacaacaacaggaccaatccgctgttgtcacttttgaagggcaagagcggtgatattgatcctgtggcattccaagcgattaccgatggggtgaaagcattgaatgactcgattgaggcgttaccggacgtacaagtagtccgagccgatatacgagacaccatcaaggacgcagcgggcgaggcttactcgccctcatctctttcaattaagtctgatttgccagatgaagctgacaaactgttccagtcgctcaagctgtttgttggcgagtcaggagaaggccacgaagggcctatccacgaattgagcctgggcggcgcgaacctgatcttcctcacattaaaactgttggaattcaagtatcaaaaagccaagcaatcaatcgccaacttcctgctaattgaagagccggaggcccacattcacacacacatccagaagacgctctttgacaagcttcaatacgacgacacacaaattatctactcgacccattcgactcatatttcagaggtaagtaatgttcagaacgtgaacattctcggaaaagagcgtggtcgatgcgaggcctaccagcccgccactggtttgactccggaggaagtcggtaatatccagcgctatctggatgctgttcgcagcaacctgctattcgccaaaagcgtcgttcttgtagagggcgatgcggaagaaatcctgatcccgattttgatcaagaaggtgcttggcgtcagcctggatgaactcggcatcagcttggtcaacatccgaagcaccggctttcagaacgtcgcagttctattccacgatgatcgaatccgaaagcgatgcagcatcgtcaccgatctcgacaagtccatcattgacacaacgcccgtcgctggcgactctgaaagactgctccggcgcaagaaaaaatatcaagcatctcaggataaaggaatcgccagaaaggcgctgctggatgagtcgttcaaagataatccatgggtttcgccgttctttgctcctcacacctttgaggtcgattttgtcgcggccgggaacgctcgtaaggtggtgggtattcttcctgatgtctacacggatgccccaaccatcgtgacagccaaggcagagctggagtctgctgacattgcgcgatttggccaaagagcgctgactatggcggacaactatgggaagggatggtttgccattttgcttgggaaaaagatcgatccggaaacggccatcccggagtacattctggacgccatcgccttcgcgcatccgatagtcacaaaggaagtttggttcaacgtactgagctatcgcgtgagctatattgacgagaatgagatttttactgcacctgcggttttcaccgaattcagggaaaaacttttagcctttagaaaaggtgagattgatttcgttagcatccgaaacgaaatgctggccaccttccccgacgatcgtatcaacgacgtccttaaggtcttctag

SEQ ID NO: 352446 - DNA, 1800 bp, Pseudomonas aeruginosa
atgtttatgtggagcaaaggcgacctgaatccggagcaggaagctgccatattgcagcctgggagcgcatttctcattgcctgtcccggtagcggaaagactcgcacgctgacttataagattgcctacgagttgtccaggctggagtcgaataagcaatttgttgttgcgatcacctatacgcaccgtgctgccgacgagatccatgagcgcatcgagagtcttggggtggatacatcccgactatggataggaacaatccactcgttttgccttgaatggatattgaaaccatacggtatctatcacgaggcattgggtcgaggcttccgagtgatcgatcaacatgagcgtgagaaaattctcgaggccttgtgcaagccttaccagaagccaaagatcaccttctgggattgcgaattctatttcaccgaagccggttatgtactttcctgcccgcaggcttggaaacacaacggcctgcacgagatattgggtagatacttcgaggttctacgagaaaatcggcaaatcgactttgaactcatcctcttctatgcttaccaactaatttcccgccgtcctgcaatcagcactctcttggggcagttgttttctttcttattggtcgatgagtatcaagacactaagcgaattcagtattcaatcatcactgctatcttgaaagccggccaaggcgcaaccaaagctttcattgtcggcgatcccaatcaggcgatttatcagtcactcggcggatacccgattgcgtttggggatttcaaggcaatggccggcatcgacattgaggagcgcgaactgtcgaggaactatcgctcttctgagcgcatcattgactacttcggaaatttcaatgttcatgcgactcgtatcgaagcagcatccgtcgataagacttaccagagtcttgtttctttcgacgagacagtaagcaagacggacttggaagctgagttgatccgacttatccgattcaacatcgagtccatcggaatcgcaccccatgaggtgtgtgtgctcgcaccacagtggacgcaccttgcaagcatgacacgtcgcctggtagcgagcatgccagagtattcgttcgatggtcccggcatggttccctttgcgcgtgacacagagaatttttggtaccggctctcgaagattgcacttacgcaggcgtcgccggcaatgtatgtccgcagactccgctgggccggcgatatcctgaatgacctagaggcggccggggcgagcgtgtccaaattcactcggaaatccctgttaagggaatgcaacgcgatcaagatagatgaaacggatgggctcacctatctccgcacgttctttgaaatgctatttgccaacttggctatcgactttcgtcttttctcgctgcttcaagagcatcacacagcctttttcggtagttcgcaagctagaattgatcgtctaaagagcgagggcagcgaattcattggagacatcgagacgtttagaaaggtatttcagagccggacaggcataactatttcaacaattcacggcgtgaagggggcagaatttgatgcggtgatcgcctatgccttgctggaagacatggtgccgcattttaatgacccgaacggccaagaaagtgcgatgaaactgctatatgtcataggatcacgcgcaaggaagaacttgcacctaatttcggaacggggtcgcattcgccagtacactggtgaagaatatcaagcgactcggcaactcgtatcctgcaagttttcatacgaccaggccaagtga

SEQ ID NO: 352447 - DNA, 981 bp, Pseudomonas aeruginosa
atgggattggtgggtaggcgtgatggccgtaatttcggttacggcaggcaattgagctacgcggggccgcaagcgctgaaagatatgttcggcggaggtcattacgccacgttcaaggcgcactgtgatcgctggttagcgttcgtgaagtggtgccgctccgataagggccccggcatcaatgatgcgcggcacattgatcggaaggtgttggccaactatgcggcgtatctgcacaacgtggttaggcgcggtgaccttgctgtcagcaccgcacaaaaccgcctatccagcgttaacaggactatggctgcgcttcgcggtgatcagtacgtgacattgcccagtccgagcaagacgttgggtatgcagcgcaccgggattcgacagtcggtgccgcagggccaagaccgcgaccaggttaagcagattgtcgatgcgctttgccgcgatcatcagctacgggccgctgcaatcgttctgttggcgcgagccaccggcatgcgcttgcgtgaggccatcctagccgacttgccacggctgagccgtgaggctaacgaccgaggcaagatcaacatccaggatggcaccaaaggtggccgagctggcgcctcagcgccacgatggattgcggtggaccaccatgttcaagacgcacttgggtttgcacggcaagtgtcgcctgcgagtagcagcaacctgattgcgccagacgaaagctatctgactgttctgcaggaaatcatccgcccagcgcgggacgtcctgcatgcacacaacctcaaaggcttccatgagctacgagcggcgtacgcatgtgaacgctatgagcaaatcacgcatcaccctgcgcctatcaacggcggcttatgttgccaggcagataggaacctagatcgtgaggcccggaggcaaatcagctatgagctggggcacggtcgaatcgatgtggtcgcggcctacattggaggacgcatatga

SEQ ID NO: 352448 - DNA, 888 bp, Pseudomonas aeruginosa
atgattggtgtgaagcttcagactgcctttcgaaaaaattcgaaaggcgcacgcggggaaattgcgctcttccgtgcctttataagcgcatttgatgcgctaggaggcgaagcgctagcaaaggaatatcatgggagtcgctaccaggtaaccttcgatgaggggcgaggagctgggcgcccagtgcctcgatgtgaattgtgtgacgtgatgatcgtgagctatccgaaagggaacccctgggctgcgcgagttacgttcaaccaagctaaggttgctggctctgcatttcattgcagctggtcccccgcctcgcatggcccataccgtttccgtgcgaatcttgagcaatgggatttactatcaaataggccctcgattaacccagcgacagctacatttagcccgccagcggggcttctgaaagatgcgttgctgccttcagttggatcgtttggggtgttctatccgtcggcaggaggatttgagtttgcttatttcgtcgcaaacgctctcactccgctgaataatagccctagtcgctctggaacccttgagtgggatacgccaataagtaaggtccggagggtagggaaccatgatgaagtgttaggaacttgttgcttacaatattttggagatggtattgaggggggatacattggtactcccttaacacagcttttgaatggtacgccaggaagtcaacaaagccgtgcttggattgcgcaaattttggtctcccttcggagtgagtatcccgaatcatcgctcccaagcgagttgatagaggggcttgagcttcgagccgggctaggcgatgaatatcgcgcattggtcggcggcggatactcgtctcctcgcgccgtggtactgattaggacgtaa

SEQ ID NO: 352449 - DNA, 741 bp, Pseudomonas aeruginosa
atggcatcgaaagcttttgcaaaattccataagaccgccaggcgttgcgaaacattagtagatacctatacggtgatccacacgatgaacgcggcagatacaagcgccccgtcagctcccaaggatataatccgcgcagcggtagtgcttgcagtggcggctctggacgcctatgtgactgacgttttcgtcgaaaagctagccacgtaccttaaaaggcatcgccctgacgactcgttggttgaactgcttttgaaagcaggcctagatacgcgtgaagcattaagccttctgacaatggagcgcccctaccgtcgaatccgcaatttggtacgggcgtattactctcaatataccacccagcgatttgacgttatcgactccgtatttcttgtatatcgattaaataaaataactgacgctgctttcaggaagactcgtcaggcccacatcaagagccgggtgggggacctcatcattcgacgccatgagatcgttcatgccggagattacaatcaggcaaaccgcatccaagatattgacgaggttaaggtcaagcgatggattaaagcgttggaagacatggtaaccgctatggacgagataatttgcaaccgcatcccgactcccgaggcacgacgggtgcctgcggtagcgaatgaggcagcggcagctgcggctctgccggttgcggatgatgacctagcggggcccattttggccgaagcagacgaatattga

SEQ ID NO: 352450 - DNA, 1302 bp, Pseudomonas aeruginosa
gtgagcgtattcgttaccgtgcgtgaatatgcgcgtctgaccactgcagcggttgcacccggcaaccttgattgtgcgcagatttccgaaagtgccttcgactggttgtgtgagctgagcgctagcttcaatcgcagcggtgcgactctgctgcaggttgaaggtcggcgtgctcttaagtgggattcctacgtgggcgtattggaaacgccttgtggcacgcggctggagattctgcccaagcaccatgagcaggacgattgcctggtcaagagccgcctgttgctgcgcaagctcattcagcaggctctgcaactcaagcctcgtgagggttcggtagccagccttgaactgttcgatgcgccactcagcgagtgggtgatggggcagttcctggtggagctggatttgttggtgaagcgtggagtgcgcttcgactatcagcgaatcgaggaggagcagcgctttctccgtggccagctcaatgtggtggcacagatgcgccagccgcctgggcggcagcatcacttccagattcgccacgatgtattcctgccggatcgggcagagaatcgcttgctcaagttggcgttggaacaggtggcaaaaagcacacaagatgcctccaactggcgcctggccaatgagttacgcgccatgctggcggaggtgcctgccagccggcaggtgagccaggatttgcgcgcctggagccgcgaccggctgatggcgcattaccaggcgatcaagccctggtgtgagttgatcctcaatcagcagatgccgatagccgtgagaggtgaatggcgcggcgtgagcctgctgttcccgatggaaaagctgttcgagcagtatgtggaaggctggttgcatcagaaactgctgcccagcgctcgtttgaaagcgcagtcagctagccagtacttgtgtgcacatagcagtgatcggatgttctgcttgaagcctgatttgctgatcgatacagcggagcagcgctggattcttgataccaagtggaagcgtatcgatgccggtaaacctgagaagaactatgacctgagtcagagcgatttctatcagctgtttgcctatggacacaaataccaaagaggcgatgaggtgccggggctggtgctgatttatccgtattggtctggactccagaaagcgctaccgctgtttgattacggtaagggaatgcggttatgggtgttgccttttgatctggatgctgagtgcttggtagagatggagaaagcgactttgcctttgagccttgactcatttgctcgcgccagctag

SEQ ID NO: 352451 - DNA, 3111 bp, Pseudomonas aeruginosa
atgagtgttaatgccgatttctcccggctgctggactatttgagggcgcagggggctgctgcacaaaagcgcaccgaggattcccaggagtaccgggactttctgcaagactttcctctgagccgcctcaaccagttaacgctggatgagtactgtgtaggcaagggcgacggggcttcgttctgttggtggatcgagcgcggactggtaccggtattgggccgctatatgcccggcaccgccaagggccatctcctgtattttcaggaagatggcagcctgtataagaaccgtcgcctgctggatctcggtgatgaagaggcgctgcgctatacgctgagcatccaaagcactatcgctgcagccgatcccactgatctgctctgggtggatgacgacaaggaaatctaccgccgcgccggtgtagagccgcgtgtcacggtcggcgcaggacgcaagctgcgcctgttgtcctgctatcacccggcgcacaccttgccgatttcctccagcgatcacctggggcatttcctgcagaggctgggttgcccgccagcgcttatcccgtcggccaagctgccggtggcgcgcatgctgaagttgcgcgagtactacttgctcgcccgcgagtcggtgccgggtcttagcccctatggatttatgcgcggactgtacagcgaggagctaggattgcgcccgaccaagtccgagcttgagcaggacgtgcagccggggcagccaagctacctgctcacgtggaacccggcgcatttcaagttgggtggagacgccggtgttgagttggggcaggagattgattggagttgccattcgaaacagccgcaaccgggcgatgtggtttatctggtgcggttggggcaggaaccacggggcatcgtagcgcgcggcctggtgacggagggggcgcatgacgggcctgactggaaggattcgagtaaaacccgcaactacatccgctttcgcatcgatgagcatcgtcccgactgcgcgcgtggcttggtgcccatgctgctgctcaacaaggccatgcctacccagcgctggaacccacagagctcgggcgtcgagattgctccggccattgcagcccggctggagctgctctggcaggcgggcgaagggcagcacagtctgagacagtacgtggcctggagttcggcggatcgtaaggagtcctgcccgggatggctgaggatttatcaggaggtcaccgcgctggccaaggccctgcgcactggtcaggcgcctctggaccaggccgtcctaatccggctgtggattgagcgcgaaaacggggtttccagcttgaagctggggttgttctctcgggatgagctcaacgaacaacaagccgttattcgggaaatcacgcagcgcatcatggatgcgcctacggcgcagactcacgcacaggtgatgaaggattggcgtctggcggttgagagcaagcagttcagctccaaccgaccggccatggtcaatcgtgtgtttgccgcctttgcaccggagcggttcaccacactgctgaagcctgaggattgccagcgactcttgcagggcttgcgtgagcttttccagctggatgtggctcacgaacagcaggactggtgtgcgctgaatgagcagatcatggcgtgcatgagtctggccgggctggatacagatgccgtcctgtcaaacaacattgccatgtggcagttgctagaggcgctgcagggggcgaaaggcgatgtacttgaagacgtgcaagagggagatgccagggtggccgccaaagatattccgctgaaccagattcttttcggcccaccgggaacgggcaagacgttttccgtcgtggaggaggctctgaagattctggctccagaggtgctggagacacccacgcgggagacttggaagaacgcgttcgatcagttggtgctggacggtcgagtgcgtttcgtcacgtttcaccaaagcttcagctacgaagatttcgttgaaggtttgcgagccgtatcagagggcggacagctgcattacaaggttgagccgggtgtattcaaactgctctgcgatgacgcgcgccaccaggaaggagcgcagacagaagatgacgtgctcaatgcgtttctggaagaggtcactgaggctcccgtcacgctgactacggtgcgtggcaagtcctttgatgttcgctacaggcccggcaatgggactttcacctgtcagcccaaggcttcggaaaatgcgctggagctgccggccaacatcgagcatgtgcgcttgttcatgcgtggcgagaagcctgcgtcggtctattgcgaaagctatgtgagagggatcgccgagcacttgcgcggcaagctggagaacgacggcgctgggcagtcgaatggcgagaggctgccttatgtgctggtgattgatgagatcaatcggggcaatgtttcgcgcatctttggtgagctgatcacattgattgaaacctctaagcgagatggtgcgacggagagtttgtctgtcaccttgccgtactcgaaggagcgtttcacggtgccggataatgtctatctgatcggcaccatgaacactgcagaccgttcgctggctgggctggatatcgccttgcgtcgccgttttatcttcaaggaaatgatgcccaatccctctttgctcaatggcgtggtgttggagggcatcgacattggtcagcttttggcggtaatgaatcagcgtatcgaggtgctgctcgatcgtgatcattgcctcggacatgcctatttcatgtcgctcaagagtggagactcgttgccgcagctggaggtgattttccgcaatcagatactgccgctgctgcaggagtatttcttcgaggattggcagcgtatccagtgggtgcttaatgaccaccgcaagcctgcggcagaccgtttcgtggagcaggacaaacaagatgtggatgctttgtttggcaacattagcgtgccggcgcaaggtggggtttggcggatcaatgcggctgcattccagcgagtttctgcgtatgccggtgtgattgcagtgcaggccaaggctgaggttccagtagaagaggcgggtgcgtga

SEQ ID NO: 352452 - DNA, 1392 bp, Pseudomonas aeruginosa
atgagttctgactttggtgcccgtgattcttgtgagcgcctcacagtgacgagatctttctcaaaactgattgagcagggagtgttggagatcggtgatggctatcgtgcgaagaatgacgagttgggcggagatggcttgatttttttacgcgctgggcatgttcgagatacccatattgacttcgatggcgtggatcattttaaagcaattgataattcgaagctcagaggcaagctatctgttttgggcgatgttgtggtcacaacaaaaggtaatagcaccgggcgcattgcgtttgtgaccaagggtatgcctgagtttgtatattccccgcatcttagcttctggcgctctaaagatgagtctgtgttatgtcaggggttcttgcgggcatggtctcggggaggagagttcgaatctcaacttcaggcaatgtgccggtcgactgatatggccccatacctgagtcttactgatcagaaacgtcttcatattactcttccttcgatagagcatcagcgagaagctgccgagatacttgatggcatagaagcccgcatcaccctgctacgcgaaaccaacgccaccttggacgccatcgcccaggcgttgttcaaatcctggttcgtcgatttcgaccccgtgcgcgctaaggtcgaaggcctacagccggaaagcatggacgccgccaccgcagctctgttccccgacagcttcgaagagtccgaactgggctcggtaccgaaggggtgggaagttcttccgttgaggcagttgtgtgcattccagaaggggtgctcatacaagggagatggtctggcggatggagagggggcttatatgttcaatctcggctgcttcaataagccgagggtttatgcgtttcagaaggtcaagaggtatgtcggtgactacaagcctaagcatcaggtttatccaggtgacttaattattgccaacactgatatgacgcagcagcgagatattcttggtcggccactattggttccaagtggcatggagccagggttcatttctcaccatgtgttcaaggttgaagtgggagagaggttcggtaaccagataagagacttcctcttcttctctttccagcaggccgtatttagggaacgtgcagtagggtatgcaactggtaccactgtcttggcgttgccgagggatgcgctggaggagcactgcgttgtgcttccatctcagtcgctattgatggcgttttcagatgttgtttctcctttgctatcaaccatccatgagaatgaagagcgtgcaacattgcttacccaactccgcgacaccctcttaccccgcctgatctccggacaactgcgtttgcctcaggccgcagcgctgatcgaggaggcggtataa

SEQ ID NO: 352453 - DNA, 762 bp, Pseudomonas aeruginosa
atgtcgatctgtaacttgtgtctcaaagatagaagtctttctaaatctcatgtgattccaaaagccttcctgaggcgtttgaaggtagactctcctcagcttattaggttttctagtgagccaggcgctaaacctgtgttggaaaatgctaattggactgagcgtctcctatgtagtgagtgtgagaagtttttagatgtgaattatgagagaaagcagatagggtatatttgtagtggaaacaattctgtggaaggtaatggcaagataacttttttaaattttgattttgaggggtcctatcttttctggatttctataatatggcgggcttctgtgtcaaataggttgccatttagcactgtcaacttagggccagaggtgaatgagatcttgcggcgtgcgatagtcgataagcgtgttttttatcctaggtattccttgtcggatattgtaaatgttgggttggttcgggttactaatgagccttatattagtgatcgaaaaataaagctcatactttctaggtttgtgtatgagaaggttggtgggtcttttatgtattactttatggtggaggggtttatcgttttttattatttttcttgttccgaatgggatggcattcccatagagtatggacgtgttaaaagtagtgcgtttcttcgagttcccaaaattcatgttgagagctctgaagtcataggtaggttctataatacgcttttggataaagctagagagttcccttctgactcttga

SEQ ID NO: 352454 - DNA, 651 bp, Pseudomonas aeruginosa
atggatatagatagctttaatcagtgtttgagctatttgcgtgagctgcctcagggcgggtttggagttgataaatttgtgccgtggttgagcggtactgtaggtgtggttattggctttgtagtgaattttttaagggattcttttaaagagcgtaaggggtttgggaataagcttgtttgtatagatgaagatgtgcactatctgcgagagcaatttaaaaatataatattggccgcaatcgaaaagctcgggcaggtatcgaggaaccaagtgagtgcagatcacttgtttcctggtagactcgaggcagtaatgcttgagagttactttcgtgagattgcacatttgtatgacgtgaatcaaagatactatttgaaggagctgcgtggaagcattactgaggtaaataagtatgtttctgatgtggttagttcaaaggataacgactttgggtttgtatggcagtcttcaattgtcaatgccttgcatatctccacctactcgtatggtctttgtgatatgttttatggggaaagagaaactattccctcggctgaggagcttctttctagcttgggagtggaaatagctcttgtttctgcttataaaaaggttgttaaggatctggatgctctaagaggggggtga

SEQ ID NO: 352455 - DNA, 762 bp, Pseudomonas aeruginosa
atgaccagcatgttcaggcgtcgcgtggaaatcgtttcgagccacggggaggtacgggcggccctggaagacgacttccatcacttccgcgtacgactgcgccatcgcgatggaatcctcagcgaaatcgagggcgaggcccttcgccatccctacacggcctgtctccaggcgaccaatatgctggaacagctggtcgccatgccactcaaccgcatcgcccactcggtgacccggcagaccgatgctcagcaccaatgcacgcatctgctcgatctcgccgggctggctatcgcccaggcggcgcgcggcacccagcggcggcgctatgaaatccaggtcccggaccgcatcgacgagcacacccagccggcgctgcagcgcgatggacaggcgttgctgacctgggatgtacggggctctgtcattgaggggccgccgccctacgccgggatcaatttgcgtgaaggaatggcccgctgggcactgacccacctgcccgaggaggaagccgaagccgcactgctactaaggcgctgcaccctgatctcactggggcggatgcacaggctggatacccaggtgcatgcctccagcacgggccgctgctacagccagcaaccggtacatgccccgcaggcgttgcggatcaagggttccacctgggacttcagcgaaacggcaggcatgctgtgccaggatgaccaggcatggctggccgggaagccggagcctacctctgatgctgctcgcctaagctaa

SEQ ID NO: 352456 - DNA, 162 bp, Pseudomonas aeruginosa
atgtaccccccccaggcgaagcattgcgcctcgacgtactcggcactcgacatgagccttgatgccctggcggcgcatctggggcactcgccccgccagttgcggccggtgctcaacggccacacgccgatctggcgcaccggctggaactggccgggctag

SEQ ID NO: 352457 - DNA, 1449 bp, Pseudomonas aeruginosa
atggctcgttattgcagtgttcggcggcttagtgtgtggtggtgtctctgcttatgcgttttatgcgcgacagtaactgaggctgctactcggaagcatgtgaatgttcctccggcccgtgatcaagttaggagtggtaagtctgcaagtgtctctggtggaattctgactattactggcccggctttggagggtgaatatatcccgcgtggcggcacgggcggtgcaaatattccggtgcgcggtattcatggcggggttactgccggtgctcgtactattgccagtcgtgcggtttccggcttgcgcggtggcattataggggttgtcggaactgccgctgtcgcggctgcgctggatggtataggcgcgcttattgatgaggcggggaagcctgttaagaaagtacaggagaccgcgccgcaagacgtgttctgttactattttacagagcacgaactaggtacagagtgtacaagcccgacaagcttgcagactaagtttgcgagtatatttactcagcaaatggggccgccttatgtttataggccgaaagaaatactttacgataaaaataacatagcaaccgatgttgttattgtttatcagaatgacgtcagaacggctccgattaatgcgcgtggcacttgtccggggtctatcaactcttcgggcgaatgtgttgttgatgaaattattgtgccgttaactgattctgactatacggccattgaggatgccctttcgaacgtacagaactctacatggctcaaggatttgcttacggctacatgcgaaggctcgcttagtcctggccggtgctacgacgagttgaccagtcttgcggaccagttgaaaggacctggctcggtcaaaggcccgtcaagctcgaccacaagcacttatacgcgtcctgatggcactaccggcacgactaacactactacggaaactaattacacgatcaattacggcccgaactatttcgactactcgaagacgacgaccacgacaactagcaaggatggcgagaaacccacgacgacgacggaaactgaatcgccgggggtgacgggggaggagcctgcgactgagcctgagtctcagacgccttcgccatgcacgacaaactgcgagggtcccgcatatgaggatcagtacaagccgactgaggaaacgaaagaaagcgttatcgacaactatctgtcgcgtgtagagcaggcgccgatagtgaatgcggcaacgggatttttcgatgtttcggtttccgcatcgtgtccaacttggcaagcgcctgtcgatatgtcgattatgggtgcaagctttcactctgaacttgtatttgatcatcactgccagccctggtttaccggatataggacggcggccatggccgttgtgatgattctttgtgcgttcggcgcgttctatatcgccatgcttgattga

SEQ ID NO: 352458 - DNA, 744 bp, Pseudomonas aeruginosa
atgaacagcctgttgttgaactgcgatatcggcgagagcttcggcgcctggagcatgggcctggacgccgaggtgatgccgctgatcgattgcgccaacatcgcctgcggcttccacgccggcgatcccggcaccatgcgccgcaccgtggccctggcggtggagcatggcgtgcgcatcggcgcgcaccccggctaccccgacctggtcggcttcggccggcgctcgctggcctgctcggcgcaggaagtggaagacctgctgctctaccagatcggcgccctcgacggactctgccgcgcccagggcgaacgggtgcgctacgtcaagccgcacggcgcgctgtaccaggacatgatgcgcgacccggcgatcctcgccgccgtgctgcgcgcactggcggcctacgaccgcaccctgccgctgatgctgatgagcacccgcgacaacaccgcggcgcgggcgctgggcgcggcccacggcatcgagctgtggttcgaggcgttcgccgaccgcgcctacgacggcgccggctacctggtctcgcgcagccagcccggcgcggtacaccacgacgccgagacggtgctcgcccaggccctcctgctggcccgtggcgcgccgctgagagccagcgacggcagcgccctggcgctggaggcgcagaccctctgcgtacacggtgacaaccccgcctcgctggccgcggtgcggcgcatccgcgacgccctggaggcggcatga

SEQ ID NO: 352459 - DNA, 348 bp, Pseudomonas aeruginosa
ttgctgctggtcgagcaacgcggcgaggtcctgcaggttgcggcctccttgctgttgctgctggtcgagcagcgcgacgaggtcttgcaggttgcggcttccctgctgttgctgctggtcgagcagcgcgacgaggtcctgcaggttgcggcttccctgctgttgctgctggtcgaggaccgccgccaggtcctggaggaactgccggcccttctgctgttgctgctggtcgagcagcgcggccaggttcggcaggttgcggcctccctgctgttgctgctggtcgaggacggcggccaggtcctgaaggagctgccggcctttctgctgctgttgttggtcaagtag

SEQ ID NO: 352460 - DNA, 531 bp, Pseudomonas aeruginosa
gtggagcgttttcccagtacccgtgcgttcctcgcggcgcgcgacgcctaccgccaggaacggcgacgctggatcgccgcgcacgacgcctggcgggaacgggtcgccgacctggaggcggcggcggatgccgagtaccgtcgccggcgcgacgagcagacgcgcgaggaggcgttgtaccgtcgctatgcctcggcgctgccgggcggcgattccaggttggcgcgccgtccctggcgagtcgacggcaactggctggtgctgcaccggcgcagcctggccgagcgtagcgaactgctgctcagctcggtgtctgccgacggcagcttgctctggaccctggggctgcccatcgagcgtcccgaacggctgttccgcctggatgcccgcaacctgcttctcagcggccgtggagaggacggcggacggttggtgcgggtcgatctgcgccggggcagcggcatcgtccatcgcctcgggcgcggcggcgcgccattgcagcgggtcgagtggcccgaaggccaaccgtga

SEQ ID NO: 352461 - DNA, 264 bp, Pseudomonas aeruginosa
atgacaaagacgactccgctcctgctggccgtgctgctgtcggcctgcggcccatccgaggccccgaagcagaaggacattccaaccgttgaagaattggcctctgagccccaacggttgaaagaactgcgccggcagtgcatcaccgaccgtgccgcgctgggtgacgagctatgccgcagggtggccgaagccactcgcaagcgtttttatggcgacggtaaggtgccctatacgccccaggagaagccgcccaaattctaa

SEQ ID NO: 352462 - DNA, 483 bp, Pseudomonas aeruginosa
gtgatccgcagcctccgtttcgacgacctgctgcaggagcgggcactggacgacgctggtaaggattccgacgagttcgcacaggccgacgccagcttcgtcctgatgatacccaccttccgcgagttcataccgcaactgctggaggccttgggcggcgaagagtccccgcagggaatcgacggtgtgcacaatgagcccgaaccagcgcctggcgccggcatcgacgtaaccaaggcgctggggatgcacgacggtatcaccgcgaccctccatatcccccgggccaacgggcccggtgacgacccgctgctgaaggaggccattcgcttcgtccgcgagacgcgccgcgcttcgatctccgccatccagcgcaaactcaagatcggttacaaccgcgcggcccgtctggtcgaggaaatggaattgctgaatatcgtcgggccgatgaagggagacggatctcgcgaggttctgtcgtga

SEQ ID NO: 352463 - DNA, 363 bp, Pseudomonas aeruginosa
atggagcatcacgaccggccgagcacgctgcactacgtcgacccgccctacgtccattccactcgcagcaccaaggtccgccacaacgccaccggcaagtcgtaccgacacgaactggacgacgaccagcaccgggatctggcggcgttccttaaggggctgaccggcatggtggtcctctccgggtacccctgcccgctctacgaccgcctttaccgccactggcaccgcctcgagcggaacgccctcgccgacggcgcccgcgaccgcatcgaatgcctctggctcaacgatgccgcgcgcaggggcctggcccagctcgacatcttccacgacactaaggagccggtcaaaaactgctag

SEQ ID NO: 352464 - DNA, 231 bp, Pseudomonas aeruginosa
atggatctcgaccgcctctacctgccgcattggcagttcagcgagcgccatcagcggctgatcgacgcggtggaagacctgctgcgcttcgacgacccgctggtgtgcgccctgctcgaagcgccggcgctaccctgctgcacacggaaacccgggtgttctgccccgatcgcgccagccgcctgcgcttcaccccctactgtttggcgatccgcccggtcagcgggctga

SEQ ID NO: 352465 - DNA, 435 bp, Pseudomonas aeruginosa
gtgccgccgctgatcgcccgcctggtcgaacagcacgccgccaactgggtcgggctggacaccctcgacgcctggctgcacgcgcccggcgaggccctgctgctgctctgcggcgacccgcaacgctacccggaatgcctcgacgtggcggtcatcctgccggagctgtgccgggccctgagcacgcgtcacgcctgccacctgcgcctgggcgtgggccgccgcgacgacgaagcggcgctggccgagcgcttcgccctgcgccgctggccgagcatcatctggctgcgcgacggccactacgtgacccagatcgacggcatgcgcgactgggacgcctacctgcacctggccggcgccgccctgcaacagcgccaggcgctgatcccgctgcgcgccgacgagccgccgcgcgcccctggaggttgccaatga

SEQ ID NO: 352466 - DNA, 858 bp, Pseudomonas aeruginosa
atggacccgctgctgtacatccccctgaccgacatcggccccggctcgcaacccgaggacgacgcggtgctggaatacatcagcatgccccagggcatgtacacccattcgctgccggaactgcccgagcccgaagtgctggatgccgcgcccggtgcgcggcagatgctcggtgaaatcctccatatgctgcgcagccggcatgccggtgactgcccgccgagcctcgacctgcggcgctgcagcgcggccgaccggacgctgctcgaccagttgctcggcgaaggcgaagtgagtgcgcgcatcggtgccggggtgcgtatccaggaatcgatcttcgccggggtgtggcgggtcttcggcgacgagcatgaccatatcgacgtggccccggcgccggccgtgctgcaccgcgcggcgcgcatcgacacctgcgcgcgagccttcgccacgtgcctgccgctgccggacggggtgatgaacgccccggccatcctcaccgaactgcaggaccgcagcgcgcgctggcaacccggcgacgccgcccatgtgctcaacctcagcctgctgccgctctccgaacaggatgtgccgttcctcgatgcgcgcctgggcgaaggcccggtgctggtgctggcgcgcggctacggcaactgccggatcaacagcaccgaggtggccaactgctggcgggtgcgctacttcaactcgcaggatgcgctgatcctcgacaccatcgaagtcaccgacctgcccgaagtggtgctcgccgccccggaagacatcgccgactcgctggaacgtttcgaagacatcatccagtggttcgaaggcgaatgcgcgcaggttccgcgatga

SEQ ID NO: 352467 - DNA, 225 bp, Pseudomonas aeruginosa
atgagcgcgcgcgcaggtttcgaaggcagctacctgggcgaccgcgcgcgcctggccgacgacacacgcctggaatgcaagatctgctggtgggtgtacgacccggccgagggcgacccggtgtggcagattcctccgggcacacctttcgcccaactccccgagcactggcgctgcccacactgcgacggcgaggccgaacagttcatggtgctcgatgactga

SEQ ID NO: 352468 - DNA, 480 bp, Pseudomonas aeruginosa
atgactgacccgaccccgcgcgccgaggcgctggcccggcgcttcagcgagatcgccgcgacacgcatgcgcggcctgccgctgctcaaccccgcgctcggcgtggaagccgtcggcttcgccgcgcagagcctcggcacagaggccggcagcggcctgctcggggtgctcgtcacgccctggtgcatgaacctgatctggctgcccgacccgggccagccccggccacgcgaaggcgagtcgcgcgaataccgcatcggcgaccagcaactgggcttcatcgccgcgcatgacgaggtcttcggcgcctaccagagctgctcgctgttctcgccgatgttcgaattcgctgacccgcagagcgcccgcgacaccgcgctccaggtgctcgccctgctgcgccgcggcaccccggccgaaggcccggcgctgggccgccggcgcctgctgttcggccacctgcgcgaggccgcgcgatga

SEQ ID NO: 352469 - DNA, 1083 bp, Pseudomonas aeruginosa
atgagcctggagcaggcggtgtcgcgcctggccgggtcattgcaggtgcgccccggccaacgcccggcgctttccggtgggcggccgccgctggctggccggctgctgcgcgggcaaccctggcaggccgcggcgcagcgcctgccgctgctctacagcctgtgcgggcaggcccaccggctcagtgccgaactggccgtgcaggccgcgcgccacggccacgccgaagccagcgaggcggcgcgccaggcgctgcacgccgaggtgcgtcgggagcaccagcggcatatcgtgctcgactggccgcgcctgctggccagccccggcaatcacagcgccgcgctcggcgcccacctgggcgaagacccgcgcgcctggttcggcgtatcgccgcaggcctggctgcgcgcctggtacgacgacccgcgcggcgccttgcagaccttcagcgacggccgcgaacactggctggcgcgcctgctcagcgcgtgccgccagcgcgccgaagccctggccctgccgctgcgcgccctgcccctggaagccggcagcctgcgcagcatcgcccacgacctgcaacgccgcgaaggcttcgtgcggcgcccggaactggccgggcagccctgcgaaaccggcgcctggacccgcgcccacgcggcctcgtcgccggtctgcgacaacgcctggctgcgcctcggggcgcgcctggccgaccttgccgaactcagcctggaacacccgcgcccgctggccctgggcgccctggccatggccgagggccaggccctggcctggtgcgagaccgcgcgcggcctgctgctgcaccgcgtacacgtggaaacccatggcccgcaaccgcgcatctgcgactaccagatactggcgcccaccgaatggaacctgcatcctcgcggcgcactggcccgtgccctggaggcactgccctgcgacagctcggtacggcgccaggccgaactgctgctggcggtctacgatccgtgcctggcctaccagatcgaggtcggcgcgcccgagcggcccgccccttcggcaagcgactcaggagcctatccgcatgcatga

SEQ ID NO: 352470 - DNA, 348 bp, Pseudomonas aeruginosa
atgcatgaagtcagcctggccggcggcatactcgccgccgtcgaagacgccgcacgccaggacccgttcgtccgcgtcagccgcctgcgcctggaagccggccagctcgccggggtggaagtcgaagccctgcgcttcgccctccaggccattgcccccggcagcctgctcgatggcgcgcacatcgagatcgaacagcccgacggccaggcctggtgcctggattgcgccacccacgtcgccctgccgcagcgcggcgctgcctgcccgcactgcggtggcttctggctgcagcccaccgccggcaccgaactgcgcatcctcgacctgcaggtcgaggactactga

SEQ ID NO: 352471 - DNA, 954 bp, Pseudomonas aeruginosa
atgtgcgtcgtctgcggctgctccggcggcccatcccactcccacactcccgcagcgcccgacgccggcctgaatgccagcgccgacctgcactacgggcagggcgccgccggcgtctcgctgcccggcgtgagccaatcgcgcaccattcgcctggagcaggacgtgctcggtgagaacgaccgccacgccgcgcgcaaccgccaggacttcgacagccatggcgtgctcgcactcaacctggtctccagccccggctcgggcaagaccaccctgctctgcgccaccctgcaggccttgcgccaacgccaggcgcagttgccgctggcagtgatcgaaggcgatcagcagaccagccacgacgccgaacgtatccgcgccaccggggtgccggcgatccaggtcaataccggcaagggctgccacctggacgcgcgcatggtcgccgaggcctatgcccgcctgccgctgcaccatgccgtgcacgcccgtgggcacggccatggacagccgaccgcacgcctggcgccaccggcggcgggcagccggctcggcaccctgcggccgctcaccgcggcagggccggccggcatcctgttcatcgaaaacgtcggcaacctggtctgcccggccctgtgggacctcggcgaggccgccaaggtggcgatcctctcggtcaccgagggcgaggacaagccgctgaagtacccggacatgttcgccgccgccagcctcatgctgctgaccaagaccgacctgctgccgcacctggacttcgacgtgcagcgctgcctggactacgcccaccgggtcaacccgcggctgcgcgtgatccagctcagcgcccgcgatggcagcggcatgccggcgtggctggattggctgctcgacggccgggcccggcaccctggccaacccggcgaacacgtatcgctggggtgccggcatgactga

SEQ ID NO: 352472 - DNA, 1173 bp, Pseudomonas aeruginosa
atgactgagctgcacacgcaacgcctgccgctcgcggcggtctggccgccggtactggcctgtggggcctggctgaagaacagcgcctgcctgctgcagggcgaccgggtgctctggtcgccggtgcatggcgaccttggcgaggcggccaactgcctggccctggaagcctccgtggagcaactgctggcgcacgccgaagccccgccccggctgatcgcccacgacctgcacccagacttccacagcacccggctggcgctcgacagcgccgcacgcctgggcataccggcactggcggtgcagcaccaccacgcgcacatcgccgccgtgcaggccgagcacgggctggccgggccggtgctcggcctggccctggacggggtcggcctgggctgcgatggccaggcctggggcggcgaactgctgcgcgtcaaggcctcctcctggcgtcgcctcggcgcgctgcgggcgctgccgctgcccggtggcgacagcgccgcccgcgaaccctggcgcctggtggccgccagcctgcacctgctcggccgcggcgaggagatcgaggcacggctggccccgcaggtcggcgcgccggccgccgcgaccgtggcacgcatgctcgaacgtcggctcaactgcccgcccagcagcggcgccgggcgctggttcgatgccgccgccggaatcctcggcctgagcctgcgccaggcctttgaagccgaagccgccattgccctggaacgcgcggccagcgactacctggccagccacccggcgccagcgcccgagggcctctggcaggtctgcgacaacggccgcctggacctgctgccgctgctcgcgcgcctgttcgaactggccgaccagggccgcgccgccgaaggcgcggcgctcttccacctggcgctggccgcggcactggccgactggctggcacgccaggggggcgacctgccggtgctgctcggcggcggctgctttgccaaccgtctgctcagcgcccggcttggccagcatctggccgcccaggggcggcgtgtattcactgcgcagagcgtttcctgtggcgacgccgggctggccctgggccaggcctgggtcgccgcgcactgggctgccccgagcggccacgcggcgctgccgctggaggatattcccgcatgtgcctag

SEQ ID NO: 352473 - DNA, 210 bp, Pseudomonas aeruginosa
gtggtcgagttgcgcgacaacgaccaggccctggtcgacctgggcggcatccgcaaggaaatctcgctggcgctggtcagcggcgcacaggtcggcgactacgtgatcgtgcatgtcggttacgccctcggcctgatcgacccggaggaagcccgccgcaccctggcaatgttcaacgaactgggcctggccccggcgcaggacctatga

SEQ ID NO: 352474 - DNA, 1131 bp, Pseudomonas aeruginosa
atgaagtacatcgacgaataccgcgatggcgaactggcccgacagatcgccgcacgcatcgcccaagccgcccggccggaacgcgactaccgcttcatggagttctgcggcgggcacacccatgccatttcccgctacggtgtgagcgacctgctgccgggcaacgtgcgcatgatccacggccccggctgcccggtctgcgtgctgccgatcgggcgcatcgacctggccatccgcctggccctggagcagcgggtgatcctctgcagctacggcgataccctgcgcgtgccggcctccgacgggctctcgctgctgcgcgccaaggcccgcggcggcgacatccgcatgatctactccccgcaggatgcgctgaagatcgccgaggccaaccccacccgcgaggtggtgttcttcgccgtcggtttcgaaaccactaccccgcccaccgcgctggtgatccgcgaggcggcccggcgcgggctggacaacttcagcgtgctctgctgccacgtgctgaccccgccggccatcgcgcacatcctcgacaccccggccagcgaggcggtggccctggacggcttcatcggcccggcgcacgtcagcgtggtgatcggtgcggcgccctacgccgagttcgcccggcgctaccgcaagcccgtggtgatcgccggcttcgaaccgctggacgtgctgcaggccatcctcatgctggtgcagcaggtcaacgacgggcgcgccgaggtgcagaacgaattcatccgcgccgtcagcgaggccggcagccggcccatgcaggcgctcatggaagaagtcttcgagctgcgcgagagcttcgagtggcgcggcctgggcgagatgccggccagcgcccggcgcatccgcccggcctttgcccggcacgacgccgaagcgcgcttcgccctgcactaccagtcggtgcccgaccacaaggcctgcgaatgcgggccgatcctgcgcgggcagaagcggcccatcgactgccgcctgttcggcagcgtctgcaccccggaaaacccggtcggctcgtgcatggtctccaacgagggcgcttgtgcagcgcactacgcctacgggcgctacaaggacatcgaggtacacgccgtatga

SEQ ID NO: 352475 - DNA, 1065 bp, Pseudomonas aeruginosa
atgaacgctcgcgcccctgtcaaacgcggctatgtgcgcccgctgaacctgcgcgacggccaggtcgagatggcccacggcgccggtggccgcgcctcggcgcaactgatcgaggaactcttcctgcgtgccttcgacaacccctggctgcgccagggcaacgatggcgccacactgccggcccccgggcccggcgagcgcctggtgatggctaccgatgcgcacgtgatctcgccgctgttcttccccggcggcgacatcggcagcctggccgtgcacggcaccctgaacgacgttgccgtctgtggcgcccggcctctgtacctggccgccagtttcattctcgaagaaggcttcgccctggccgcgctcaagcgcatcgccgactccatgggccgcgccgcccgcgaggccggggtggccatcgtcaccggcgacaccaaggtggtcgagcgcggcaagggcgatggcgtgttcatcagcaccaccggggtcggtgcgctcgccgccggcatcgacaccggcggccatcgcgcccgccctggcgacgtcatcctggtgtccggcagcatcggcgagcacggcgtggccatcctctcgcaacgcgaatcgctggaattcgaaacaaagatcgcgtccgacagcgccgccctgcacggtctggtcgccgaactgctggccgtggcaccgggtctgcgcgtactgcgcgacccgacccgcggcgggctggccaccacactcaacgagatcgccggacagtccggcgtaggcatgctcctcgacgaggccgccattccggtgctgccccaggtcgaggccgcctgcgagctgctcgggctcgacccgctgtacgtggccaacgaaggcaagctggtgatcatctgcgccgagccggacgcccgggccctgctccagaccctgcacgcccacccgctgggcacccgtgccgcgcgcatcggccaggtggtcgaggacagccacggcttcgtgcagatgcacacccgcttcggcgggcggcgcatcgtcgactggctggccggcgaacaactgccgcgcatctgctga

SEQ ID NO: 352476 - DNA, 846 bp, Pseudomonas aeruginosa
atgacaagccaaactgcggtgattggaattgatgtggccaaggagtcgctgagcatctgtggtgcccctgcgggcgaagtgttcgagctgcccaacgagtcgtgttcaatcaggaactggctcaagaccctgccttctggctgttcgatcgcgatcgaagcgacggtgatctaccatgtcctggtcgcgactctgacccatgcacggggccatcggatctacgtcatcaatggttatcgcctgagcaattaccgccagggaattggtggtcgaaacaaggatgatcgcagcgatgctcagctgctggcccgctatctggcccacgagcaggcgcaattgggtccctggcagccgccgagcaaggtatacagccggctgcaggccatgttgcatcggcgtgccgtcgtcgttcgtagtgcgacctctctgcgccaaagcttctctcaggaccgagagctggccagcgagttgaaacccgtgctcaagcgcatggccaccctggagaggaggctggaagacgcgatccagtcaacgctggacgaagccggactgacagcccagagcaagcgctgccagaaagtcgagggtatcgggccgctgaccgcagccgccttgagcatggcattcctgcgcgggagcttccgcaacagcgatgcgttcatcgccttcataggtctggatgtgcacctgaaggaatcgggtcgctacagtggccggcgcaagctgaccaggcagggagacccggaaatccgccggttattgcacagcatcgccatgtccgcagcccgcacgcagcgctggcaatcgatctatcaaagctacctggcgcggcctgaaaaagactga

SEQ ID NO: 352477 - DNA, 516 bp, Pseudomonas aeruginosa
atgcccgactcctccacgtcccgcgacaccttccagcagctctatgccgacaaccaccgctggctgcatggttggctgtggcggcggctgggctgccatgccgatgccgccgacctcacccaggacaccttcctgcgtacctggacagccccgcaacgtgatgccctgcaagagccccgggcctttctctgcctggtggccaagcggttgctgtgctccttctggcggcgcaacgagttggagcgcgcctacctcgatgccctggccggcctgccggaagtcgtatcgccgtcggaagaagacctggctgttctgcgcgaggccatcgcggcggttgaccacatgctcgacggcctgccggaaaaggtccgccatgccttcctgctcaatcgcctggaaggcctcacccacccggagatcgccgagcgtctgggcgtgtcggtggcgaccatcgaacgctggatacgccgcgcggtgacccagtgctacctggccagcctcggcgggcagccatga

SEQ ID NO: 352478 - DNA, 987 bp, Pseudomonas aeruginosa
atgagccaggcagccgcaggacggttgcccgaggcgatcaaggcggccatcgactggctggtgctgctcgactccggtacggcccagccggctgaccgtggcgcattcgaagcctggctggcgagcagtgccgaacaccgccaggcctgggcctcggtcaccggcgcgctggcccagccgctggacaggctggccgatgcgcaccggcagatacccggcagcgagcaggtcgctaccggcgtgctgcgccagtccggcgtgtcgctggagcgtcgccggttgctgcgcggcggtacagcgctgctgctgctcgccgggctgcccggcgtgctgacgctgcaacggcgcatgccgctggagggattgatccgcgactactacagcggcactgccgagcgtcggcgcattaccctggccgacggcagcctcctcacgctcaatgcgcggaccacggtcgacgtggacatcagcgcaacgcagcgccaggtgcgcctgcatcagggcgagttgtgcatcgaggtggcggacgacccacgccgggccttcgtcgtgcagtgcgccgaaggccgcgtcagcagccatgccggcaccttcgtggtggcgcaggaggcggggcacgcctgggtcagcgtgatgcgcggcagcgcgcaggtgagcacgctctcggggcagtccgggcaactgcagagtggccagacgctgcgcttcgatgccttgcgccttgacccgaagggtacgtcgtcccggcgcctggatgcctggctgcaaggccgtgtggatgtgcaggacgaagccctgggctatgtggtcgatgccttgcgcccgtatcgctacggcctgctgcggatcaccccgcaggccgcggcattgcgggtgttcggcgtgttcccgctggatgacaccgagcgcgccctgcaatccctggcgcaggtgttgccgatccgtgtcgatcactatggcccgctgaccctcatcgacctggcctga

SEQ ID NO: 352479 - DNA, 2430 bp, Pseudomonas aeruginosa
atgcgcacctcacttcgcccctcgatgccgctggccttggccatcgccctggccatgcccggcgcgttcgccgaaccggcctcgcagcactaccagttgccggcccagcccctggaccaggccctgcgcgaaatcgcccggcagagtgggcgcagcatcgtcgccgacccggcgctggtacgcggccgtgccagccatgcggtagacggtgacttcgacgccgaagccgcggcgcgccgggccttgcagggcagtggcctgcaactgcgcaccaccgagaacggcacgctgaccgtcgagcgcacgcccgagggcgacacgctggagctgggcgccaccacggtgaacgcggcggcgctgggcgaaaccaccgagggcaccggctcgtacaccaccggcgcgctgaccatcggcaagggcgcgcatacgctcaaggaaaccccccagtcggtgacggtgatcacccgcaaactgatggatgaccagaacctcaacaccatcgatcaggtgatggagaagaccccgggtatcaccgtgtccggctcgcccatggccgggcagtatttctactcgcatggtttcaagatggatgcgccgtaccagtacgacggcgtcccgctggatatcggcagcagctacgtacaagccaacagcttcggcgctgacatgaccgtctacgaccgcgtggagattctgcggggtgcctcggggatgatgaagggcgccggtacgcccactggtgcggtgaacctggtgcgcaagcgtggccaggctacgccgacggcgtcggtcaccctgcagggcggctcctgggacaactatcgtggccaggtcgatgtcggtggcccgctgaacgcggatggcaccctgcgtggccgggctgtggtggctaagcaggaccgccagtatttctacgacatcgccaagcgcggtgacgatatcgcctacgctgcgctggactatgacttcacgcccgatactaccgccggtatcggctttgcctacgaacgtgtcgatgccactccctgctggggcggcctgcctcgctacgccgatggtagcgacctgaaactcagccgttccacgtgcctgggcgcgagttggaacacctgggacagcaagcgcaacaccgtctgggccgatatcagccagcggctcaacgatgattggcgcgccaagctctccgccatctacacgcacaacacccaggatatgaagtacctgcagggcgcggtgttcagcaccgtagccgtgggaagcgacaatggcgctctgaccccgcttgccgggctcttcgactatgaccagaccgactacggcttcgatggcttcatcgatggcaaattccgcgccttcggcctggagcatgagctgaccctcggcgccaataccagccgctcgcgcagcaatgacgtgtgggcactggagcgtctgaccggaaccaccatcgatgccttcgaccccggcaaagtggctgagccgtccgacagcgagattatcgccaactcctatcgtggtggctggccctacccgagcaagaccgatatcaagcagaccggtgcgtatgccaacctgcggctgaagctcgccgagccgctcaccctggtgctgggcagccgggtgagctggtacgactactacaacgacaacaagtcctatggcagcgtcagcacctcgcgcatgaccgagactggccaggtcactcccttcgccgcgctgctctatgacatcgacccgcatctgactgtctacgccagctatgccgatgtgttccagccgcagtcctatgtcgatgccgatggcaagccacttccgcccaaaacgggaaagaactacgaactggggatcaagggcgaatggttcgatggcgcgctcaacggcaccgccaacctgttccaggcttaccaggaacatgcggccggcgcgctggacagttcatgcaactgctcctacgacacgggcaaggtccgtgcccagggggtcgagctggaaatgagtggctcgccgatcgagcgtctgcaggtactggccggctacacctacacccagaccaagaccttgagtgccgtgcgtaacgtcaacgtcgccgcttccgatggcgacacctacaacaccctggtgccccgccacctgctgcgggtgtggggcgattacgagctggccggtgcactgcgcgattttagcgtcggtggtggggtgactgcgcagagtgacatctaccggttgtccaactcggtgaagagtgcgcaggccggctatgcaatctggagtggtcggatccagtaccacctggatgagcactggagcgttgccttgaatggcaacaacctgttcgacaagaagtactaccaaacgattggcgaccgcctgaccatgaactactacggcgacccgcgtaacttcatggtcacgctcaagggcagcttctga

SEQ ID NO: 352480 - DNA, 264 bp, Pseudomonas aeruginosa
atgtcgcccacgctccgccgcgccagccccgaagatgcccccgccatcagtgcggtgatcctgcgcagcctgcgccagagcactgcgcaggactacccggcctcggtgatcgagcgggtggcgcgcagtttcgacgtcgacgccgtgcgcaggctgatcgcccgccgcgaggtgttcgtagccctggaagatggccaggcggtcagcaccgccagcctcgaccgtgcggtggtgcgcagtgtattcgtcgaccccgcgtggtag

SEQ ID NO: 352481 - DNA, 663 bp, Pseudomonas aeruginosa
gtgctgccggacgtggacgttgacgaagtggcgctgaagctgttcatgggcgccttcttcaacagcggccaggtctgcgtggcgtgcaagcgcctgtacatccacgaaagcatctacgagcgcctacgcgacaagctgcaccaactggcgcagaccctgccgatcggcgacggcatgcagccgggcgtgctgttcgggccgatccagaacctgccgcagtaccgccgcgtgctgcagctgcgcgacgaggcccgcggcgccggcctggtgctactcgaaggcgcggccgtaccggagaccggctacttcatgccgctgaccctggtcgacaacccgccggaagactcccgcgtggtcaccgaggaagccttcggcccgatcctgccgctgctgcgcttcagcgacgtcgacgaggtgatcgcccgcgccaacgccagcgactacggcttggccggcgcggtgtggagcaaggacgtggcccgcgcagtggagatcgccaagcgcctggagaccggcaccgtgtggatcaaccagaacctggagtcctcgcccatggtgccgctgggtggccacaagcagtccggcctcggcgtggaaaacggcgtcgccggcctgatggagttcacccagccgaaatccatcttcattcccaagtccgcctga

SEQ ID NO: 352482 - DNA, 792 bp, Pseudomonas aeruginosa
atgaacgacgcatctgcaaaggcgggcgtgcccctgcacgtcgacctgtccgaccagctcgccttggtcaccggcgcaggcagcggtctggggcggcgcttcgctcgagtactggccgcggccggcgcgcgtgtgatcctctgcggccgccgccgcgaccgcttgcaggaagtggccgaggcgattaccgccagcgacggtcaggccatggtcgaagtcctcgacctgcgcgacgccgccacgttgccggtacgcatacgcgagctgacccaggcgtacggcagcatcgacatcctggtcaacaacgccggcatcgggcagagcggcacagccctcgacatggagctggcggcgatggacgagctcttcgccaccaacctgcgcgcgcccttcatcctcgccaccgaagtggcccggcacctgatcgccgccggacgaccggggcgcatcgtcaacctcgcctcggtcggcgccctgcactacagcagcggcatgggcgcggcactctactgttcgctcaaggccgcagtgatccgcatgagcgaagcactggcgctggagtgggcgaagcacggcatcaatgtcaacgccatcgcgccggggctgttcgagaccgagatgaccgaagagcacctggcgcgtttccgcgagcgcatggtcgagcgcctgccacgcaagcgcgccggcttgccggaacaattggacagcaccctgctctacctggtgtcgccggcctccgagttcgtcaccggcatctgcctgcgcgtcgacgatgcccagtacccccgctga

SEQ ID NO: 352483 - DNA, 864 bp, Pseudomonas aeruginosa
atggctccctgcgcgaacttcttcgagtcgcaacggctgcgtctgcactacgccgagtggggcgacagccaagcccggccactgctgctcctgcacggcggccgcgaccactgccgcaactgggattgggtcgcggagcggttatgcgcggactggcacgtcatcgcccccgacctgcgcggtcacggcgacagccaatggtgcccgtcgggcacctacacctatgacgcctacctctgggacttgttggccctggtcgaacacctgggcattgaccgggccagcatcatcggccactcgttgggtggaaacattgctttgcgcttcgcggcagccttccctgagcgcgtgtgtcagctcgtctgtatcgaaggcttgggcacctcgcccgacgaggtcgagcgaacctatgctgcgccctattcccagcgcctgcgcgaaaacgcgctgtaccgccagcgcctgctgagccgcccacgccaaggctatacgacgctggagcaggcgctgaagcactaccacaagcgcaacccaagcctcaccgccacgcaggccaggcacctggtcaaccatggcctgcgccagctagacgacggtcactatacctggaagttcgacgacctcagccgcaagcccagccagacttgtgccagcgagagcgaaattctccagttgatcgagtcggtcgagtgccctgtcctgctgccctggggtggacgcagcttcttttccctggaagagaatcgggaacgcatctccgccttcgccgacgcacgggtacgcctgtatccagaggctgggcactggccacatcacatggtactggacgggttcgttgaagatgtcatggcatttcttcgttga

SEQ ID NO: 352484 - DNA, 1083 bp, Pseudomonas aeruginosa
atgaacaacgatcaagactcccgttgtctatccgcaatcggtgaagcgggcaggtcatcgccactgagcaaactcgagtcgctgggagtccgttaccccgtgatgcaggccggcatgacgtccatctcggggccggctttggccggggcggtttgtgcggcaggaggaatcggcacgctgggtctgcatgatgcctcggtctgggaacgaaccatcgagcagacccgggcgaaggcggccgggcaaccgatctgcgtcaacctgctgctgccctacacgcgcgcgaagcatgtcgaagtggtcatccgtcatcaggtaccgatggtcacgctgttctggggggatggaaaaccgttgatccagcagcttcgccgcgagggtgtcttcgtcttccagcaggtagggtcgaggcaggaagcggaaagggcgctcgacgccggggtcgacgggttgattgtgcagggtgtcgaggctggtggccatgtcagggcaacccagcggctcgatgctgttctgccggaaatcgttgcgctgacgtcgaccatcccccttttcgctgccggaggcatttacacggcagaggatgctgagcgggctattcgtctgggggcacatggcgtctgctcgggaacacgctttgtgctgacgcccgagagcaacgcgcatgaggcatatcggcagaggctgctggcagcgcaggatacccttgtcactgagctgtttggattgggatggccggacgttcatcgtgtggtgcccaacaaggcgaccgatcgctggtgtcgggcggatggttccattcccgcctggctacggtggttcaattcgagcctgtcgttcacacgtaggctgctaccgatgaaggcccatgcggccgttttccaaagaccgggcctgccggtcttttcgcccgttccactcgtcgaccaattgcccgcggctttgctcgaagctacagcgctatatgctggcgaacaggtgggccgtattcgcagcattcttcccgccgccgagatcgtcgaagagctggctcgaggagccacgctgggcggtgtcgcagcaaaagctcatgcggggagttag

SEQ ID NO: 352485 - DNA, 582 bp, Pseudomonas aeruginosa
atggcattcgaacttccccagcttcctttcgaactggacgcgctcgctccccatatttcgaaagagacgctcgaatatcactatggcaagcatcatgcggcctacgtagtgaaattgaacgagttgatccgaggtagcgagttcgaaggccgcaccctggaggaaatcatcaggacttccgaaggggcgaccttcaacaacgctgcgcaaatctggaaccacagtttctattggaactgcctgagccccagcggcggcggtcggccggacggcgcgttggctaatgccatcgacaccggattcggttccttcgaggggttccagcaggcgttcaacgacaaagcggtcagcaacttcggctcttcctggacctggctggtgagaaagcccagcggctcgctcgtcatcgtgaacaccagcaacgcggaaacgccgctgacctctgccgataggcccctgctgacctgcgacctgtgggagcacgcctactacatcgattatcgcaatgcccgtcccaagtacctcaatgcgttttggcatctggtgaactgggatttcgtagcggccaatctggcctgctga

SEQ ID NO: 352486 - DNA, 1284 bp, Pseudomonas aeruginosa
atgaacgcattccagtcagaaaagccatcggtcgaatatcccgaatcaggcctggccaagccactgatcctgaagaccggcaccatcatccgcaatcgcatcgccaaggcggccatgcacgaatccatgggcgacaagcatggagcccccagccactggctgctgccgctctacgaggcctgggcgcagggtggtgtcggcctgagcctcaccggcaatgtcatgatcgacggccgggctcgcagcgagcctggcaacgtggtggtggaggacgagcgacatctggagttcctgcgcgagtgggcacggcgaggaagcagcggcggtacccagctctggatgcagatcaaccaccccgggaagcaggcgatgaacggcctcaatcgggagaacctggcgccctccgccatccccttcaacgcggagctggctccctatttcccgacaccccgcgaaatccggcctgacgagataaaggaggtcatcgatcgtttcgccagcaccgctcgtatcgccaagaaagctggatttggtggcgtccagatccatgccgcccacggctatctgatcaaccagttcctgtcgccgcaccataaccggcgcgaggacgactggggcggtacgccggagaagcgtcggcgtttcctcatggccgtctatcacgctatgcgagatgcggtgggccacgattacccgataggtatcaagctcaactcggccgacttccagaaaggcggttacgacgaaggtgaatccatggaggccgtgctggccatcgcggatgctggtatcgacatgatcgagatttccggcggcacctatgagtcaccggcgatgaccggcacacagccggtgcagaaggaaagtactcgtcagcgcgaggcctatttcctcgcattcgccgagaaggtgagggaacagacgtccgtgccactgatggtgaccggtggctttcgtaccgtcgcgggcatgaatgaggcgttgcagagtggggctctggagctggtcgggctggctcgcctgctcagcctcgaccccgccgtaccgcaacgtctccttgctggcctggaccctagccatgaagtcagccccagggtttccggtgtggaggccatcgaccgctcgcggatgatggaaatcatctggtacacgcaccagctcatgcgcatagcgcgcaaggggcaggcccgcccggacgagtccgtcctgaaagtcgcgctctgctacatgctgggcaattttgtccgcggcgacatcggcttgcccaagttccgcgccggctga

SEQ ID NO: 352487 - DNA, 915 bp, Pseudomonas aeruginosa
atgacatcgatgcgacgtccgcctccgcttcaacttcttccggcatttgaagcctcggccagacttctgagtttcagcaaggccgcccaggaactgcacctgacgacttcggcgatcagccagcagatcaaacagctggaaaatcagttggggctgccactgttccggcgtctgactcggcgcctggaactcacggacgcgggccaccagtttgcccgggtggcctcgcagacgctggcaacatatcgacaggggcacgccgagttcgtccatcgtttcgacaggccgacgctgcggttgagcatgacgcccctcattgcacatgagttcctgcttcctcacgtcgaggttttccaggccctccatccgggagtgagcctttcgctcgaagccagcatggagttggttgatttcgaaaaggagccggtcgatgctgccatccgtgtcggccacggccattggcccggactggaatcctggctgctgtgcggatgcgaggcagtgctgctcgcggtcccctctctgctggcgcggcatccggtgaaccggctggaagacctggagcaccacacgttgatccgccgcaggcatgagcagttcggctgggagtctctggcgagactcgccaaggttcccaccgtcccgagcaaaggggacctgctggtggattccgacctggctgccctgcatgcggcggaacggggtctggggatcgcgctgggcttcctgccggcggggacaccgttttcgaaactctggccggacacccgcctggtggcagtgctgccgccgctgacgacgccactcagcgcctacttcgtattccgtcctgacaacggaaaggctgaactgctcagggatgccttcgactggattcgttcccaggtgacaccggtgtccagtcctgatggttaa

SEQ ID NO: 352488 - DNA, 852 bp, Pseudomonas aeruginosa
atgattgatttcaaaaaactaataaaagacaatttgagcgaaatgataaaagattcatttcgaaatgatcgtcgagatatttggctatggctgacattaaacgaagaatttaatgcaaacctagatcccgccgcatgtaatacgcctagaatgagagaggatatttacgaattcttatctaagcatccatctgatctagagacgataagaagagacatctataccgccattattcctgaagaaaacttcagctggatgaaagaggaaaagagacagcttttgtggctaacaccacgaatcgaagatctaacccagaccgatagccgaaggttcgctagaggctctgtaaacctatttggaagagaaaagctaattgccataatagatttttgggatcatccactacctaggaaagtcgagttagttgagcgccttcactctgaatggcgaagacatgaatctcacgacacagattacagatggttttctgattccaaagaaggcctccaacgctgcatatgtgctggagaatggtttgaaaaagagtccaaacaaagactcataaagccagagccaataagaaattacgaggagcttttgattcacttcgataacgataattacgaaagaccatacagaaaagaaataataaagaaaatccaggcatcttggaacaaaaggaaatttgaagaaagaaacccggacaaacaacaactaaatgtccgaatttcgaaaaaggcaaaagatcttttaaacgaactcagcggaaacgacaaaaagagccaatcaaaaattatagaaaaattaatcctaatggaagcagaacatcgcatttatctacgagacatgtaa

SEQ ID NO: 352489 - DNA, 399 bp, Pseudomonas aeruginosa
atgaccaccagcaaagacaaaaccatcgaagtgctcggccaggagcggcgtcgccgctggagcgtcgaggagaaactggccatgatgcgcgggagcctggagcccgggcaaagcgtctcggtggtggcccggcgcaacggtatcaatcccaaccaactgttccactggcgcaagctctaccaggacggcagcctctcggcagtcagtgccggtgaggcggtggtgcccgcttccgagttggccgatgccctcaagcagatccgcgagctgcaacggatgctaggcaagaagaccatggaggccgagatcctcaaggaagcggtggagatcgcccgctcgcgaaaatggattgcgcactccccctgttgccgggggacgaccagtgaaggcggtcagtga

SEQ ID NO: 352490 - DNA, 840 bp, Pseudomonas aeruginosa
gtgaaggcggtcagtgagagtctcggtgtggcgcgctcgcaattgacggttcgactcaagcaacccactcccgtgctgcagccacgtcgtcgccggacactcaacgatgtcgccctggtcgaacagatcaagcaggccgtcggcgcgctgcccagctatggctaccggcgggtctggggcctgttgcggcggcagcatgagcagcaggcccagccaccggtcaacgtgaagcgggtgtatcgcgtcatgcgagaccacgatctgctgctggagcgccggcgcaaacatccgggagtagcacggcgtcatgaaggtcgtgtcgccgtggatacgagcaacacccgctggtgttcggatggcttcgagttccgctgcgaggacggcgaaaaactacgagtgaccttcgctctggactgctgcgaccgcgaagccatcagttgggtggccagcgcaaacggctacagtggcgacgatgttcgcgacgtaatgctggaagccgtagagcaacgcttcggaagtgagctgctggcgtcgccggtgcaatggctgagcgataacggctcggcctataccgccgaacagacccgggcctttgctcggcagatcggcctgctgccgctgaccaccccggtgtgcagcccgcagagcaacggtatggcggagagctttgtgaagaccatgaagcgcgactacatccgtcatatgcccaagcccgatcgagcgacggccctgcgcaacctggccatcgccttcgagcattacaacgaggaacatccgcacagcgccctgaactaccgctcgcctcgggagttcaggcgcctggctgaagcatcaacttaa

SEQ ID NO: 352491 - DNA, 666 bp, Pseudomonas aeruginosa
atgttcaaggcagtagtcacgcagttgttcggcatagcggcactcttcggattcagggccgaactcccgacgcatccgaggcaacaggtgctgttcaagctcaaaggccttgtcatagaccttgaagtaacggagccgcgcacccttgtcggccccctttgtcgtccaactcacagtccgaccgttcgggaagagaaacgggatcaaccggccataacgaacactggaaagaccacgcaaataatcgagctgattccccttccctaccccgacattgctagtcaggtgaatcatggtgatcaccgcaccatcagccacccaatcacccggcttcgcgcccgacgcaccgtcacgcaagaaaatttcacggcagcgtgtgaagcccggaaggccacgctccgcaagcaaccggttgtaaacagcgatgcactgctcgatgcgggtgtaaccccaaagattgtcccggcgattgatccgggatgggttgccctcaaccgtgaccttgcgcccctggacactgatagaaaccgttgtggagtaactgccttcgtgagttatgcgcggctggcttgtcgccagatgctcaccagtcaaggcatcgacagtcatgcggaatacgtcactcacgaccggaaggtcgtacggaaactcctgagtaacgcttaa

SEQ ID NO: 352492 - DNA, 555 bp, Pseudomonas aeruginosa
atgatcgacccagcagacaagcaaacccaagccctccccctggagcagccgaagcgcgggcgcggtcggccagccacaggcaaagccctgtccgacgcagagcgggcgcggcgctaccgggcgaacaagaaaaagcgtaacgatcagccgtcacagaaaaaacaagacgtcagctacgacgagctgaagtcgatagccctggagctaggggaaagatgctcacgcgcagagatacgtcgagacgaactgcacgatcaggtacaagacctgctcatgcagcgtgacaacttgatccgccaatgccgcgaactgaagaaagaattagcgtcacgcgtcacggaaaacagcaatgccgtgacggatcacgaaaaatgggtggttgaattcaagataaagaactcaaggacctggaagccaacaggatccgagccaatggcaaaaaaggacgccattgtagtcgcccaaaagagcgcagagagaacaaaggcactgtcgagcttcagggccagacccttgaccgaagagcctgttgtcttcggacaaagccgcaaataa

SEQ ID NO: 352493 - DNA, 216 bp, Pseudomonas aeruginosa
atgagcgccaagaaagtggtcgatgttaaggaaattcgcattcgccccgaacgcaggtccgcctacaacgcggtaatggttcgctttctgatggaagaggccgagttccaccgcaatcagggtcgtgaggcgcaaattttcctcaaagttcgcgtccataacgaaattggtgagacccgccaagttgttcagatggttgcatacgacaaggaataa

SEQ ID NO: 352494 - DNA, 945 bp, Pseudomonas aeruginosa
atgcgactgaacaagtttgatctgaacaacttgctatgcctcgatgcgcttctagcggaaaggagcatcactcgcgccgccgacaggctttttctcagtcgcccggcgatgagcaatgcgcttgcgcgcctgcgagagtatttcaacgatgaactgctgatccatgtcggcaaggtcatggtgccaacaccctttgccttgtcgttgcaggcgcccgtccgcgatcttctgctgcgaatgcaggccattatctcggcgtcgccggccgccattgacctggcgaccgtcaagcgaaagatatcggtgacgtgctcggactacgtcacctcacttttcatcccgctggtattggcacgcatctatgaacaggcgcccggcatcgccatcgacatccggccattttccgcccggttcctggaagaaatcgatagcggcgaagtcgacttcttgattacctcggacaagatcattaccgacgagcatccctgcgagccgctgttcaaggacaccttctcctgtgtgctgtgggcaggcaatcccgacgtcggtactgccttggcgctggagcagtacctggcatcggggcacgtggtcgcccagtggggggtggggcgggtcaaggcgttggacgaaaaatttttccaggaccaccacctgacgcggcgggtcgaggtctgggtttccacctttacccaaatccctcaatgcattgtcggaacggggcggatcggaatgctgccaacccgcctggcgaactgggccgcgcaacactggccgcttcgcgtctttgaatgtcccgtgccgattccgcctctggtcgaagtgatgcagtggcatgagtaccagcaagccgatcccgtgcagtcctgggtcagggagcaattccggcaggtcggcgccatgttctctgatcaagccgcaaatgatgcaggcgtcggagactga

SEQ ID NO: 352495 - DNA, 915 bp, Pseudomonas aeruginosa
atgaattgcgctgcttgctattcgcgctcggcctttatatgtgtctattgctcaatactgttttccgcaacggcattggccaccgaaaatggccagcaaagttatccgatcggctcaaacaccgtattgagcggcatcattcccgatcgcgggaaaacccagttctacaactacagtgcctactaccacgcggacaagttcgccggaaaccacggcgagagcgcggttcccggcttcaaggcagacgttctggtcgatgcgttgcgtgtggtccatacctgggacatttcaagcggcccgtttgaactggcatccggcattgttgtgcccttcgtgcatagcaaactgagcgtgccggtcggccgcgactcgcgcggcggcttgggcgatatcgttctgcatgggctgtacgtgggttataaaaagcccgaggccggtctgttttcattcctggcgcttgattttgccctgccgaccggcagcttttctgaaaaccgtatcgccaacaacggcctgaacacctacgggttcatgccgaatgtgaacctcacctggtttcctctcccgcgcaccgaactctcggccaccctcgggtacgagatcaactcccccaatcgagaaaccaactaccactcgggcaatgtcgcgttcctggactgggtggcgggttactccgtcctgccgaacctgcagatcggcttgcagggctatgccctgcggcaaaccacggacgacaaattgaacggtgagattgtgggtgagggcttcaggggccaggtgttcgcgatcggtccccaggtccgatacaacttctcgcgcgaggccggcatcattctgaagtggcagagcgaattcaatgtgcgcaatcgccccgagggcgacaagctctgggtccagttctctttcccgctttga

SEQ ID NO: 352496 - DNA, 1026 bp, Pseudomonas aeruginosa
atgagccgttcccgcaacccattgcacggatggaggcttgtgccttccgatatccatcatgtcggccacgacctgcgtcgcccggaatgcattctcgccgagccggacggcacgctgtggagcgccgatgcccggggtggcgtcatgcgcattgccgccgatggcagccagaagctgctcatccagcagccaagcgagcatttcgacctggacggcaacgccagggcgagcttgctcgaaggcaccttgcccaacggtctcgcgttcgaccgcaacggcgatttcctgatcgccaatttcggcaccgacgcgctggaaatcatgacgcgcgatggccggtcgcgcgtgttgcacgactcgatcgacggcaagcccatcggcaaggtgaacttcgtcctgcgcgattcccgcgacagagtctggctcaccgtgtcgacgcgcaagaatccctggatcgacgccatccgcaacgatctggcggacggctacatcgtgctgctggacgacaaggggctgcgcgtcgtggccgacggttttgcgttcaccaacgaaatccgtttcgacgcgaacgaagactatctgtatgtcgcgcaaaccacaggcaactgcatcaaccgcctgaaggtcgccgcggacggtagcctgtccggccgggagatctacggtccccgcgacctgggccacggcctgatcgacggcatcgcgttcgacgccttcggcaatctgtggggagcgatggtcttcgcggaccgcttgattgccatcaccccggaaggcgatctgctgaccctgttcgatgacggagcgggcccggccctcgaaaaattccagcaggagttccagtccggcggtccggtctcgttcgaaacgctgtccgcatgcggcggtacggtcgcgccatggatcgccagcattaccttcggcggcgcggatctgcggacggtctacgtgggcagcctgaaaggcacgacgctgccgagcttcaggtctcctgtcgccggcctgccaatggtgcattggcgctga

SEQ ID NO: 352497 - DNA, 1176 bp, Pseudomonas aeruginosa
atgatcgagtatttcccaaccaattacgtctggaatctgtcggtcaacatcgccctggcgacgggggccaaccacggcgaagtcgatgaagtctgccgccagttggtcgaggcctcgcagcgtaccgacgacagcggatcggaggcgtttttccgggcatggcgcaatctgggcgaccgcctggtcgcgttggcagagcaggatctggccgtcggccgcacgctgagcgcaggtaccaagctgggccgggccgccatctattacatgacgggtgagcggatgacacacccgacctacacgccgcgcaaggaggtctacgaaaaaggcctgcgcagcttcgccaggcacctggaactggcgcggtcgaactgccggcgcgtcgaggttccctatcgcggtacgacgctcgccggcctgttcgtcgccgggcacggcgaccaggcaggtctgcggccgtgcatggtgctcgccaacgggcttgacagcttcaaggagatgatccacggcagcggcatacagcatgcgctggccgagcgcggcatttcgagcatcgtcgtcgaccagccgggcaccggcgaggcactgcgcctgaagggcctgacggcgctgatcgagtccgaggtctgggccggcgcggtgatcgactatctcgaactgcgcgacgacatcgacagcgacaagatcggcatgtgcgcctggtccctcgggggctactacgcgccgcgcgctgccgccatggaaaagcgcttcaaactctgtgtcgcgtggggagccaatttcaactggggcgaactgcagcgccgacgcctggcccgggaaggccagcaacccgtcccgcactactgggaccatgtgcagtgggtctggggccagaacagcctggacgcgttcatgagctttgcccaggacatcaccctggcgcccgtgatcgaccggatcagcgtgccgttcctggtcgtccacggcgaggcggaccggcagatacctcgcgaatacgcgatccagcaatacgcaggcgccgtgaacagtcccaagcgcgagctgaaattcttcacgcacaacgaaggcggcgtggagcattgcagcgccgacaacatgagcaacgtacgcgactacatcgccgactgggtcgcagaaaccttcatcgacctgggttgcaagggagtccggacatga

SEQ ID NO: 352498 - DNA, 942 bp, Pseudomonas aeruginosa
atggataaagtcatcattacctgtgcgatcacgggctcggcccatacgccgagcatgtcgcgccacctgcccatcaccccggacgagatcgccgagcaggcggtggaggctgtcaacgccggcgcggccattcttcatttgcacgcccggaacccgaaagacggtcggccgacctcggacccgcaggtcttttcacggttcgtgccgcgcatcgctgcggcgacggacgccgtcatcaatatcacgacgggcggcagcgtgcacatgtcgctggccgagcgcctggcctatgccctgcagatcaagccggaactgtgttcgctgaacatgggctcgatgaacttctcgctgcatccggtcgcgcgcaagatccaggactggaggttcgactgggaaaagccctacctggaggcattcgaggacacgatcttccggaacaccttcaaggacatcaaacagatcctgacgaccctgggcgaaggctgtggcacccgcttcgagttcgaatgctacgacgtcggccatctctacaacctggcgtttttcatcgacgaaggcctgatcaagccgccgctgttcattcagtcggtctacggcgtgctcggcggcatggggccggatccggagaacgtcgccctgatgcggaacaccgccgaccgcttgttcggccgggagaactaccgcttctcggtgctgggagcgggccgccaccagatgcccctggcgaccgtctcggcggtgatgggcggcaacgtccgcgtcgggctcgaggacagcgtgtacctgggcaagggcgagctggccgtgagcaatgccgaccaggtccgtaagattcgccggatcctcgacgagctgtcgctcgaagtggccacgcctgacgaagtgcgcacgatgctcggcctgaaaggccgtgcctcggtcgagctggggggcatgcaatga

SEQ ID NO: 352499 - DNA, 1134 bp, Pseudomonas aeruginosa
gtgagcatcacgaaagtactgatcgtaggcggtggcatcggtggcttgaccacggcgattgccttgcaccgcaagggcatcgccgctgatgtgatcgagcgtgacccgaactggtccgtgtacggggtcggcattatccagccctcgaatgtgctacgtgcgctgcgagacatcgggctgggtgacgcctgtgtccagaacggccgcgggttccagggatggcgcttctgcgatgcgcaaggtcatccgcttgccgaaggctgtggccacaacgtcctgggcgatgactacccgccgatcaacggaatccgtcgacccgccctgcacaagatcctgacggaggcgacccttgcccagggcacctcggtccggctcggtgtcacgctggcgtcctggacagaggacaacgaaggcgtcgaggtcgagttcagtgacgggtcggcagggcgctacgacctgatcattggcgccgacggcgcctattcccagctgcgcaaccggctgttcggcgacagcgtcatgccgcgcttcaccgggcaaggtgtctggcgtcacaacttcgagcgcccgcgggatctcgactggggcatggttttcttcggcgcgaagagcaaggccggcctggtgccgctgtccgactcattgatgtatctcttcatcgccacgcccgagccggggaaccccaggcacccagccgaccaattgcatctgttgctcaaggaacgtctggccgagtacggcggcatcctccggcagctgcgcgagcagatcgacgatcccgccaacgtcgtctatcgccccatggaagtcctcatgcttccacaaccctggcacaaggggcgggtcgtcctgatcggcgattcggcgcattcgagcacgccgcacctggccgaaggcgcgggcatggccatcgaagactccgtgctgctcgccgacatgctcgccgccgggcaggacgacctggacgcggtcctgagcgcgttcgcccagcgtcgcctgcctcgggccaagttggtctacgacaccagcctgaccattggcgagtgggaaatggcccagtggaatggccagccccatggcgatattggcgccctcatgaacaccacgtacaccacgctcatgcagaacatctga

SEQ ID NO: 352500 - DNA, 984 bp, Pseudomonas aeruginosa
atgtcaattattggaattgagagtctgatatacggcgttcaagacatcgaactttgcactcggtacttccgtgatttcggactggtgctggaaaagagtgatgcgcaagagtccgtgtttcgccttgcagaaggctcgaaggtcgtcttgcggtcgatcaatgacccgcgtattccgaagtcgaaacagcagggcattggggtcagagaggtggtctggggtgtcgacctgcaagcatcgctggatgcccttgtgcaggatctgcagcgagaccgcgaggtcttgatcgatgaagaggggaccgcgcgttttctcaccgatggcggcctggcgttcgccttgcgggtttttgccaaacggccggtagtcaacgcgccggtcgtggccaatgccccgggtgcggtccagcgactcaacacgcccaggatctggcgtacgcgagcatgccccaagaccatcaatcatgtcgtttttgccgtgcctgacttcctggaagagacccggttcttccgcgagcggctcggattcaagctatccgactatcaacgtggagtcggcgtttacctgcgggcgagcggctcgaacaatcaccactcgctgctggccatcaatgcctcggcaccgttccccggcatggatggggaactgcgcttccaccacgccaactatggggtggccgacattgacgaactcatgatcggggtcaatcacatggagcgctgcggttggcccaagtcgcatgttggcgtcggccggcaccgcgtcgattccgcgctgttctgctatctgccgagcccgacgggcggcgaaaccgaatatggcacggactccgattacgtggacgacacctgggtgccgcgcgaatggcccgtcccgctgtttgcctactcccattggacgcagaacattccgccgttcctcgagaacctgcctgaatgggaagtgcgttatctcaccgacggacaactcccctccgaacaataa

SEQ ID NO: 352501 - DNA, 264 bp, Pseudomonas aeruginosa
atgcgctacacggatggattcaggaatgttccctggaccttgggctttcttgtctgcatcgcagccagcatgttctgcctggaggcggccaccaaaaccgtcccgatcggtacggcctacgccgtgtggaccggcatcggtgcgctcggcaccgtggtcgtcgggatgatctggtaccacgaacccgcaaacctgctgcggatgcttctactggtcacgctgatcggcgcagtcgcgggtctgaaactcacggccgggcactga

SEQ ID NO: 352502 - DNA, 609 bp, Pseudomonas aeruginosa
atgggaagaaaaaagacaattgaccgcgatagggtgctggatgtcgcggaacttctggtcagccagaaaggcgcggcgagcctgacgttcgactccatcgcccaggccgctggaatttccaagggtggagtgcagtcgtgcttcgccagcaaggaaatattgatcgaatcgctgttgatgcggtggatcgcgcagtacgaatcacgcatctccgagcttcgggccgatcaagcgacgccgatgagcgccgtcgaagcgcatatcgccaacacgttcggcgaagatgagttggctggcgcccggaccgctgcactgctggcagcgctgctccaatccccgcaccatctcggcggcatcatcggctggtacgaaaaacgcattcaggaaatagaacgcatcccggtcgaagcacgcgggcgcgcgttgctgggcttcctcgccacggaagggttcttttttctcaagaattttggcctggtcaacacaggctccctggacgctggcgacatcgccagagacatctttgaactgcttgccggcccgaagcgagattcggaaaacggcaagcatcgagccgcagcaagcgtgcgcagaaaagcggaaggttga

SEQ ID NO: 352503 - DNA, 1272 bp, Pseudomonas aeruginosa
atgcatcgtctgatcatcgtgggaggcggattcgccggattgtgggccacccgcagcctcaagtccgcagacatacagattacgctgatagacaggcgcaaccaccatcttttccagccgctgctttatcaggtcgccagcgcggagctggcctctcccgacattgccgtcccgctgcgccacatcctcaagaaacagcgcaacgtccaaatatggcttggagaagtcatcgaggtgctccctgacaggaacgtcgtcgttctggatgatggccgggagcttgaatacgattcgctgctcatcgccaccggcgcaacacacgcctatttcggcaatccgcaatgggagaagcatgcccccggcatcaagacactcgaagatgccatgcatctcaggaacaagatattcgaggcgttcgagtacgcggaaaccgaacctgatcctgagaagaaagcggcgtggctgaatttcgccatcgtcggtggcgggcctacaggtgtcgagctggcaggtgccttgtcggacattgcaaagcacacgctgcggggagaattccggtccatcgacccaggcatggcgacggttcggttgatcgaggccggcccgaaaatccttggtgcatttcccgacgaactttccttcgcagcggaactacaactgcgccggttgggagtggaagtcgtcaagaactgccgtgtgaccgaaatcaaccagcatggctacagcctcaacggcgcgttcgtcccttgcaggaccgtcatctgggcggctggcgtacaagcatcaccactgggtcgccggctgaacgtgccgcttgaccgggccggccgggtcaaggtcgagaagaatctgagcgtaccgggccacggaaatatcttcgtggccggcgacctggccagcatcgaagtcaacgggcggcccgtgccgggcgtggcgcccgcggccaaacagatgggcgcctacgtcgcggagttgctgaaggcgcggctcgcgggacggcaggaacccgtctttgactatcacgacaaaggcagcctcgccatcatcggccgcatggcagccgtcgtcgacgtcggcaagttcagattgtctggatacatcgcctggcttttctggctgacgatccacatattcttcctgatcgggttcggaaaccggttcgtcgtgatgctcaactgggggatcaattattggacccatcgaagattctctcgcatcattcatgagaatctgaagacggtcaagaattcgccggcgttcgacgaacggtga

SEQ ID NO: 352504 - DNA, 192 bp, Pseudomonas aeruginosa
atgacaatactccagttcctggcaattccttggctgttctcggtcatcttcctgtatctcaccgtcgtggaaatcaagaacgacaatccaagggatgccaagctgcttggcgtgatatgcgctctcgcattcctgtgcgcgatcttcctgactggcatggtcataacgggcgacgtcggcttgcacgagtag

SEQ ID NO: 352505 - DNA, 144 bp, Pseudomonas aeruginosa
atgtccgatgtagacgaagtcggctccggcgacaagccgatgctgtgcatcccgggcgccccctatcccgccggagagtccaagccgaatattgccgcgtggaatctcagtgaacagctcaccgagaaggcgaccggcccgtag

SEQ ID NO: 352506 - DNA, 258 bp, Pseudomonas aeruginosa
atggcgcagaatccgggaacgcggctgacgggcattgccgtggcggtcatgttcatgggcatcagcggagtcctgctgtggctggcgcagaagaatatccccatcggcactgcctatgccgtctggaccagcatcggggcggtcggcacctttgccgtaggcattctgttctacggcgatgcaacctcgcttgcacgctacctcggcgtcgcgctgatcatcgccggcgtggtgacgctcaagctcgcttcccactaa

SEQ ID NO: 352507 - DNA, 1179 bp, Pseudomonas aeruginosa
atgccgaagcatctgcaaacacgctggcgctccctgtctgcgctggtcgccgtcgtgctgctggtcagcggctgcggggataaacagggggatgcgaacgcccaggcccccgtgccggtggaagccgtcgcggcccaaccacagcccttcacgctcacggccgagctgcccggacggatcgagccggtgcgggtggcggaagtccgcgcgcgggtggccggcatcgtgctgcgtcgcaccttcgaggaaggcgcgaacgtcaaggctggagacgtgctgttccagatcgacccggcaccgttcaaggcggccttgtcgcgggcgcgcggggacttggccaaagccgaagcggcgctggtcgaagcgcgctcggtcgtgcgccgctatgaaccgctggtgcagatcgaagcggtcagccgccaggatttcgatgccgcacaggccacgctgcgcggcgccgaagcctcacgccagtcggccgcagcggaggtggagacggctcagttgaatctggactacgccacggtgcgcgcccccatctccgggcgcatcggcagggcattggtcacggaaggcgcgctggtaggacagaacgaagcgaccccgctggcgaccatccagcaactggacccgatctatgccgatttcaaacagccggtcaacgatctggtgcgcctgcgcaagtcgctggccgatggaaagctcaaacaggccgaggcgagcagcctgccgatctccatcacggtggaaggcagcggggaccagcgcaccggccagctcctgttctccgacgtgacggtggatcgcgacaccgggcaggtttcgcttcgcggcaggttcgccaacaccgacggcctgctgctgcccggcatgtacgtcagggtccatatcgaccagggcgtcgatccccaggccattctcgtgccgcagcgcgcggtcaaacgcaacacggacggcaaggcatacgttctcgtggccgatgcccaggacaccgtgcaaacccgcacggtccaaaccggcgcgatgcgcggctcgcaatggcagatcgtgggcggccttcagcccggcgaacgggtgatcgtcagcgcgcccggcgcgctccaggccggcgcgaaagtgaccgtgaaaaccgaccaggccgccgcgccatccgcagaggccgccggtgcgcgcaactga

SEQ ID NO: 352508 - DNA, 3153 bp, Pseudomonas aeruginosa
atgtcaagattttttattaaccgacccaactttgcctgggtgattgcgatcttcatcaccctggccgggctgttggccatcccgtcgctgccggtggcccagtaccccaacgtcgctccgccccagatttcgatctgggccacctatcccggcgcctcggcctcgacggtggtggattccgtcaccagcgtgatcgaggaagaactcaacggcgccaaggggctgctgtactacgactcgtcgaacagctccaccggtatcgccgaactcaccgtcaccttcgcccccggcgtcgatccgaacatggcgcaggtcgatgtgcagaaccggctgaagaaagcggaagcgcgtctgccccggtcggtgctgacgcagggcatccaggtcgaacaggcgacctccaactttctgatgatctacgccctgaagtacaagggcgacgatgccggcaaggatgcggtgcgcctgtccgattacgccgcgcgcaacatcaacaacgagatccgtcgcgtccccggcgtgggcaaggtgatgtatttcggtaccgaagcggcgatgcgggtgtgggtcgatccacagaaactgctgggctacggcctgtccgtggccgatgtgaatgccgccatcaccgctcagaacgtgcaggttccggccggcagcttcggcgcgcgtcccggcaacgccgaccaggaactgagcgcgaccatcgcggtcaagggcatgctctccagcccggaggaattcggccgcatcgttctgcgcgccgacggcgaaggcgcgaccgtcaagctctcggacgtggcgcgcatcgaggtcggattgcaggaatacaacttcgacgccctcaacagcggcaagcaggcggtggccgcggccgtccagctcagcccaggggccaacgccttgcagacggccgaagccgtcaaggcccgcctggcggaactctcggcgggattccccgacgacatcgaatacacggttccctacgacacctcgcgtttcgtggacgtcgccatcaacaaggtcgtctacacgctgatcgaggccgtggtgctggtgttcctggtgatgttcctgttcttgcagaacttccgctacacgctggtgccgaccatcgtggtgccggtgtgtctggcgggcacgctggcggtgatgcacgtcctgggcttctcggtcaacatgatgaccatgttcggcatggtgctggccatcggcatcctggtggacgacgccatcgtggtggtcgaaaacgtcgagcggctcatggccgaggaaggtctgtctccacgcgaggccaccatcaaggccatgggccaggtatcgggggccatcgtgggcatcacgctggtcctggccgccgtgttcttccccctcgccttcatgagcggctccgtcggcgtcatctacaagcagttctcgctgtcgctggcggtgtcgatccttttctccggcttcctggcactgaccttcacgccggccttgtgcgcgacgctgctcaagccgatccccaagggacaccatgccgagaaaaaaggcttcttcggctggttcaaccgttccttcgagcgcctgacccagcgcttcacgctgctgaactcgcaactggtgcgccgcagcggccgcaccatggttctctacgggctgctggtggccgtgctcgcgttcacctacacccgtctgcccgaagcgttcgtgccggtcgaggatcagggctactacatcgtggacgtgcagctcccgccaggcgcgagtcatgcacgcacgtccgcgacggtcaaagagatcgacaagtacctgctcgatcgcaagccgacgaacaacagcctcatgatcatgggctacagcttctcaggagccgggcagaacgccgcgctgggctttccgacgctcaatgactggtccgagcgcggcaaaggcgaatcggcttccgatgaagtcaatgccttcaatgcccatttcgggagctatggcgatggcacggtgatggccgtgaacccgcccccggtggagggcctgggcaacgccagcggcttcgtgctgcgcctgcaagatcgcggcggcctgggccgtgacgccctggtcgcggcgcgcaaccaactgctggagcaggccaacagttccccggttctcgcctacgccgtcatggaggggctggaagatgggccgcagttgcggctgaacatcgaccgcgagaaggcgctggcgctgggggtcggcttcgattcgatcaacactgccatctccagcgcgtatggatcggccacggtcaacgatttcgccaacaccggacgcatgcagcgcgtggtggtacaggccgatggtgccaagcgcatgacgcccgaaagcgttctccagctctacgtgcccaacgccaagggcggccaggtgcccctgagcgccttcgccagcgccgcctgggaaatcgcgcccgtgcaagtctcgcgctacaacggataccccgccttcaagatttccggcgatgccgccccgggccacagcaccggccaggccatggtcgaactcgaacgcatcatgaaggaattgccaagcggcatcggctacgaatggagtggcctgtcctatcaggaaaaggccgccggcgcgcaggcaccaatgctgttcacgctcgcgatcctggtggtgttcctgctgctcgtggcgctctatgagagctgggccattcccgcttcggtgatgctgatcgtgccgatcggcgccctgggatcggtgctggcggtgacggccctgggtatgtccaatgacgtgtacttcaaggtcgggctggtgacgatcatcggcctggccgcgaagaacgccatcctgatcgtggagttcgccaagagcctgcacgaacagggtcgatcgctggccgaagcggccatcgaagcggcgcgtctgcgattccggcccatcttgatgacctcgctggccttcacgctcggcgtcgtgccgctggccttggcgaccggggccggtgcagccagccagcatgcgatcggcatcgcggtgatcggcggcatggtgatggcaacgctcggtgtggttttcgtccccgtgtttttcgtccgggtcctgtcgttgttccgccgccgcaaggaggccagcgaaggaacagcacctcgccagcaatcgctcgaaggaggcgaggcatga

SEQ ID NO: 352509 - DNA, 1464 bp, Pseudomonas aeruginosa
atgaagcagcgtaaatctctggtggcccgatccacgacggccgccctgttgaccctagcactggcgggctgcacgctcgcgccgacctacgagcgcccgcccgcaccgatcccgaaccactggcaaggcgcggggacggccccggtgaatacgcaggccgcagcggcggaactggactggaatgcgttcgtcaccgacgaccatctgcgccggctgatcgaactggcgctcgacaacaaccgggacctgcgccagagcctgctcaatgtcgaggccgctcgcgcgcaataccgggtccagcgcgccgaccgcctgcccagcgtgggcgtccaaggcagcggtacgcgccagcgggtgccggccgacctgacctactcgggccagtcggaagtgcaggccagttggcaggcaggcgtgggaatgacggctttcgagcttgatctgttcggccgggtgcgcagcctgtcgcaagccgcgctggaggaatatctggcgaccgaggaaaacgcacgcgctgcccggatcagcctgatcgcagaggtgatccaggcttacgtcagccgcgacggcgcccagcgccgtcacgttctgacggcgcagacgctgcactcccgggaagcggcgctccagctgattgcgcagcgccggcaggccggcaccgccacggccctagactaccaggaggccgtgggactggtgcaacaggccaaggcgcagctcgaacgcacggaccgtgaagtgcgtcaggcgtccaatgcgctggggcttctggtcggcgtcgccgacacaggcagccatctgccccaggagccagccacgcgtacgcttctggtccagggcatagccgctggcgcaccgtcggatctgctcacgaaccggccggaaattcaggccgccgaacatctgctgcgctctcgcaatgccagcatcggcgcggctcgggcggccttcttccccagcgtttccctgacaggcctctttggcagttccagcgccgaactgtcggggttgttcgagggcggccagcggtcctggtccttcactccacagattaccctgcccatcttcaataccgggcgaaatcaggccaacctcgaactggcgacggtcaggaaggactccgcgatagcaggctacgaaaaggccatccaaacggctttcaaggaaacctcggatgccctggtggcggccgacacgctgcggcgcgaagaacaggcactgagagaactcgcgcagagcagccagcaggcgctggtgctgtcccaggccaggtaccgggccggcgtggacgatcacctgcgctacctcgatgcccagcgcaatgactttgccaatcagatttcactgatcgaggtcagcacacagcggcagtcttctctgacggaccttttcaaatccctgggtggtcggtggaaggcagctcccgagaaccaggcagctctgtcgaacggtagcggcatctga

SEQ ID NO: 352510 - DNA, 336 bp, Pseudomonas aeruginosa
atggaacttcgacatctgcgttgcttcctggcggtggccgaagaactccactttgcccgtgccgccgagaagctgcatattgaacagtcgccgctatcgcgcgccatcaaggaactggaagaagagttaggagagcagctttttgtccgcaccagtcgcagcactcgactgactcgggccggcaagctgttcttggatcacgtgccccgtgttttccttgccatacagcaggcccgcgacagtgtgaaggctgccgccaacggcttccatagccaactgcgtatcgccctttccgacggcattacaccgtcgcggctgcccgccgcgtcaggatag

SEQ ID NO: 352511 - DNA, 1005 bp, Pseudomonas aeruginosa
atggatgatgaaaattttaaagaattggagaggacgatatctgatttgctttttccgtatgaaggtggggggaaggtaggtgcctcatttgatgggtcgcctattactatatatgctaatcagattccctattatataaatgatacttggctgactaactggagtgtggctgctcgtacagggatcgctcaatcgctaattgattctataaatacgaccattggacggcccatggtcgtctctgatcactacttcagagggcatgaaattagcataagaacggttcctgagactggtggtagtaatctgataaccatgtctgatttgtcggaaaaactcaactctcaaataaatacatttatacaagataggattgatgaagacaaagaagcaaaggttgctctaatccagcagtcaatggagacattggctgctgagcaaattaactccgacttcacggcgaggcatgagcttccggctggttctcgtccgaacaccgtaacgattccccaggcaggtgactctgcaatcacggtcggatatggatttgacttagggcagcacgatgagcaggaactgatttccatgggaatacctgtttctaccagagacaaggttcggcctggtctgggcttgagtagaactgatcctaatatatattctgcacttgctttaatcatccctccatttaccgatgatgatgggatggtgttgttttctacgaaactaaatagggtggctggcgctgttcgtagtaaattctctgacgtttggagtgggctgcctccagccgtccggacggtagcggtggatgtttactatcaatatggtcaaggaaaagtcttccctaattttgaggcggaaataaggcagcatgattgggctgctgtagtctacgagttgagaaactgggatggtcatccaaatgtgcccggcgactacagaacaaatcgcctgaatgacagggcggactatcttcaacaagctttaggtcttccaaactag

SEQ ID NO: 352512 - DNA, 699 bp, Pseudomonas aeruginosa
atgaaattctcaaagtatttagtggttatgcttatttcttgttctgcattagctattgccggctcagagataaagagcggaatgtatttgcgggtcggtgatggaggggtttttaatgtctttcttgataagaatggaaacaagatatttagagttagtacgctaggaagtaatgggcattcttgctctctaggagggaaggttgatggttctaggattattgtggaggggccgtcatatgcagatcgatgtgatgttgatgtaaaaaataatgctggtgaaattgagttgtctagaggccaggaaagtctcgggtgtagagactattgtgggactagggctggcttctatggaagttataaacttgcatacagtttgtgtgcctttagttcttctagaaagaggctgtccataatcgagagtgcgttaagttcgggaggaaaagataaggggtatttactctcgaaggagctttatgagaagtgctcgcagtttatagagcctcttccgcgtatggggttgataaataaaatatcagccttgaatttagaacggggagacaagaaggcgtgtcgcaaaatgcagggtgatgtggggttctttgattctataaggcctgaatacctcccgcaggatgaaagagcaatgtatgaaattttacgtaatgaacatgctaagttgctgagtgagtgttcgtag

SEQ ID NO: 352513 - DNA, 333 bp, Pseudomonas aeruginosa
atggacccgatgacgaccgttggcggaggtatcttcgccaagtacagcgtcgctattgccgggttctgggggtcgattctgtcccttggattcctgagcggcctgaaccgctggcaagccgcgctcgctgtagcaaccggattcgggtgctcaacctattggactgctccggttgccgcatggctttcgcgtgagtacgagattccgctcgatgacgcatttctgagtggtgtcgcattcaccattggtttgctggcgatgaatatcatccccggcctgaaggcggcagtaacggcaatcacagagcggttccttcctacgagaggaacctga

SEQ ID NO: 352514 - DNA, 483 bp, Pseudomonas aeruginosa
atgcaggggcagaccggcatcgccaagaaggtctacgagtgcgtaccgatctctgagccctggcgttcgttccaggtgctcaccgcacttcgcaacatgaccggaagcacgccggacgttcggattgtccagggctgcctgcgcgatctagtcgattccggactgatccgccgcactggtactgaccactaccaacgaattcaagtcgagaaaaagaccaagcctcaggagccgaagatgggcgagcccgcgaagaagatcgaaacccagcccgagccgaagcgctctgcctccccgctggagatgctgggcgaactggcaaccgaaatcgtcgacctggccgaacacctgaagcgcctggcagcccgagtcgaggacgctgccctggctgttgagcaggagcgcgaatcgaacgccaagtcgatggaaagctatcgccaactcaaggcactgctgaagagcctgcaaggggagggcgagtga

SEQ ID NO: 352515 - DNA, 306 bp, Pseudomonas aeruginosa
atgtcggtgctgggaagccgaatcaagcaggcccggatgcgagtggggctctcgcaggagcgtctcgggctagaggctggattggacgcgatgtctgctagcgcgcgcatgaaccgctacgaactggggaagcgcattcccactcccgactttgtcgagcgtttggggttggttctcggggttccggcggcctacttctattcgactgaggaagacgaggctgagcttctgaccaagtttcatcagttagaggcttcgaagcgtatgcaactgctgcgatacctcgacgaattgcttgctagttag

SEQ ID NO: 352516 - DNA, 855 bp, Pseudomonas aeruginosa
atgaagcactacctttccggcccacgcgcgtgggccggttttcttcgagtcctagtggcactgttgatcggcgccctcctcgccggctgccaatcaccacgcgaagcgctgcagcagttggcatatgggcatgggaggaaactggaaatcctgccggggcagccgttcccgttggccatgctgccaccgcaaggcacagagaaagccaatcgcctgcgcgtctacctggaaggtgatggccacgcctgggccacggcaacacaacccagcctggatccgagtccgcacaacctgctggtggcgcggctggccgtggacgatccgacgccaaatgcttatctggcgcggccttgccagttcgtcatgacgccagcctgcgaccccactttctggaccgatcggcgcttttcgcaggaggtggtcaccagtctcagccaagcgctggaccatttgaaacagcgctatggcaatcgggagtttgagctggtgggatattcgggaggcgcggcactggcactgctgctggcggcacagcgggaggacgtcacccaggtccagaccctagcgggcaatctcagcccacggctttgggcggaaatgaaaggactatcgcctctcggcggctcattggatccattggactatcgggatcgcctggcatcgataccacagcgacatctggtgggagacgtagatgacgttgtccctgcctctctggccaaggcctacctggaacagctagggccatacgcctgcagtcaggttgtaatctctccggctacggatcaccagcaaggctgggagaccgcttggagaaaatggcggggtcaaccgctaaattgcaagaacaattga

SEQ ID NO: 352517 - DNA, 1944 bp, Pseudomonas aeruginosa; identical to SEQ ID NO: 349416

SEQ ID NO: 352518 - DNA, 2229 bp, Pseudomonas aeruginosa
atggggtctgtagaaaaagcgtttaagcttgaattctcgaatagagttattgagcatttggggattaagctttatcagaataagcctagcaatgttgttgctgagtttttgtctaactcatgggacgcagatgcgacaaaggttcatattgagctcaagggaggcgatggttccccagttgttgttataactgacaacggcagaggaatgactcgtgacgagctgacggatgaatttttggtcattggtcgaaatcgacgcgacaaacctacagatcgaactcctggtggtcgcttgccaatggggcggaagggtattggaaaacttgcaggatttggtattgccggaaaggttgatgtaatttcgtgtcctaataggaggctccgtaatagcgaaggggagcctgaaaagtactattggttgcgtttttctctccaagaacttttagctaaagccaatacagctacagcctcgaattatgagccggatgttttggcggacggcgttagtaaagaagagtttttagatatcatcgacaaggaggcttatcagggttaccttgaacgatatcaggaaatactgtcgagtgtagatggtgagggtggtgttgtaattgtattaaagaatgtctctttaaagaaaaccgtcaatccagatgttttgcttagagcaatggggcggcgatttactgtcgctatgctgcggcctgactttaaagtctgcattaatcagaaagaaattacacccgacgatgctcttcctccgctacatgactttggttttggcgattggaataatccactcactgacgaggtggatgtaaatggcattaagaagccggtaaagtattggattagatttgttaatttgccaggctctgattggtcgattgagaatgcgggtataggtatatatgcccatgggaagatcgctcaggatcgtccttttttcttcgatgtaaagggtaaggaaattctcagcagatacctgtatggagtggttgaggctgactggcttgatgagcttcctacggatgttgtttcaacagatagacgttctgttgactgggagacagatagcactgaaggattccataaatggggcgctgctaaacttggatactggcttgaagagtttaggaagtggcgaaaaaagcagccaaaaaaagatactattgaaaaaattcgtaagctcaatgccgggctcagtggtactgaagaagaggcgcttgcagagcttctaagtgaggtcttggataatctttctggtgacgaagaggctaaggagaaagctaccctaagcttcacggaagcatgggtgcacgcaccaactagaaagattactcaggggctgtgggagcagattttctcctcaatgaactcagacacaaaagtctttgcagacctagtggatggacttcgaaagagtatggttccagaagcaatgggacttgctgtgacaatgtcacagcgaatagccgctattaccgtgcttcgaaaaatgattgaggatgataagacggaaacacaccttcagcgcttaatcgagacctttccctggttgctggggccgcaatgggaacggctaaccgccaaccagaatattcgaacgttaatcgagaagaagcataagccagatcccgagcagggtgagtggtcgcttggcgagcgaactagcaatctaagaccggatttcgtttttttaagcgatgctggcgaagaaaaggagcttattgtttttgagctaaaaggtccagaggctgggaaaactttgcagccggcagaatacgatcagctgaactcttatcttcgaattatccaaaatgtttatacgtcgccatctattaagattagtggtgtactagtagggcacgaaaagggagggattagagaatacgatagccggatttccgtgcggacttggggagaggtattggttgaggcaagaagcctgcatgtgtcttatttgaagtcgttgctcttggtgtccgatcctaaagcaaatgatatcaggctacagcagattagcgacttcggcggaaaagagacgctggagcttctttcgagatttggtaatcttgaagagtttccagaaattatcactaaaaccttgggcgagtactctagggctgagaagctcgttgaaggatttaaaagtgtttcgcttactgagcctataccggatggtccagtaggcttgctgccgcctccagatgaacatgaggcatag

SEQ ID NO: 352519 - DNA, 1065 bp, Pseudomonas aeruginosa
atgaccagggaccaacttgttgcgattgatcttttcgcaggtggcggtgggctaagtttggggctcaagcaagcaggttttttggtatctgctgctgttgaactggacgaagtagcttctgcaacctaccaaaggaatcatcccgaggcagtgcttttttcaaaggatattaaagatgtaacaggggctgagttggtgagtacttcaccaactggtcgcgtggatttagttgctgcgtgtcccccttgtcagagttttagctctcttacttctaaatataaaagagaagatgggcgtgataagttaattaatgagtttgcacgcattgtggctgagattctccccagaacgattatgatggagaatgttcctgggttggcgggaagaggtggtcatctctttgagccagtaatcaagaagtttaagtctcttggttatcaggtagattatagattagttgaggttgcggattacggggttcctcagtgtaggaagcgccttgttgtgttgggctgtttggatagtgatattagtattccagcacctacgcatgcagaaaatcctgagaatggaaaagcaccatgggttactgttcgcgatgctcttaaaggtttgtctaaacctttgaagctgtcgaacagtaagcgaaaaggtgggccgagagccgtatcttggcacgtggttcgagacatatctgagataaatcaaatgcgtttggccagcctgtcggagggaggttctagaacggagattcctcttcatcttcgaccagcttgtcataaaagcgatattggctttactaatgtatatgggcgtatggcttgggataagccatccccgactattacaggtgggtgcactgtcccaagtaaggggcgctttggtcaccctaaagagtgtaggactatttcggtgagagaggctgctcgacttcaaaccttcccggatagctatgtttttgaaactgatcatattgataaggtttgtctaataatagggaatgccttgccaccaaaattcgcctctgttatggcgtctgtttgcatggataagctcagggagtaa

SEQ ID NO: 352520 - DNA, 765 bp, Pseudomonas aeruginosa
atgcgtttggcctggcggtcgctgaagatgaagttgccttgggcgtccatcaggttgatgagctccgagacgttgtccaccagcatcgatgcgcgggtgaaggcggtctatctggcactgggtatcaacctggccggcgagaaggaaatcctcggcctgtggatcgcccagaatgagggcgccaagttctggttgcaggtggtgaccgaactgcgcaaccgtggcgttcaggacatcttcgtcgcctgcgtggatggcctgaagggcttccccgaggccatcgaggcggtgttcccgcgcaccagcgtgcagctatgcatcgtgcacatggttaggcacagcctgaactacgtgtcctggaagcgacgggccgaagtcgccgctgacctgaagcgaatttaccagtccgccaccgctgacgaggccgaactgcgccttggcgagtttgaggccaagtgggatgacgactacctgccgattggtcagtcctggcgacgcaactgggccaggatcacgccgttcttcgactttccgccagagatccgcaaggtgatctacatcaccaacgccatcgaatcggtgagcatgagcctgcgcaagatcaccaagaaccgcggctcgttccccagtgacgaggcgctgctgaaactcttctacctggcgctacgcaacatcagcaagaaatggacgatgccgatccgtgactggaaggcggcgctgacgcgctttacgatcggctacgaagaccggctgccgcagccgtaa

SEQ ID NO: 352521 - DNA, 8994 bp, Pseudomonas aeruginosa
atggcaggctccgataccttgaaaggcggcgcaggccgagactatctagagggaggttcggacaacgacaccctgataggggggagtgaaagcgacaccttgatcggggggcttggcaacgatcttcttgagggcggagagggcaatgaccttctggaaggtggcctcggtgacgacagctacgagtttagcggccagttcggtaccgataccgtcattgacctggatggaaaagggcgcctgcgcgtcgatggcctgattctggccggaggcacccggatctccaccgacacctatgccgacgaagagaccggctggacctattcgcgtgatggcgaagacctcgtgatcggcaaggcgctgtccggcaacacgatattggtcaagggatggaagcctggtgacctggggatcatgcttaaggatgctccagcgccgacgccggaggcgccggtgatcaacggtgacttcaagaagaaggtcgatggcagcggtacctcctatgtaatcgcggaaacggggtacgtttccgatggtgtcgaagcaggcgcccaggactatctactaggtactcaagccagcgaggtgctgaacggactgggtggcaatgatgccctactgggcggggaaggcgacgatacgctcgacggcggccagggcgatgacatgctgtggggcgggaagggcgaagatcacctgatcggcggcgatggagcggactatctgtttggcagtctggccggacacttgatcaccgtgagtcggaccgactttctgccgccagaggcgcaaggccccgaactggcgcgtggattcaactgggtcatctaccggaacggcagcagtatcacagtcaccggagacaatggaggagaccagagcagcgagatgctgatcgctctgcaggatgagcggaacattctggaggggggcaagggaaaggatcatatcgaggccggcactggcgacgacattgcccacggcaacgaggacaacgacgatatccaaggcatgggcggcaacgatctgctgttcggcgacgacggcgacgacctcctttatggagatggcgtcttggatagcaagttcttttcttataccccgctggaacgacatgggagcgacactctctacggaggaacggggcatgaccggatcgaaggacagggtggcaacgatttcgcggtaggcggatcgggcaacgacacactgtacggagacagcagcaactgggatgaggcgacgaaaggagcgactccggcagccctgagagggaatgacttccttgatggcggtcagggtaatgacctgctcgagggcggtggcggcaacgacaccctgctgggcggggaaggggccgacattctgtggggcgatgccgcactcagccgtctgggcgcgggcggccatggtgatgacgtcctggagggaggtagcggtgaggacacattgattggcggtgcaggcaaggatctgctgaggggcggcgatgatgctgacgtcctacatggcgatgacacccaggcgcctgccgaatcgcatggcaacgacacgttggatggcggcgcgggcaatgaccggctttggggggaagggggcgacgatgtgctgctcggcggggccggcaacgactggttggcaggagaggaccaactgtcctccgcagcgggctccacgttgacgggcaatgatctcctggatggcggtgaaggaaacgataccttgatcggaggcaatggccgcgacacgctgctcggaggcagtggtgacgattctcttgtgggtggtgccgaagacgatgtgctgtatggtggggcgggcgcggataccttgcagggaggcgccggcgatgaccgctacatcatcagcgcaggcgacttgcctgtcgccggcttggacgcgatcctcgattccgaaggtagcaacacgctggttgcactcggcgatctttcggtcgccaagactcagagttttgccggtgatgtgttcctgtccgagggtagtcaatccgaggggcggcgtctgctgatcaaggatggattacggggcagcatggcctacatcgagaaccgggagggcgtaaagaccactttcaagcagtgggtgcaggacaatttgcaacaatcgatccaggcaagcactaacggtatcgatgaaatcctgttcagtggtcgtggcgacgatgtactacgcgccgaacactcgcgcgtcacactcgatgccgggcgcggcaacgacaccatcgacttgagcatgaccggcgtttctggcgtgacggtgcaattcagttccggggatggtctcgacagcgttctcggcggcaattccgctgggagtttacccgcgcgccaggaaaacgtggcgcgcttcggcacagacatcgaagcgacgagcctgcgtctggttgcgacaccgggcgatgccctcaaggggaatctcttcatcgcctacggcagcggaaatgatcggatcaggatagatctggagcgcaggggcgaggatgttctccggcctttcgaccatttcgagttctccgatggtagccgcttgagttgggaagaactggccggtcgaggtgtgagttatgcgctgccggaaggaggaaatgttccagccataggaacattactcgacgatacgatcctggggagcaccggtcacgatacgctcgatggtggcgtggggagtgatcgcctggatggtcgtggcgggaatgatcttttgcgtggagggaacggtgcggacacctatgtctttgccggcggatatggcagggacaccatcgacaacgcagatacggatgcaccgggaaccgctgccgatacgatcctgctgggaggtacgttgcaagcctcgcaagtccagtttcgtcgtgtcggtattgatttgcagatcgtcatttccggtggcgaggacgtgctgacagtaacccgctattttgccgatgatgcacgcaccagcagtgccgtcgaatgggttcgcctggaggacggaacggaatgggacatcgaggcgatcaggcgcgaagtgacgcaaggcaccgacggccgagacgttctccatggatatgacagcgacgaccatcttcgcggtggcgctgaggatgaccagctctatggcggtggcggggcggatcgtctcgaaggtggcgagggcgatgaccggctcttcggcggcgacggtgacgacgtactgatcggcggcaccggcaacgactcccttgtcggtggtacgggaagcaatgtctatgaattcgcccgcggtttcggccgggatacgatcgccaacggaaattacactgagggcaagcaggatgttgtcaggttcctcgacatcgctcgcgaggatgtttcgctctcccgctccgacgacaaccttctgattcaggttggtcaggaagatgccgtcaccatcgaacatttcttcgaagaagacgctacctctggttaccaagtcgagcgcatagagttttccggcggaaagtcctggggactcgatgaaatcaaacgacgcgtgcaacagggcacggaaggccacgaccgcctatacggttatgcttctaacgacgtgctatccggcggagctggcgtggataggctgtacggccgtgccggcaatgatttcctcgacggtggcgagggtaatgactacctctacggtgacgaaggcaacgataccctggtcggtgggttggggggcgattggctgagcgggggagaaggcaacgatacctatcgtttctccaggggctttggcaacgacaacatcgaatccgccgcaacgcgggcgggcgaagtcgaccggatcgagttgctggacatactcccggacgaggtcatggtctggcgcacaggcaaggatctgaatcttcgggtaaccggactggacgggcgggacgacacgcttgctgtgcggtcgtacttcaaggaaagcgcaggttcggatggcacaaccgatatcgtcttcgcggacggaacgacctgggactatcggcagctccttgagctgatccggactgccacccccggcaacgacaccatgtacggagatatcgaggccgaccgcctcgacggtctggcgggcaacgattcgatcaatggcatgcaaggtcacgatacgttgctcggtggggatggggacgatacgttacagggtggtgagggcaacgacctgctcatcggaggaatgggtaacgatacgctcgtgggcgggagcgggagcaacgtctatcgattcgagcgcggcgatggtagcgatgaggtggcattttctgcggaggaaagtgcgtccgtcatcgaactcggcgggggtatcgctccaagcgatgtcagcctggccagggtgaaatcctatgccatagaccacctctacatcacggtaaaaaatcagcaaggcaagcaggtcaatctcattcgtatcagcgactatttttccaggactgcagtcgacaacatccgcttcgcggatggcacgatctgggatcgggcatacgtgttcgcccgcattctccagggtggcgctggaaatgactccctcacaggacatgagtccgatgaccgcctggacggccactcagggaaggacagcatcgccggtggtggtggcaacgacaccttggcaggtggcgacggcgacgattacctggagggcgatggcgcctacaccacccgacctggcaacgatgtactggagggtggctggggatacgatcgactcagcggaggagacggggacgacatctacctctacaacctgggcgacggcaaggatgtcattgtcgaaaacaacgatagccagaggggcggcaatgacgtcttgcgcctgggtccgggaatcacggaaagcgatctttccttccacgaagtgaagaaagaaggtgggctgatcatccgcaatgccgtggatggaggagagatcctcatccgaggctttttctggggcgacaactccacacgtatcgagcgtattgagttgagcgacggtacagcgctgggactgcaggatattctggctcgggtcgagcggggacaggccgacactcaggtcggaacgtccggggacgatgtattcgtggtcgatcatgaggacgacgtgatccaggagtccgtgaacggtggcatggacacggtgcttgccagccgcagttacatgttgccggccaatgtggaaaacctcaccttgactggcgggctcagtatcgatgctaccggcaacgtgctgggcaacatgctggtgggcaacgatggcgacaacgtgctgaagggcaaggagaagtggtcgggggcgcgagacacgggcatcgggggcaacggcaacgatacctacatcaatatcgagaacgtcatcgagcaagaggatggcggcatcgatacctggtatagcttcatcggcggacggctgccggaaaatgtcgagatctaccacctcggagatggctcgtcctcccactacatcaatgccatcgaggcttacggtaatgcgctggacaatatcctctataccagcaacaccgggagtggcatctacaacgacactctcgatggcgggctgggggcggataccatggtcgctctcggtcgcgactcagcggtgttctacgtcgacaacataaatgacgtggtggttgcttcggcattggggtcggactacgacgaggtacgtacagatctcgactatcagttgggcgatcatgtggaaaacctcgttttgctggggcagcaacgaaccaaaggcattggcaacgagctgaacaacacgctggatggcgcgcagaacaatgcggaaaacactctgcagggcggtttgggcaatgaccgttaccggatagacgcgcgcgacaaggtcatcgaactgggtggcgaaggcaacgacaccatcgagttctgggccgccagcgacgcaccatttgccctggctgactatgccaacgtagaaaatgccgtattgcagaaaggattccgagcggcaggcctgatcggtacggatgaagacaactggcttgacggcaatgaattcgacaatcgtctgatggggctggcaggtaacgatacgctgcgtggtgatcgaggcaacgacaccttgaacggtggcgtaggcaacgatcttctcatggggggagagggacgaaacacctatgagtggggaaggggatatgggcacgacacaatatctccagcagggactggcgacaccgttcaactggctaccgatgtatcggccgagcagctctggttctctcggcaagactccagtgatgatctactcgtgacccatctggacagcggagagaccttgactcttgagtactggtactccggcgcttccagcaatatcgaaaatatcgtcctggccaatggaaagacgcttgccccacagcaagtcgacgccttggtggcggggctcgcgactatcgcaacgaagcccatccccttttcccagcttggagacgaacagaagctgctgttctccacattgctatctgatgcctggcgggatcaggtcttgtacctggaaggcagcgatgtcgccgatcatcttgccggaaaggataacgacgataccctgcttggcggtctgggcaatgacactctggaaggaggtaggggagatgacatctaccgcctctatcgcgggactgggcgtgacacgattatcgattacgaccggaaggggtcggccaatcgcctggtgttcgccgacgatgtacgggaagagcaactgattgtactgcgtcagggtgatgacctgatcctgcgagtggacggcgaggtggaacctgtcatcgtcaagggacacttcgcggcagaacaatcggtaagtggaacaccctatgactggggcattgacttcatcgagctgagtggcaatgtcacgctggatcgtatggccatacaagcactggtcgaccgtgcatcgagcaatcatgcacccatcggccaagatatcactgaagtaattcgctcaaggggaggggacgccttccattatcagattccaacggaaaccttgcgcgacccggacaacggagatcgcctgacttaccgaatgacgttgaaggatggttcgacgctgccagagtggattcgtttcgatcccgaaacactgacgcttgctggccaaccagcgtccacagacaagggacggattgaactgcttttgacgggtacggacaggtatggcttgtctgcagaggccaaccttgccctagaggtctttgtccagaacagagcgccgagtctgatacagccaatcggtgatttccatctggaagagagtgacgcgttttcctttaccgtgccggaatccacgttcgtcgaccctgacggagatgtattgacctaccgtgcgaccctgacggatggcagcgaactaccgtcctggctgattttcgacccgcaaaaccgtacgttcagtagcgatggggcggtcggggaaatcgggcgtgtacaggtgaaagtgatcgcaagcgatcaggatagcctattcgccgaagccattttcacactctcgggacctagcagtgtcgatccggtagaacctgggatgggcggcaacgatagcctggcaggaagcgctggacatgatgtcttgctaggtggggctggcgacgacaccctcgatggcgccgccggcaacgaccaactacttggaggtagcggcgacgatacttatgtgtaccgctccgggcaggacctcatacaagagtcttctggcaacgataccttgctgttcgccaacggcatcaccttcagccaggttggctccggcctcactaaatcgggcaacgatctgatcctcaagatcagtggcagcaccaccggtcaggtcaccctgaaagacttcttccttggtggcgactctctcgtggagaacattgtattcgagacgggagggagccttgctgcggagcagatattcggtgccttcggcttgggaatgcccgagccgcagcgactcttcgacaatcaggtagagggtggggcaggggacgatacgtcgctgtccgggaccacccagcgtgatttgttgcagggcttcaacggcaacgatctgctacgtgcgggcacaggcaatgaccgtctcgaaggagggaacggcaacgatactctccatggcgagggagggaacgatactctggttggcggtcgtggtgacgacacctatgtgttcgcggccggtggcggtcaggacatgatcgacaacaacggcggtggtttcgacacgctgcggttcgaaggcattaccttcagtcaggtttccagcggcctgatgaagagtggtaacgatctgatcctgcgggtcagtggtggcagcgatcaggtcaccttgagaaactggttcctcggcggcgattatgttgtggatgtaattacattcgcctctggcgggcagttgacagcacaacagttgttcggcgcgtttggtcttagcaatccggatcccaagggatcgcccgcttacatagatccaccggatgagcgagccttcggcactctctatgccggcatggcgggggatcagacgatcttcggctcctcggatgcagatctgatagacggaggggcgggcagcgatcgattacgtggcggcaagggcaacgactatctgatgggcggcgatggcagtgatacctatcactttgcggcaggggatggtcaggatacgctcgacaacctgtcgaatacgccatccgatagcgatatgttgagtttcgacgatatctcccgagagaacctgtggctgtcacgccagggagataaccttgtcatcgatgtgcgaggctccgaggatagtgtcaccctgcagaactggtatacgaatccggcgcaacaactggactcgatccaagcgggaggatcttcactctatgccaatcaggtggatgccttggtcaatgccatggcggcgttcggagcacccgctggaggtgaaacaaatctaactcagacacagcgtgaacagttggaggcggtaatagcggctaactggcagtag

SEQ ID NO: 352522 - DNA, 627 bp, Pseudomonas aeruginosa
atggacagagtgttcgctttctttaggcgtagtcgttgcctaatcgcattggttgtcatcgtgctattagtttttttcggatggccgtggttcaagaccttcaacccgacaccgtctgacgaagagttgattgattttttctatgaaaacaggccagcaatagaggctcttgtcgatttctatagaaaaggcggtgagattcccagcaaagaatggaatgtgctgcagcgtaaagccggagtttggcatgtaaacactatgggtctatgggtcggagacgatccctatgtcgatggaaagcttgcatttgatgagtatttaaagctcccaacatcggaaaggatcaaagtaagtaggtcttcaaggggggttaatataataatagataacaagcgatatgttaactatatattttccgtaagcaagcggctgtttcatgtgccgaaaccagtcaagatagaaggtggaaggctagtatttcctgagcatactgggcgagggggggaggatacttacaggctactaccttcgctcaataaattccctgatccgtggaaggatggagactgtgtttttcgacaaatagagagcgaatggtttatctccatgtgtcatctttctatttaa

SEQ ID NO: 352523 - DNA, 861 bp, Pseudomonas aeruginosa
atgacagcctgcctttcgtcctcttctgatagtgtttatagtccggactcattaggttggattgcttcgaaagatcaacttgaagctattaatttaaccgcgtccgccttgaaagtctctgcggcagctattgcgggcgctatggcggaagaaagtaactcatattttcagtctgaaatatttcagaaattacttgatgactatgctatatccggagttgatccggagaaagtctttgcggatgtttctgatctgggtgtgcttggggtggtgaataaatacgccgcagagttctatctatcaaggagaacccatcaagaattcctagacgattacgagtatctatacgacaacaaaggcttagatgagcatggcgctgtggctaaggtcaggcagcccgtcttggtcgatctggggcgcggaaatttcaaattggcaacagccataacgttgttgcgagcatattatgccgagcatccctcagatgatcctctggagcttaagggctacagtaatgcttatgaccgattggctgcagatattgtagagtcttcgagtgatgtagttgccaaactgtatggtctaatgataagggaggctgaggaatggtttgtcagcaagagggcctatggtgacgactggaaaaatctgtcacaagagttcaaagacgctctttatgtgacatatgtaaattttggtcgtcccttgatggaagatctttacgagaattcagccagaaagggaaagctcgtttacgagcctcagccggcattgacgactggtggtggcactaatcacctactcaatgctcgggagctaggaagtatcctaggtattctaggttatggagaggggtcgtaa

SEQ ID NO: 352524 - DNA, 627 bp, Pseudomonas aeruginosa
  misc_feature (186)..(186): n is a, c, g, or t
atggacagagtgttcgctttctttaggcgtagtcgttgcctaatcgcgttggttgtcatcgtgctattagtttttttcggatggccgtggttcaagaccttcaacccgacaccgtctgacgaagagttgattgattttttctatgaaaacaggccagcaatagaggctcttgtcgatttctatagnaaaggcggtgagattcccagcaaagaatggaatgtgctgcagcgtaaagccggagtttggcatgtaaacactatgggtctatgggtcggagacgatccctatgtcgatggaaagcttgcatttgatgagtatttaaagctcccaacatcggaaaggatcaaagtaagtaggtcttcaaggggggttaatataataatagataacaagcgatatgttaactatatattttccgtaagcaagcggctgtttcatgtgccgaaaccagtcaagatagaaggtggaaggctagtatttcctgagcatactgggcgagggggggaggatacttacaggctactaccttcgctcaataaattccctgatccgtggaaggatggagactgtgtttttcgacaaatagagagcgaatggtttatctccatgtgtcatctttctatttaa

SEQ ID NO: 352525 - DNA, 1212 bp, Pseudomonas aeruginosa
atgaatgtactgttcattcaccagaactttcccggccagttccgccatctctcgctacatctccagcggaaaataggtgcgaatgtcctggcgatcggccgcgataccgccccaggactgcccggcattcgcatgctgcgctaccgaccgggcagacaggcacgggcggatacccaccattacgtgcgtagcttcgagaacgcggtgctgcatggacagcaagtgttgcgcctgctgctcaccttgaaagccagaggatatcgaccagatatcgtgatcgctcatccgggatggggggagagtctctacgtcaaagaggctttccctgatgcgaagctgatgcatttctgcgagtactactaccgaacccaaggggcggacgccggtttcgatcctgagtttcccctgtctgccgacgatgccgcacggatccgaacgcggaatgctttgcacctgctgaatctggagcagtgcgacctaggggtgacaccgacacgctggcagcacggcctgcatcccgagctctatcacgagaagatccgaatcatccatgagggggttccggtcgacgacctcgggcctgatccccaagccaggctcgagcttcccaatgggcggatactgcgagctggcgagccggtcctgacctatgtcgcgcggaacctagagccttatcgaggcttccatcgtttcatgcgagcgctaccagaaatcctgcgcagggtccccgattgccaggtggtcatcgtaggcggtgattccgtgagctatggcaacccaccgagcgacgggcgtacctggcgggagaaattactccaagaaaatccgctagacccggagcgtgtgcatttcctcggtaaagtgccctatgtcacctatcgcagagtccttcaggtatcgacggtacacctctatctgacctatcccttcgtgctgtcctggtcgttgcttgaggcgatggcttgcggctgcctgattgtcgcctccgacacagcgccggtacgcgaagtcgtatgcgacggcgagaacggttggctggtggatttctttgatggaaaggctttgatcgagagagtggagcaggctctgatcaactctcgacgacatggagacatgcaggagagtgcccgacgaactgcacaagcgtactctgtagaaagtgggatgtctctatatcagaaagaaattgaaaaaatccttggtggattttga

SEQ ID NO: 352526 - DNA, 1416 bp, Pseudomonas aeruginosa
atgggcgcgcaaagagaactgctgcagcgctatcggcgtgcctggtcgcactcgtggcacaaccgcgcaaaactggacacaccgctgcgcagccagcacgaagtgcatttcctccctgcggcactggcgctgcaggagcagccagtgcatcccgccccgcgctatatccagtgggcgatcatgctcttcgcggcgctggccttggcctgggcgtgcatcggtaagatcgaagtggtcgccacggcaagcggcaaggtcgtcccgagcggtaggagcaaggtcatccagcccagcgatgtcgccgtagtcaaagcgatccatgtccgcgatggacagttggtgaaggcgggcgaattgctggtcgaactggactccaatatcaccggcgcggacgtcgaccggctgaagagtgatctgctcgctgcccacatcgatagcgcccgagccgctgcgttgcttgacgccattcgacaacataccgctccaacctccctggctccgttgattccccaggctagcgctgaacaacaggctgccgcccaacgttggttggaagggcagtacctggagctgcgcagcaacctggaacagatcgatgccgagatcgaagagcgcgctgcggaaatccaggctgcccaggcctgggtcggcaagctgcaggaatctttgcctataactcgacagttgagcgccgattaccggcgtctcctggagaaggcttacgtttccaagcatgcatatctggagaaggaacagtcacgccttgatcaggaacgcgagctggccgtgcagcaagcgaaggtgctggaactcaaagcctcgaaaaaggaggccgagcggcgccagcaaagcgtgttggcccagactcgtcgcagcatgctcgatctgcagcagactgccgagcagaaggtcgccgcactcaaccaggagttgaagaaggcggagcagcgcgaccgactgacccgattgacagcccccgtggacggcaccgtgcagcagttagcgattcacaccaatggcggcgtcgtaaccgaggcccagccacttatggtcatagttcccagcgaccagcctgtggaggtggaagccatgctggagaacaaggacatcggtttcgtccgccccgggcaagccgtggagatcaaggtagagactttcacctttaccaagtacggcattatccacggtactgtcctgagcgtctccgatgatgcaatcgaagatgagcgtagagggctgttgtacagcgctcgtatccagctcgaggagaacagcctgcgggtcggtgatcgcaacctcccgctgacaccgggaatggcggtacgcgcagaggtcaagaccgaccagaggaaagtgatcgactatttcctcagccctttacagcagtatgtggatgaaagccttgaggaacgttga

SEQ ID NO: 352527 - DNA, 2148 bp, Pseudomonas aeruginosa
atgcaagaaggaccttcggccactgctgaagtcgatggagggtgcccggattctggcgtgtcctgcttggtagtgctcgcccgctatcacaacatcgctgcttcctctgagcaactggtacacgagttttccacgcccggcacggttttcggcaagactgaactgctgctggctgcgaagaagcttgggctcaaggctcgattggtcaactgcagaccggagcgtcttggtcataccccgttgccagcgattgcgtgctcaaaagatggcgacttcttcattcttgccagactggatggcgataaggcgcttattcacgacccccgtacccagcgcccggaagtgctcgatagcaccgcgttggcagaacgctggactggtgaactgatcctggctcgctcggagtcttcgctggcaggcgaactggcgcgcttcgactttacttggtttattcctgcgatcgtcaagtaccgcaggttgctcggcgaagttctactggcgtctttcgcgctgcaactgttcgccttggtgacgccactgttcttccaggtagttatggacaaagtgttggtgcaccgcgggctgaccactctcgacgtgattgcagtcggcctgcttggcatcatgctcttcgaaaccctgctcagcggccttcgcagctatgttttcacgcataccgccagtcgcatcgacgtggagctgggctcacgtctgtttcgtcatctggtgtccttgccgcttgcctatttccaggctcgccgggttggcgactcggtggctcgagtgcgtgaattggagaatatccgcagtttcctcactgggaatgcgattacgctcttgctggatgttctgttctcggtcgtattcatcgcggtgatgtttttctacagcggctggctgactttggtggtactgctgtcgttgccattgtatttcgtcatctccctgttcattacgccagtactcaggtcccgccttcaggaaagcttcaaccgtggagcagagaaccaggctttcctggtggaaaccatgaatggcatcgacaccctgaaggcgatggcggtcgagccgcaggtcaatcgcaagtgggacaaccagctagccggttacgtcgccgctagcttcaggacacagacgctctccacgctagcgaacgaaagcgtttcccttgtcggtaagctggttacggtggcgacgctctggcttggcgcacgactggtgatcgaaggacaactgagcgtcggccaactgattgcattcaacatgctggccggccgtgtagcgcagccgatcatgaggctggcgcaattgtggaccaacttccagcagacgggggtctcgatccagcgcttgggggacatcctcaatactcgcacggagctggcacagggtgcccgcagcgtgcttccaccactgaaggggcatatcgaattcgaccaggtgcatttccgctatcgcccggacgggagtgaggtccttcgcggaatcagtctgagcatccagcctggcgaggtaattggtgtggtgggacgctccggctccggcaagagtaccctgacccgtctgatccagcggctctacagcgctgagcgcggacgagtgatgatcgacgggatggacttggcgcttgccgacgtttcgtccttgcgcaggcagatcggcgtagtgctgcaggacaacatgctgttcaaccgcagcatccgcgagaacatcgccttgagtgatcccggggcccccatagacaacgttattcaggctgctcggctggcgggagcccatgaattcattctggagttgcccgaggcctatgacacggtggtgggcgaacacggtgcttcgctctctggcggccagcggcaacgcatcgccatcgccagagcgttgatcggcaatccgcgaattctgattttcgacgaagcgaccagtgcattggactacgagtccgaacgggtcatccagcagaacatgaagtcgatctgcagaggtcgcacggtgatcatcatcgcccatcgcttgtccgccgttcgcgacgccaaccgtatcctggtgatggaccgcggtcagatcgtcgaacaaggcagtcacgccgaactattgactcaccaggcgggacactactcgcgcctgcaccgcatgcagcagggctga

SEQ ID NO: 352528 - DNA, 906 bp, Pseudomonas aeruginosa
atgaacaaggacatcgaactgctgcatatattccgggtggcggctgaaagcagcagttttcgcgacgcagctgtccgcttggggacttcccctcaaggtgtcacgcgtgccattcagcaactggagagacactacggcgaggtgttgtttcatcgcagcacgcgccaggttcgcatcaccgcctttgccgaaggtctgctggaacaggtccgccctgtactggagcgggtcgacgatctgtggcgaacgcctgctgccgaccagcaggctgcactgtcgggcacggtccgcatcaccgcaccgtacagcctgggtaccagagccgttctacctgcattggagcgcgttgccgcgcgtcatcctgggatcaccctggatgtgcgtctgtccgatcgcatcagtaatacggttgacgatgggatcgacgttggcatcagggtcggattcatgcgtgatagccgcttcgtcgcgcgcaaggcagccgacatgaggctgccaatcgttgccgctccacgtcttatcgagaaagtgggcacccctgacgatatcgatgcgttggccgggctaccgatcgccgtagccctggatatcaataccggccgcccctggccttggcacttcaaagcgggacagcagtggacacccgcggcccccaccctcatcgccgacaatgccgaaatggaaataggagccgcactggccgggatcgcattcgcccaactagcggactacatggcggctccctatattgccagcgggcaactcgtgcaggtgttgcaggacgaagagcctccggcatggggcttgtacgtctatcggcctcagcgtggccccattcctggaagggttcgagcggtatttgatgaaatgctggtcgccgttggatcgttgccagctttgcgctga

SEQ ID NO: 352529 - DNA, 165 bp, Pseudomonas aeruginosa
atgttattagaaagtgtggtgatccgtcgcagcgtcaagttgttgggccggctgttgatgccaatggttacgttgcaaaaggtgccgcgactattgagaattgggtttatggacctagtaatggtgcgtatcaatatcttcgatttgtcgatggaagattggtag

SEQ ID NO: 352530 - DNA, 138 bp, Pseudomonas aeruginosa
atgctacccgcgccagctacttacccggacctcagcctcaccggtacactcggctactccagcaccgctcttggcgagttgctgaagaatccggtgggcgccttgggtgctggactgagcctaccgttcctgcaatag

SEQ ID NO: 352531 - DNA, 273 bp, Pseudomonas aeruginosa
gtggagaacaacctggccggccgccgccactacacggaacaggaagccatgcgcgaacgggcacttgcctccgcgaaggaagcggaacgcatttaccgcatccgctacgagtccggcgcggaaagcctgcaatcctggctcaccgcccaggagacccggcgcaatgcagaaatcaccctggccgagaaccgcctgaacaagttgctcaactatgtcgcgctggtccagtccctgggcggtgatgcgaaagccggaacccatccggacacttga

SEQ ID NO: 352532 - DNA, 672 bp, Pseudomonas aeruginosa
atgggtccagagtgcaggttcgcaatctggcgccagagcgaattggcaggggcgagccagataggcattcggcttcggatcgtccacggccagccgcactaccagcgagttgtgcggactcggatccagactgggctgcgtcgtcgtggcccaggtatagacatcgccttccagataaatgtgcaggcgaggggctttcgttttgccttgaggctgatgaagtattgccaacgggaacggctgccccggctgtctgccgatgttcattacctggcgaggatgatcgccaatgccttggccatcgccgtgcgtgaagcgcaccgcgagggtgacggtactgcgggcgagagcctgctcactcgcgagttgcgctccgggcgctgcgatgaggaacgttggcaagacctgcagcagatcacgcggcgcaagctggaaatcagcaatcccaaggtcctagcggcttatctggatctgttcggtcaggggaagggcgcacttcggcatgatgccccctgtgacgcgagccgccggtgcgaggcgcctgctacggatgagtttctcgagcaggctggcggccctgatcgactgcgatccggactcggttcaacccatggcggcggacatcggcagttggcgacacgccccctcatgattggcaagatcagccgatga

SEQ ID NO: 352533 - DNA, 1113 bp, Pseudomonas aeruginosa
atgacaaatgccacaacaagccgctaccgcgcaaacctgcagggcgaagtggatggcacagccatctacacggcgcttgccgagggcgagtccaaccctgacctggcgggtgtattccgacgcctcgcagccgtagaggccgcccacgcggagttctggcgccaacggatgacggcaaccggcgaccatttttcgcccgggccatcgcgccgcgcccgcctggtggcctggctggtacgaaggtatggcagcgccattctgctgccggtgctcgccgctgcagagagcttcggcagcaggacctatgacgaccaatccgaggctcgcgtggccgggctcgcacgtgatgaacgctcgcacgcgctattgatgcagcaggccgccggaaccggtggcttgcccggcccgtttcttgccatgctggaaggccggcatcgcggtggtggcaacacgctgcgggctgcggtgctgggtgccaacgatgggttggtgtccaatctcagcctggtcatgggtgtggccggagccgccgcctcagaacatgccatcctgctgtcgggcctggctgggcttatcgccggcgcaggctcgatggccatgggcgaatggctgtcagttaccagttcacgcgaactctatcgcagccagattgccatcgaggccgacgaattacgcgagctcccggatgaggaacgtgaggagctcattcttatttaccaggccaagggcattgccgaaccccaggcccgcgcactcgccggcaaactcctgagcacgccagcgactgcgcttgacaccctggctcgggaggaactggggatagacccggaggggctgggaggttcggctgtcaccgctgcggtgtcctccttcatgctgttcgcggtgggggccatcatcccggtcctgcccttcatgtttctgtcggacactccggcactacttaccagtctggcggccagcagtgcagtgctcggcctgctgggtgcggggaccagtctcttcacgggacgcggtgcatggttctccgcagctcgccagatcaccatcgggctggtcgctgccgcagccacctatggtatcggcacgcttttcggcgtgacgctcggttga

SEQ ID NO: 352534 - DNA, 237 bp, Pseudomonas aeruginosa
atggccttcaaattgatcgaagagcaactcgggcgtactgcttacattgccggcgatttcttcacggctgctgacatcatgctgctgttcccgctcacaaccatgcgctatttcatgcccatggatattgccgggtatcccaacctcctcggctacctgcagcggataggcaatcgggaaacctaccgacgggccatggctaaggcagatccggggatcgcccctctgctcacctga

SEQ ID NO: 352535 - DNA, 1386 bp, Pseudomonas aeruginosa
atgaatcctaggcatcaagctgccattcatcaacagcaacgtgcccgccgacatgcatcaagcgcagatgcctacgccttcttcaacttgctaaccggccctgaattacttgaccgggtcgagttgttgttgccggctcatcgggagcgcttgttcccaccgacggagacgctgtccatgttcatggctcaagccttgagtgccgaccggtcctgccaaagagcggtcaatgacctggctgtaaagcaggtacacggtggtttgatgccgtgcagcactcacaccggcggctactgtcgtgctcgtcagcgattgccggtggagatggtttccagcctggttcgcggcgctggtaatctgatcagcacctgctctgctcagactgggcagtggatgggcagaccggttcggctggtcgatgggacgacagtggcgatgccagataccaaagccaatcaggctgcctatccgcagtcgcgtggacaaaagccagggcttggatttccgatttgccggttggtcggcattgtctgtctttccagcggggcagtgctggatgcggcattggggcgttttcgaggtaaaggcggtgatgaacaaaccctgttgcggtcgatgctcgatacgttgaacacgggggatgtattgctgggcgacgcctattacgccacctactttctgctgtgcgagttgcagcgcagaggcattgatggcgtattcgaacagtatggtgctcgtcgacgcagtaccgacttccgacgcggcaagcgcttgggcgcgcgcgatcatctgattgctctggaaaagcccccgaaacgtccgctctggatgagccaggcacactacgagcaagcgcctgagaggttggtggttcgggagttgaaagcaggcgacaagatcctggtcacaacattgcgctgcgcgaatcaaacgcccaaggccgcattgaaagggttgttcaaaagccggtggcatgtcgaactggacttacgcaatctcaagagcacgatggggcttgtgatgctgagttgtaaaacgccgacgatggccgtgaaagaactctgggtttacctgctggcacacaacctgatccggctactcatggtgcaatcggcattaatggcggactgtttgccgcgtgaactgagcttcaagcacagcctgcagctatggctggcgtggcgacagttcgatggtccggatatggacgaaagccttcagaggttactcattttaatcgcccagcagcgcgttggcaggcggcctgggcgggttgagccacgagctctcaagcgaaggtcgaaaccttatccattgctgacccatacacgccaatctgagcgcgccaaaatcaggcgaagcggtcaccctaggcgggctaagtaa

SEQ ID NO: 352536 - DNA, 921 bp, Pseudomonas aeruginosa
atggcgttttcgaaggaatcactcctttgtaccttacgggatacggtacttgatgcactaccttttgctgtctcatgggctaccctgccagaagcacacattcagcactgtaactcatattttcataatcttttcaggtacccaccaggtcacttcaagacagtgagtcagctaatagaggaaacctatatccatgagtggcagcgcgagcaagcctgcaagcactggaataaatcaaaatcgcgacctggatctacaaaggtatccgtcacccccgatatcgagcttgaaattctagatggcgacggaaatatccacaacgtcctatactgctgtctaatcctacatgagcagcagttggcaataaatctttacaaggatatttccaatctcaagcaggatgtaaaattattaaaggagcatgcttatcttgaccctttgactggcattgccaaccgtagaggactgcgagagcattggcataaagagacctctgggaggaaccaaacacgcctagctctacttatggtggatctagacaacttcaaaccggtgaatgacacctatggtcatttgattggggacgaagtactacgcactcttgcacaccgatttaaaagcgccataagagattcagacttcatatgccgctttggtggcgatgagttttgcctactacttaccgtgcccgagaggtttgagttactggaagatatctgtcagcgaattatcactacggcaagcgagcctatagccatcctcaataggaagataaaaatatctgcaagcattggcggctgtatctatcctgatcacgcagcagacaagcgcaaactgttggaacacgcagactcggcactataccaagtcaagaaatcaggaaaagcgcgatggaaatggttttcacccaacactatttga

SEQ ID NO: 352537 - DNA, 177 bp, Pseudomonas aeruginosa
atgagcactccccattcgaaagtcttcgcgtttggcggtggcgacaatagtgcactccgtaaggagccccttaccaacgtcattcagacacgggacaaagctgtcgtggcagaagcatccatggccagcccccccagcagcaccaacgccatagccctcttgatcaaggagggctga

SEQ ID NO: 352538 - DNA, 450 bp, Pseudomonas aeruginosa
atggccattccggaagacgatccgttgctgcttgaccgacagctttgctttcccctctatgcagcctccaacctactgacgcgagcctatcggccggtactggcgccactcgggctcacctattcgcaatacctcgtgatgttggtgctctgggaacatgatgtggtcagcgttggtgatctgggagaacgcttgcatctagacagcggcacgttaacaccactgctcaaacgtatggagcgtgacggtttcgtgactcgccgccgcgaccctgaagatgaacgacgcgtattgatcatgttgacaccccatggacacgaactccgcgctgcggcactgaacgtgccacaaaccctggcgggccagcttggagtcgatccggcttccgtcgaggacctacgcgacgcggtgcaggccatggttcgcatactcgctcgtcgctacacctaa

SEQ ID NO: 352539 - DNA, 1059 bp, Pseudomonas aeruginosa
atggctaccgctacttgtactggctacgcagtccaagatgccaattccccattgattccattttcgttctcacgccggtcacctcgccctttggatgttgtgatcgacattctttattgcggcgtctgccattcagacttgcatacagtccgcaacgaatggggcaacaccctatatccctgcgtacctggccatgagattgtcgggcgggtgagaggggttggctccggcgtcacccgccaccaaatcggggacttggtggctgtgggctgtatggtcgatgcctgccgtgagtgcccgagctgccgcgaagggctcgagcagtattgccaaaagggcatggttggtacctacaacggagatgacaacgttctcggcggtcataccttcggaggttattctagccacatcgtcgtgcccgaggacttcgtactgcaggttccagacagcctcgatccagctggcgcagcaccgctgctgtgcgctggaatcaccacgtggtcgcccctgcgccgctggggggcaggtccgggcaagaaagtcggggtcgtcgggctaggggggctggggcacatggcagtcaagctggcccatgcactgggcgcccatgtagtgctgtttactacctccgtatccaaggttgccgatggtaggcggctcggtgcagatgcggttgtgctatcgagcgactcgcaggcaatgctcacctaccaatccagcctggacctgatcattgatgcggtatccgcaccacatgacattgacctttatttggacttgcttggccgcgacggcacattggtgcagattggcgcaccagacgaaccgctaccagtcagtgccttcagcctcatcacgggacgacgctctatcgccggctcggcgatcggaggcattgccgagacccaggaaatgctcgatttctgtggtgagcacggcatcactgccgacatcgagattattcccatccagcagatcgaacaggcctatgcgcgaatgttgcgcagtgacatcaaataccgcttcgtcatcgacatggcttcgttgaagaccgcctag

SEQ ID NO: 352540 - DNA, 387 bp, Pseudomonas aeruginosa
atgtatgaactgttgagccagacccacaaagggttagccatgctctcagtgctactgacgctgggttgggtcagcatagtactgacagcgccgcggatcgctggcgagctgggaggaccacgaaagcttgtttatacgggagcgatggccatgaccggcttaactggcctgtccggcctggtattggtcgtcgtcgcacaaggcacctggctaaagctgatatttccctggcttggtctgatcgcggtcgcaggccatggtttttccgggacatccagccggcgcgccctggtagcgggcagcaaaatgccagcgttggtggcagcctcgctccaactcctgtttctcattacagcttacggcctgatgacgcttaaaccattctaa

SEQ ID NO: 352541 - DNA, 162 bp, Pseudomonas aeruginosa
atgaagagcaatggtgtcaacctaaaatacgtggacaccatcgtccataatgcaaggatcaccatgcaccagtgcaactcttatcccaagcacttcaaggcaaaagccgttcaggaatgcctgcaacctgacgtgagcgttagggcagaaacaccaatctga

SEQ ID NO: 352542 - DNA, 324 bp, Pseudomonas aeruginosa
atgtgcatcggcctgcccatgcagatactcgccacccgcccgggcgcggcactgtgcatcgaccgccatgcccgccagcgctggatcgacaccgcgctggtcggcgaatgcgcgcccggcgactggctgctggtgttcatcgacgccgcccgcgagcacctggatgccgcccgcgccgcggaaatcgacgccaccctggccctgctcgacgccgccctgaacggcgaggcacagactgacgccgcgttcgccctgccctcggccatgagcgccgagcaactggccgggctgctcggccaacccgtttccaaggagcccgcatga

SEQ ID NO: 352543 - DNA, 639 bp, Pseudomonas aeruginosa
atgaacgcgaccctgcctgacaccccgccgcgcatcaccgtgctcggcatcggcaacctgctctgggccgacgaaggcttcggcgtgcgctgcgtcgaggcactgcagcagcgctaccagttcgccgaccacgtgaccctcatcgatggcggcacccagggcctgtacctgatccagcacgtgcagcaggccgactacctgctgatcttcgatgcggtggactacaacatggcccccggcacgctgaaattcgtcgccaacgacgacgtgccgcgctttctcggggtgaagaaactgagcctgcaccagaccggcttccaggaagtgctgatgctcgcccagctcactggccagtacccgcagcgggtgctgctgatgggctgccagccggagtacatggacgactatggcggcagcctgcggccctgcgtgaaggccgccctggaactggccctggaggctgcccttgaagtcctgcaggactggggcggcgcgccacggccgcgcacgcaggcgctgcccgaggacgaagcggtgaccctgctgcacctggagctggcgcgctacgagcgcgaacgccccagcgaagaggacgcctgccgggtcggcgacgagcgcatcctggcgcggcgcaactga

SEQ ID NO: 352544 - DNA, 684 bp, Pseudomonas aeruginosa
atgtctgaacatccggcccgcgccagcgggcattccgaatacgtctacgaggcgccggtgcgcctgtggcactggatcaacgccgcgtgcatcgtcgtgctggcgatcaccggctacttcatcggctcaccgctgccgacccagccgggcgaggccagcgccaacttcctcatgggctatatccgcttcgcccacttcgccgccgcctacctgttcgccgtgggcctgatcggccgcacctactgggcgctggtcggcaaccaccatgcccgcgagctgttctgggtgccgctgagccggcgcgcctactggcgcgagttcgccgactggttgcgctactacctgttcatcggcccggtgccggcgccgaccttcggccacaacccgctgtcgcgctttgccatggtcttcgtcttcctgctcacctcgctgttcatgctggtgaccggcttcgccctgtacggcgagggcgcgcagatgggttcctggcagcagcgcgcgttcggctgggtgctgccgctgctcggccagtcgaacaacgtgcacatcctccaccacctgggcatgtggctgctgatcctgttcatcctgctgcacgtgtatgccgccgtgcgcgaggaaatctgcggccgcctgagcctgatcggcagcatcgtctccggctacaaggccttcaagaaatga

SEQ ID NO: 352545 - DNA, 1857 bp, Pseudomonas aeruginosa
atgagcaattattcgacccaggggttcgacctggacaacagcggccggcgcatcgtcgtcgacccggtgacccgcatcgagggccacatgcgcgtggaggtcaacctcgacgccaacaacgtgatccgcaatgcggtgtccaccggcaccatgtggcgcggcctcgaagtcatcctcaagggccgcgacccgcgcgacgcctgggccttcgtcgagcgcatctgcggtgtctgcaccggctgccatgccctggcctcggtgcgcgcggtggaggatgcgctggatatccgcattccgcccaacgcccacctgatccgcgaaatgatggccaagaccctgcaggtgcacgaccacgcggtgcacttctaccacctgcacgcgctggactgggtcgacgtggtatcggccctcaaggccgaccccaaggccacctcggccctgcagcaactggtttcgccggcacatccgaagtcttcgccgggctacttccgcgacgtgcagaaccgcctgaagaaattcgtcgagagcggccagctcgggccgttcatgaacggctactggggcaacccggcctaccagttgccgccggaggccaacctgatggccgtcacccactacctcgaagccctcgacctgcagaaggaatgggtgaagatccacaccatcttcggcggcaagaacccgcaccccaactacctggtcggcggggtgccgtgcgccatcaacctcgatggcgacctcgccgccggtgcaccactgaacatggagcgcctgaacttcgtgcgggcgcgcatcgacgaggcgctggagttctgccgcaacgtctacgtgcccgacgtgctggccatcggcaccctctacaaggacaagggctggctgcacggcggcgggctgtcggcgagcaacgtgatggactacggcacctacgccaaggtcaactacgacgagcgcacccaccagttgcccggtggcgccatcctcaatggcaactgggacgaaatccacccggtggacgtgcgcgacccggaacaggtgcaggagttcgtcacccactcctggtaccagtacccggacaacgacaagggcctgcacccgtgggacggcatcaccgagccgcactacgagctgggcgcgcggaccaagggcacgcgcaccgccatcgaggaagtcgacgaaagcgccaagtactcctgggtcaagtcaccacgctggcgcgggcatgccatggaggtcggcccgctggcccgctacatcctcggctatgcccatgcgcgtcagggcaacccgcactgccagcgcgtccggcagcagctggaaagctcgctgcaggcggtcaacctcgacctgcccagggccctgggcctgaacaccaccgactacagcgccaggcaactgctgcccagcaccatcggccgcaccctggcccgcgcactggaagccgagtactgcgccgagatgatggtcgacgactggaacgagctgatgggcaacatccgcaacggtgaccgcgccaccgccaacgtcgacaagtgggacccgaagacctggcccgccgaggccaagggcgtgggcagcgtggccgcgccgcgtggcgcgctgggccactggatacgcatcaaggacgggcgcatcgagaactaccagtgcgtggtgcccagcacctggaacggcagcccgcgtgacagcaaggggcagatcggcgccttcgaggcggcgctgatgaacaccccggtcgccgtcgccgagcagccggtggaaatcctccgcacgctgcattccttcgacccctgcatggcctgcgcgacccacgtgatgagcgaggacggcgccgaactgagcacggtcacggtgcgctga

SEQ ID NO: 352546 - DNA, 1086 bp, Pseudomonas aeruginosa
gtgaccgaaacattctatgaggtgatgcgccggcaaggcatatcgcggcgcagcttcgtcaagttctgctcgctgaccgccacgtcgctgggcctgggcccggccttcatgccgaagatcgcgtgggccatggagaacaagccgcgcaccccggtgctctggctgcatggcctggagtgcacctgctgctcggagtcgttcatccgctccgcgcacccgctggccaaggacgtggtgctgtcgatgatctcgctggattacgacgacaccctgatggcctccgccgggcaccaggccgaggccatcctcgacgaggtgatgaccaagtacaaaggcaattacatcctcgcggtggaaggcaacccgccgctgaaccaggacggcatgagctgcatcatcggcggcaagccgttcatcgagcagctcaagcgcgtctcgcgcgatgccaaggcgatcatttcctggggctcctgcgccagctggggctgcgtgcaggcggccaagcccaaccccacccaggcagtgccgatccacaaggtgatcaccgacaagccgatcatcaaggtacccggctgcccgccgatcgccgaggtgatgaccggggtcatcacctacatgctgacgttcgaccgcatccccgaactggaccgccaggggcggccgaaaatgttctacagccagcgcatccacgacaagtgctaccgccggccgaacttcgacgccggccagttcgtcgaggcctgggacgacgattcggcgcgcaagggctactgcctgtacaaggtcggctgcaagggcccgaccacctacaacgcctgctccaccgtgcgctggaacggcggcaccagcttcccgatccagtccggccacggctgtatcggctgctccgaggaaggcttctgggacaagggttcgttctaccagcacctgaccgacatcaacgccttcggcgtggaagccaatgccgaccagatcggcctggccgccgccggcaccgtaggcgcggccattgccgcgcacgctgcggtgaccgccatcaagcgggccggcagcggctcggcacgcacctccacgcacgacgcctga

SEQ ID NO: 352547 - DNA, 1041 bp, Pseudomonas aeruginosa
atgcctcgcccggctgccccccgcccaccgacacccgccccctatggcctgttcatcggcctgatcgcctgcaatgccctggcctggctctgggccctgctggccttccacgactacccgctgctgctcggcagcgccgtgctcgcctacagcttcggcctgcgccacgcgctggacgccgaccatatcgcggctatcgacaacgccacccgcaagctgctccaggagggccagcgcaccacccatgtcggcctgtacttctcgctcgggcacagcagcgtggtgatcatcgcctcggcgctgatcgcgctcagcgcccgccgcctgcaaggcgcgctggaggccttccacggcatcggcgcactgatcggcacctcggtgtcggccgccttcctgctgctggtggcgctgatcaacctggtgatcctgcgctcggtgtaccaggccttccgccgggtgcgccgtggcgagcggatcggcgaggccgagctgcacggcctgctggccggcagcggaccgctcgcgcgcctggcccggccgctgttcgggctgatccgccgtggctggcacctctacccgctgggtctgctgttcggcctgggcttcgacaccgccacggaaatcggcctgctcggcatcgccgccagccaggccgcccagcagttgccgatgctctcgatcctggtgttcccggcgctcttcactgccggcatggcgctggtcgacagcgccgacagcgtgctgatgaccggcgcctaccgctgggcccaggtgcgcccggcgcgcaagctctactacaacctgaccatcacgtcggcctcggtgctggtcgcgctgctggtcggcggcctggaagcgctgaacctgctcgccgggcaactcggcctggaaggcggcctgtgggacgtggtcgcccggctcaacgagcagttcggcctgatcggctacctgatcgtcgcgctgttcgtcagcacctgggccctggcctgggtcgtctaccgctacaaaggctacgaccgcctcgacccgacgccagcctga

SEQ ID NO: 352548 - DNA, 1317 bp, Pseudomonas aeruginosa
atggcccgcaaaccgcccgcaccgccgctggacgaagacgcctggctggaagtcatcggcaagatggacgaggtctactcgcaactggtccaggacgagatcgccctggaacagaagaacaccgagctggagcagtcgcagcagttcattgccgggctgctggcgtcgatgtccgacattctcctggcctgcgatccgcaagggctgatcgaggaaaccaaccacgccctgcgcgagagggtcggcggcgacgagcagagcctgcgcggccgtccggtacacgccctgctcgccgacgccagcagtggcgagcgcctgcgcagcctgctcgccagcctgcgccagcccggcgccagcgccagcctggaggtcgacttccgcggtgccgatggcgagccgctgccggtggacctcagttgcaccgtgcgcagcggcgcccacgggcgctgcctcggccacgtgctggtcggccgcccgctgggcgagctgcagcacgcctaccggcaactgcacgaggcccacgaagcgctcaagcgcacccagcagcagttgctgcacgccgaaaagatggcctccctcggccgtctggtggccggcgtggcgcatgaactgaacaacccgatcagcttcgtgctggccaatgcccatgtgctgggcggctatggcctgcgtctgcaaggctacctgcgcgcagtacacgaagagctgcccgccgagcagcgcgcggcgctgcgtcagcaactgcgcatcgacccgttgctggccgacctgccgtcgctgatcgacggcaccctggaaggcgcccagcgcaccgccgatatcgtcagcgcgctcaagcgcttctccgcgatggaccgtggccagccgggcgaggtatcgctcaatgaggtgatcgagcgcgccatccactggatcacccggggcaccgccccggacctgcgcgtgcactggcagcccggcgcggatgtgcgtgtgcacgccaatgccgggcagttgctgcaggtactcatgaacctgatgcagaacgcctacgacgccgctcgcgcgggcggcaacgccgcgcaactgtggatcgccctgagccacgcctcgggctgggccgagctggccctgcgcgacaacggcccggggatcgccgaggaacacctgagccaggtcttcgaacccttcttcagcaccaagccggtgggccagggtaccgggctcggcctgtcgatcagctacggcatcgtcgaaggctgtggcggcaccctgcaggccggcaaccaccccgatggcggtgcgctgttccacctgcgcctgcccgccctgggctga

SEQ ID NO: 352549 - DNA, 456 bp, Pseudomonas aeruginosa
atgcaacgcctgaccatctccctcgacgagcgcctggccgaggccctcgaccagctcatccgcgcccagggctatggcaaccgctccgaggccctgcgcgacatcctgcgtcggcacatcgagcaggagcgcctgcgccaggacgccgacgcgctgcactgcgtggccaacctgagtttcgtctacgaccaccacgcgcgcaccctggccgagcgggtcatgaccctgcagcacgaacaccatgacctgaccatcgccagccagcacgtgcacctggaccacgaccactgcctggaaagcctgatgctcaagggcccggtgcagcacgtgcaggccttcgccgaacgcctgagcgccgagcgcggcgtgcgccacgcccgcctcaacctgatcccggtggcggccgccgagggccagcacagccacgcccacccgcacctgcatcccacgagctga

SEQ ID NO: 352550 - DNA, 1458 bp, Pseudomonas aeruginosa
atgacccgtctactggtcggcccgttcaaccgcgtcgaaggcgacctcgaagtccagctggacatcgaggacggccaggtgcgctcggcccaggtcaacgccacgatgtaccgcggcttcgaacagatactccgcgagcacgccccgctcgatgcgctggtctacgcgccgcgcgtgtgcggcatctgttcggtgtcgcagtcggtcgccgcggcgcgggccctggccgggctggccggtatccagccgccggccaacgggctgctggccatcaacctgatggcggcgacggaaaacctcgccgaccacctgagccacttctacctgttcttcatgcccgacttcgttcgcccgctgtacgccgagcgcccctggtacgccgatgccgtggcccgcttcaccccgcacagcggcagccagcaacgtctggccctggccgcgcgcaagcgctggctggacctgatcggcaccctgggcggcaagtggccgcataccggctcggtgcagccgggcggctccacccgtgccatcgatccggccgagcgcctgcgcctgctgacgcgggtgcgcgagttccgccagttcctcgaaagcgaactgttcgccgcaccgctggcgcgcatcaccgggctggccagcgaagcgcagctctgggagtggtacgccgaagcaccggagcacggcgacctgcgccgcttcctgcgcatcgtcctggatgccgggctggaacacctgggccaggggccggggctgtacctgtcctatggcgcctacccgcaacccgatggccacagcagcttcgcccaggggctgtgggatgcggcgcgagccgaggtgcgcccactggccctggagggtatccgcgaggacgccagccacgcctggctggacgaccatggcgggccgctgcacccggcccacgggcagaccgagccgaacctggacaagcccgccgcctacacctggaacaaggccccgcggctggccggcgaggtgctcgaaaccggcgccctggcgcgccagctggtcagcgcccaaccgctgctgcgtgacgccgtggcgcgctgtggcggcagcgtctatacccgtctgctggcccgcctggtggaactggcacgggttgtgccactgatggaagactggttgctggcgctgcgccccggcgagccctattacctggatgcgccattgcccgacgacggcagcgcggtgggcctcaccgaggctgctcgcggtgcgctcggccactggctgcgcatcgagcacgggcgcatcgccagctaccagatcatcgcgccgaccacctggaacttctcgccgcgcgacgcccagcgccgccccggtgccctcgaacgggccctggaaggcgccccggtgcgccccggtgagcagaccccggttgcggtgcaacacatcgtgcgttcgttcgacccctgcatggtctgcaccgtgcactga

SEQ ID NO: 352551 - DNA, 1008 bp, Pseudomonas aeruginosa
atgagcgcaatgttccgcgtgctctggctgcagtccggtggctgcggcggctgcaacatgtcactgctgtgcgccgacacccaggacttcgccgggctctggcgcagcgccggaatcgaactgctctggcacccctcgctgtcgctggaaagcggcaatgaggtgctgacgatcctcgacgactgcctgagcgggcgcacccacctggatgcgctgtgcatcgaaggcgcgctgctgcgcgggcccaatggcaccgggcgcttccacgtcctggccggcaccggcatcccgatgatcgactgggtgcggcgcctggcagccgtcgccgactacacgctgggcatcggcacctgcgcggcctacggcgggatcactgcagccggcaacaaccccaccgacgcctgcggcctgcaatacgacggcgagcgccccggtggcctgctcggtgccgactaccgctcggcccgtggcctgccggtgatcaacgtcgccggctgcccgacccaccccggctgggtcaccgatacgctgatggccctggccgccgggctgttcgccaaccaggacctggacgccctcggccgcccgcgcttctacgccgatcaactggtccaccacggctgtacgcgcaacgagttctacgagtacaaggccagcgcagtgaagccctcggacctgggctgcatgatggaaaacctcggctgcaagggcacccaggcccacggcgactgcaacaaccgcctgtggaacggcgaaggctcgtgcacccgcggcggctacgcctgcatcaactgcacggcgccaggcttcgaggagccggggcatgccttccacctcacgcccaagcgtgccggcatccccatcggcctgcccaccgacatgcccaaggcctggttcgtggccctggccgcgctgtccaagtcggccaccccggagcgcgtgcggcagaacgccaccgccgaccatgcgctgatcgctccggccatccgccccacctcgcgacgctag

SEQ ID NO: 352552 - DNA, 1455 bp, Pseudomonas aeruginosa
atgaccgataccggcgttgtccctaccatcctcgttgtcgacgacgagttgcgctcccgcgaagccctttcacgggtgctcgccgacgagttccaggtgctccttgccgaatcggcggagcaggcgcgcgagcagctcgaacagcacccggtggcggtgatcctctgcgaccagcgcatgcccggcgtgcagggcatcgacttcctcagggaagcccgcgagcgctggcccgaagtcgtgcgcatcgtgctctccggctataccgactccgaagacatcatcgccggggtcaaccaagccggtatctaccagtacctgctcaagccctggctgcccgagcacctgctcagcaccgtgcgcaacgccgtggagagccgcgcgctgaacaaccatctgcagcgcctggacctggacctgcgcgccgccaccccggtgctgcggcggcgcaaccagcaggcgctggacaaggtccgcgaggccttcgacttcgcgcgcatcgtccgcgccccgggcagcccgctggatgccctgtgcgaactggccgcacgggtggcgcgcttcgacctggcggtcctgctgctgggtgaatcggggactggcaaggagctgctggcgcgcgccatccactacgccagcccgcgcgccggcaatgccttcatcatggaaaactgcgccgccctgccggactcgctgctcgaatccgagctgttcgggcacaagcgcggcgccttcaccggcgcgcaccaggaccatatcggcctgatccagcgcgcccatggcggcacgctgttcctcgacgagatcggcgacacctcgccggccttccaggtcaagctgctgcgtgtgctgcaggaaggcgagctgcgcccggtcggcgccaccaccgcggtgcgcgtcgacgtgcgcgtggtcgccgcgacccatcgtgaccttgaagccgaggtccaggccgggcgtttccgcagcgacctctattaccgcctggccggcgtctcgctggccctgccacccttgcgcgaacgcagtggcgacctgctgccgatcgccagcaaactgctcgccgatgccagccaggaactcgacctgcccggcctgcgcttcgccagcgatgcactgggcagcctgctcggctacccctggccgggcaacatccgcgaactgcgcaacgaaatctaccgcgcggcggccctctgtgatggccaggaagtcggcgcccgagcgttttcctggaaagtcctgcagggccaggcacgcagtgcactgcccagcgcggcacctggcgagcgcccggccggcaccctgcaggagcagctcgatgccatcgaggccacgctgctgcgcgaggccctgctgcgccatcgctggaacaagacccacaccgcgcgcgagctgggcctgtcgcgcgtcggcctgcgccagaagctgcgccgcttcggcctggaggaaaccccatga

SEQ ID NO: 352553 - DNA, 393 bp, Pseudomonas aeruginosa
atgaagcatctgtttcgctgggcgatctggctcgctgtcgtcgttgcgctggtacagacggcgcgccatacgctggacatgcgcagttggccgaaaccccaggcccgggtcgtgcgcacggaagtggaagagtccatcgacgacacccgccccaggtcgcagagcgagcgcgaacgccagcggcaacgcctgtaccctccgatgaagtatgtggccatcgtctactacaccttcgatgccaacggcatgcgctggaccggtcattcgcgcggcagccggtacagcacccgggacagcgccatgggccaggccgctgagttcccggccgggcgtacggtttcggtgatctacaacccgaaggaccccagcgacaccgacatgaaattctggtga

SEQ ID NO: 352554 - DNA, 1275 bp, Pseudomonas aeruginosa
ttgctgcgctatcaccgggtgcggcgcaagttcgaactggaacggccaagcggaatctccggactgattcccttcctcgcctcggtctgggtcgcggcaatcctcctcaccctgttcaccggctacctatcgctggcttacttcctcaccgtcaagctactctggatcagcgtggtcgcgaccaccagctacttgctgatcgccttcttcggcgacatctgcgagacactactctcacccaagcaccccagcggcctggccctggccaacgcgctcggcctgtcgccgcgccatcaggctcaggccagtaccgttctggccggcatcggtcgcaccctgctgctgctcgccgcgttgctgctggccttcctacccgccggctcgaaccccagcgaactgctgcagggcttcacccaactaggcgaaagcagcaagagcctaggcaacctgaacatcgtcccacaggacatcttggtcgccctactgcttttcgtcggcggcctatttgccctgcgcatcgttaagcactggctgagcgagcggctgctaccggaaacgaacatggatgccggcatgcgcgcctcactggtgactctggtcggctacctcggctttgtgttcctggcgatgctggtgatgtctgccctgcggatcaacctgaccaacctgacctgggtggtcagcgccctctcagtgggtatcggcttcggcttacaggccatcgtgcaaaacttcatctccggactgatcctgctcaccgagcggccagtaaaggtcggagactgggtcagcctgggtggggtcgagggcgacatccggaggatcaatgtgcgcgcaaccgaaatccagatgtccgaccgctcgacggtgatcgtacccaactcgcagttcatctcgcagaacgtgcgcaacgtgaccatgggcaacgccctcggagtggtcggagtcaacctgacactgccgttggacaccgacgtgatgaaggtccgtgagctgctcttgcaggcgttcgccgagcaccaggcgatcctcgacgcgccggtgccctcggtgaccttcaaggacctcgctagcaacggcctggtcctcaccgccaccggctacgtcaacagcccacgctcagtgtccggggcgcgcagcgacttgctcttcatcgtccttgatcggctcagaaacgagggcatcgcgctgtcctcaccacagagcctggtgatgatccaagatgttgaaacggccgaaacggccctaccgtcacagggccaagcctataattga

SEQ ID NO: 352555 - DNA, 1158 bp, Pseudomonas aeruginosa
gtgagacctgtggctatgagaaattcacgacgcatcctgcaagggctgctctctctggctgtcgctacaagcattgctggttgtggaggggaggggcaggcaacggccggttcagacctagaggtaggggtatacaaggtgcaagcccagactctgaccctcacgcgtgatctaccaggtagaacagtggcctaccgggttgcagaggtacgcccccaagtctcgggaattgtcgagaagcgtctgttcatcgagggcaacgaagttaggcagggacagcagttgtatcaggtcgatccgcggacctatgaggcgcaattggccagggccgaagccaatttgatcacgacggagaacctggctcgccgttatgggcggctattgcaagctaatgccgtgagcctgcagcagcatgatgatgctgtggcgaactggaaacaggcacaggctgaagcgcgggtggctcgtattaatgtccaatacaccaaggtgcttgctccgatctctgggcgtataggtcggtctaccgtgaccgaaggtgcgttggtcaccgatagccagacgcaggcgctcgccactgtgactcaactggaccctatctatgtcgacgttactcaacctgttaccaaactgctcggcctgcaacaagcactggagtcaggacaattgcagggcagcgatagtgaggctctggctcgggttggcctgatccttgacgatggtagtcgttatccgctgcccggtacgctgaagttttccgaagtgcatgtggacccaagtactggtgcagtcactcttcgcgccgagtttcccaatccccagcgcaagctgctacctggcatgtttgtgcgcgctcaactggaagaggggactcgcaactcagcattgttggtgcctcagcaggctttgctcagggatgccagaggagcgccctacgtttggctggtcaggaaggacaacaccgtagagcgacgcgaagtacagactcttcgcaccgttggtaatgcctggttgatcgaacagggattgcaggagggtgaccggatcgtagtcgagggggtgcagcgtgcccgtaaaggtatccgggtccagcctgtagacgcatcgaatgtcaagttggccctcagcttcggtcagcaaacagttaccgtgcactga

SEQ ID NO: 352556 - DNA, 3138 bp, Pseudomonas aeruginosa
atgtcacgttttttcatcgaacggcctattttcgcctgggtgttggccattgtcgcgatgcttgccgggacgctgtcgttgctgaacattccgatcagccagtatccgaacatcgcagcgcctgcggtatctatccaggtgacctatcctggcgcctcggccaaaacggttcaggatacggtcgtgcaggtcattgagcagcaacttagcggtctgaatggctatcgctacatgtcggcggaaagcaactccgacggtagcatgagcattatcgtcaccttcgagcagggcaccgaccctgacatcgctcaggtgcaggtgcagaacaaactgcaactggccactcctcgcctaccggaagaggtccagcgtcagggcttgcgtgttgtcaaataccagcagaacttctttctgttcgttggactggtggataccaccggcaagatgaacagttctgacttgagcaacgtcatcgcctccgacctgcaagacccaatctcgcgtgtcgatggggttggtgatgtcctgctcttcggctccccctatgcgatgcgcatatggcttgatccgaacaaactgaatagctaccaactgatgccctctgatgtagctaccgcgattcgcgagcagaatgtccaggtgtcgtctggccaattgggtgggctacccacccgcagcggtgtccagctgaatgcgacggtaattggcaagacacgtatgaccactccagaagagttcgaggaaatactggtcaaggtgaatgccgatggctcacaggtgcggctcaaaaatgttgctaccgtggaattgggggcggacaatttttctttcagtacccaatacaatggcaaggcttcggccggcttggcgttacgactggctccaggtggaaacctgctggagacggccaatgccatcaggggggtaatagagcagcaaaaggcaagcctgccggacggtgtagaagttatctacccgtatgacactacgcctgttgtcgaggcgtcgatcgagtcggtgatacacaccatcttcgaagccgtcgtgttggtgttcattgtgatgtatctgttcttgcagagcttgcgtgcaacactgattcccaccctggcgataccggtcgtgctactggcggcattcgcggttctgccgctgttcggggttggcatcaacaccctggccatgtatgccatggttctggcgatcgggttgctggtggacgatgccatcgtagtagtggaaaacgtcgagcgcctgatgcatgaagaagggctctcgccactggaagctacccgaaagtccatgggccaaatttcaggggcgctggttggcatcggcatggttctgtcggcagtgttcgttcccatggctttcttcggtggttcagctgggatcatctacaagcagttcgccgtgaccatcgtcgtgtgcatggggctttccgtactggttgcgctgattttcacgccggctctctgtgccactattctcaaatcaccgaaagtgggggggcacgttgagaagaaaggggtcttcggctggttcaaccgctgtttcgacagtaatacccaacgctttgagcgcggcgtcgctgggatgcttatacatcgcggtcgctatttgttgatatttctgttgatcactattggcaccgggtatctgttcagcagaattcccagtgctttcttgccgggagaagaccagaaggtagttttcgtggaggtgcgtatgccagccaactcttccgcggagagaacttcggcagtgctcgatgaaataagacgctatttgctggaggaggaaggtgacgtcgccagttccatcctgacggtcaatggtttcaattttgctggccgggggcagaacgcagggatagggttcgtaatgctgaaggactggaaggaaagaacaagaaaaggacaggacattttcagtttggtggaaagagccaatgttcatttttcaaaaatcaaggatgcaaccgtattggctatcgttccgcctgcgattcttgaaatgggcaatgcaatggggttcgatctttaccttcaggacagggcgggcctcggccacgaagccttgatggctgcccgtgatagattcctggaactcgctcaagagagccctgtattacaagcggttcgccctaatggcaaggatgatgagccgcagtatcgggtggacatcgacgatgaaaaggcgcggacattgcaggtcagcattcagtcgatcaatgacaccatgtccgctgcctggggctcgttgtacgtcaatgatttcattgatcgggggcgtgtgaagcgtgtctatctgcaaggaaatgacagttcgcgtatcggccctgaagacttcgataagtggtatgtgcgcaatgcgctggggcagatggtccccttctcggcatttgcctcgggagaatgggtttccggctctccaaaactagagcgctttagcgggatatcggctgtacagatactagggcagcccgcatctggatacagcactggggaagcaatggtcgccatttccgagatcatgaaagcactgccaaatggaatttcgctgagttatagcggattgtcctatgaggaaatcaagacaggcaaccaagcacctatgctctataccttgacagtgctgatagtgtttctttgcctagcggcattgtatgaaagttggtcggtgcctattgccgttgttcttgtagtacctctaggtatcttgggggctgtcgtggcgaccctttggagagatttgacggcagacgtttactttcaggttggtctgatgactactgtcggattgactgcaaagaatgcgatcctgatcatcgagttcgccaagagcttgtatgagcaggaggggaggtctgtcgttcaggcagccgttgaggcatcgaaattacgtctacgtcctatcttgatgacatccctcgcattcactttcggcgtattgccaatggctattgcatctggggcgggctctggaagtcagcactcaattgcgaccggtctggttggtggcatgatcagcgcaaccattcttgtcgtgttcttcgtgccgctgttcttcgtactgatcgtttcgttgttcgaccggtacaagacatccgtttccagtacgggagtgcaggcatga

SEQ ID NO: 352557 - DNA, 429 bp, Pseudomonas aeruginosa
atgagcaccaccctgtattccacgaaagtcactgctgttggcggtcgcaacggcacgatccatagcgatgatggcttgcttgacctgcaactggcgctgcccaacgccttgggcggcaagggtaacgcgaccaaccccgaacaactgtttgccgcgggctatgcagcttgcttcggtaatgcggtcatccatgtgacgcgcaataaggaacaaaaaatcaaggatgatgatgtggaggtcagtgctagagtaagcctcgttcccaacggcagtggtggtttcgctctgagcgtcgcgctcgaagtgatacttgccggcgtcgatcaggcactggccgaagaggttgtggcagaagctcacagagtctgtccgtattctaatgcaactcgtggcaatatcgacgtttccctctcaattacaactcgctga

SEQ ID NO: 352558 - DNA, 546 bp, Pseudomonas aeruginosa
gtgatcgccgatgccaagaccaaggtctatggcgacgccgatccggcactgacctaccaggtttccgggctgaagaacggcgataccgccggtgccgtgctcaacggcggcagcctgagccgcgtggctggcgagaacgtcggcgtgtatggcatcaaccagggcggcctgggcctggtcagcgcgaactacgacctgagctaccagggcaataacctgaccatcaccaaggcgctgctgaatgtgatcgccgatgccaagaccaaggtctatggcgatgccgatccgagcctgacctaccaggtcagcggcctgaagaacggcgacagcgccggtgccgtgctcaacggcggcagcctgagccgcgtggctggcgagaatgtcggcgtgtacggcatcaaccagggcggcctgggcctggtcagtgcgaactacgacctgagctaccaaggcaacaacctgaccatcaccaaggcgctgctgaatgtgatcgccgacgccaagaccaaggtctatggcgacgccgatccggcactgacctactag

SEQ ID NO: 352559 - DNA, 939 bp, Pseudomonas aeruginosa
atgggctggcggatcggggggctcggtatgcatgagccgtgcgagttggaaggcgcaacctccagcgcctcttccagagttcatgcaattttgcatcgacggttgcaagaagctgcggaacgagaggtttcaaagggcgccatacaagccgaagttgaacgcccaagcagcgtggccccgccatctcaatttcaattcccctttctgccggccatggcatcagcgatgccgacgcagtggactaggactggcttgttttcaaatcttaagaaaggagaacggagaagcttgaagaatcaagtacttgaagggcgatctgattgtttagtaagaatgtcaggcgaagagttagatatgtatgacaatgatgtttttttgcatacgattcagttggctcaaggtacatttccaggtgaaaggatatatttcgaacgctcatcatttttgcgtgcaattgggcgcggaagcgatctgtcttcagatagctaccgacggcttcatgagtcaatggagcggctcacaagtgctaccatatttgtgcagggccaaatggggggtgaaagctttaggttgatagaaaaattaagatggggcgtaagtgggcagtattccatagagatggatgcggagattgtttctatatttgcaaatgaatttcttgcgtttattgatatggatgttcggatgaggttaaaaaaccctttggcaaaatatcttcaaaattatatagctggtcataagattggggagcacggaatagcttgtgacaagctcagagtatggagtgggtcgcgagggcgtccacgggacttcagctgtcgggcattaccgaatgccctgggcgaattggagggtgagggcgtgatcaaagattggttgatcggagacgatattgttcgttgggtacggattcctcacaccaaaagcaggaggtcttga

SEQ ID NO: 352560 - DNA, 300 bp, Pseudomonas aeruginosa
atgagcctgcgcctggcaccgttgccaggcctcgataccgccctgcttctcatgcagggcgagatcctggagcacgcggcactgatgatcgaatcagcgaccgccagccgggaggagatcgaggagctgcgcatacgagcagacgaatattgcgtcctggccgactccggccgtgtcgctttggtccctggtactggtgcgaagctccgcgccggcgccgatgagctgaaggccttgattcgtgactggcgtgcagcgaaggcagagttggctgaggagatcgctgatgaacatgtttaa

SEQ ID NO: 352561 - DNA, 420 bp, Pseudomonas aeruginosa
atgaaaatcaaaagtgccctggtagctatggcctttgccgcgctcgttggttgcggtgaatcgaaagaaaacaaaattatgccgaaagaggccactactgatgccgtctacagcgaaaaggcatcgcagtacctggaggaagcgctcggaacgccaaaggcgaaacgaatcgaactgaccttctggaatgaagcggcgaaccctgacactggctatctgtcgctagtggttgatggtgtagagaaaattcgaccgatcgataatgtcggtggatacagtgccgcgacctctaaaggttttaagttcgtttatgaagctggagcctggaaagcttatgtggcagaagctgaagccaaaacccacggcgagcacccgcaggaattcttcagcaagacaactggaatacttcgtaaatactag

SEQ ID NO: 352562 - DNA, 192 bp, Pseudomonas aeruginosa
atgcagcttaaagaagccaaagtaaaaatcccccgcgctatcggcattggcttgattatttatttcggccttgtagtgccgggtcgcgaggttgacaaccgtgcctatccagtttcacaagataatgcctttgagtatgaaactccagttccgcccgtgtactcgcccgaggtgaattatgagcaaaattaa

SEQ ID NO: 352563 - DNA, 1425 bp, Pseudomonas aeruginosa
ttgactactgttatctctgagattgccgagcttacagaaactcagaagctcactgagatcatcgatttggatacaggtctgtcaattgacctgcaatcgtttgtctgcaggcatgacagggaggttgtaaaagccagaaatgaacttcgccgaagatatctagtagatccagaaagcccatggcttgcttgtgagttatgtggcgcagccgtccagttgatttgtcatacggatcgcaaatattacttcaggcatatgccagagcaagagaatcgtggttgccctgtaaatacaaagaacaatctgacaccagatcaaattctggctgcaaaatataatggggctaaggaaagctacgctcatcagcacctgaaaaaaattgttcgggatagcattatcgctgacccgaatttttccaatccgcgcttagaaaagatttggaggtcaagtaattttcttgagcgggcttcatggcgaaagcctgatgttcaggttgagatgaatggtcgtaagcttgcatttgaaatacagttatctacaacttttctcagcgtaattgttgagcggcgggagttttaccgcgctgaaggtggttcattaatatgggttttccagtcttttgatccgtctcaaactaggcgggcagaagaggatatattctgcaacaacaatatgaatgtctttgtggtaagtgatgaaacacttctacggtctagggataataaaagattctcgatggactgttggtatccggttccatcttataagtatggcttgcttgtgaacgagtggcagagtgaaaaggtttttgttgatgagctgactttcgacattgaaaatcagcgggtatatttttatgattatgaaagctttctcgctgatgtggagtcaaagcgggtcaaggaagagactgctcagcaattagaacaattgcgtgagcgcttcgagttattttggtttagtgagcggctaaggtacgattcagatacgccgcatcaagaagtgaaagaggagtggagcgcttttaagcgggagttgagggctgctaggtttttgggtgttttgccagatagccattggtcgcctcctttttatagtgtcatttcactgatgttgagcgcaaaatatggtaaaccagtagggtacggttttaagacgctgctggaagtgactaatcttgcattcacttcatataaaaaattccttagaccttttggcttggcacttcattattatggggctgataaaactctagatgaacaagatcggaaaggaacctggaggaagcggagggagatcatacggaatgcgatgaaggagagtaatccggaatataaacagtctgttgagtataatctgtccattgctttccttcttcccagaatatctgataaattgaatcctttaaatttaaataatagatga

SEQ ID NO: 352564 - DNA, 351 bp, Pseudomonas aeruginosa
gtgagtaagcttgcagaattcaaacgtcttgaagctcaactggcagcgcagttacagcaactggatgcactgaagaatgatgctgaactgaaaaaagaaattcagttcgaggaaaagctgcgggcactgttagctgagtacgggatgagcttgagagatgtgattaacatccttgacccttcccctcgctccactcctgccgttgtggtgcaacgccgccagcgccaaattaagatctacaagaatcccaacacaggtgaagtcgtcgagacaaagggcggtaatcataaagtactgaaggcttggcgggagcagtatggagttgaagctgtggactcctggctgcaataa

SEQ ID NO: 352565 - DNA, 558 bp, Pseudomonas aeruginosa
atgatcatttttgatccccttcgcgattttttccaccgacgccaagccaccaagctgaccgagcaagcctcggccgtccagctggtgatcgagcgctccgaatctctacgcggcaacttcgtttttccgggccccgacatcacggtcgcaatccagctagatggtcagcgcgtgggtcgggtcaattacggtgtgagtccgctcaacgaccgggtgtacatcagcgactttcatatcagccccgcacatcgccgacgcggtatcggcctggccgcgctctggcggctgtggtgccagtacctagtgccattgacccccatgcacgaggttggaacctccactgagttttgggctaaggtgcgcaaacgattcgccggtgccggtgccgaactcacacgcgacattcgcacctctgaccaagatgctgaacagcagcgctggctgtatctggtaccggagcctgagcatgaacggctaattcgggaactagaggcatccccggaatggccgtccatcaaggccgaactgaagatgagggaaaacaataaagggcgctaa

SEQ ID NO: 352566 - DNA, 729 bp, Pseudomonas aeruginosa
atgagcctgggcgacgacagcatccagagtattttcgacctggtgagcgagctgcgaacgctgatcgtccgcctcgacggcacacctacacaacctggtgtgattgctgaaaccgggcagctcactcgctcgatcgcggctgcagtcgaacacatgggggaactggccgaacgctttgcggccgcagccgatctgcatgcccaacttggcaatctgccggcgcaattgctacggccggacaagtgcgagagctttcgcggatcggtgcgcgaggcgatgaccagcgagctcgcatccgcagtcgagtcagcccgggaacgagcagcggaggctggtgtttccatcgccatcaacgatcttagagagttgattaacgaggcgatgaaaaaagcagaattcgaagtttttggtgcggaaggctccagggcagatctgttttacaagctgaaaaagtccgagtcagagatcaagcgcctcacgatcctgattgagaaattgtcgggcgatctacagcgcatctcgtcgttacacagaggcgagctgaatgaccgcgaagacaagacccaggggctgctcgcggctgcgcaccaaagcggccgaaactggtcagtgacctgtctcttgatcgggctacttttcggcggcgtgttcggatccggatacctcgcaccaaagtttcaggcgtgggcagcagagctgatctacaaaccgattcatcaagggcgctga

SEQ ID NO: 352567 - DNA, 792 bp, Pseudomonas aeruginosa
atgattcgaattctctgcacctcgaccaaaggtggcgtcggcaaatccaccatcgcccagcaggtggccacgacatatctcctagatcgcgagggcactggcacgctgattgagctcgacgaccagaacgtcgactcgcgctggatgaaaagctcgaaaatcgaatcgcgtcagatagtagtggacggcgatgccggctttgccgtcctcgaccttttcgaggagttcgccggtaaatctttcgtgctcgacatcggtaatcagactgcggaggcggcgcttgccgccatgggccgaaatggccttctcggccggttcgatctgatcctggttcctgtcaaggacgtgggtcaggacgtagagaatgcgaagcgcacaatcaacaaaatccgtgaagatgagccctccgcgaaaattgttctggttctcaacgggcttagccgcaagacccaagacccgaacgaccgccgcatccgggctctgtacggtgacgttttcgacctcggcgaagatctcgatgtaccggtcctcataatgcccggcgtcgagggttacggcttgtcgcgtaatttcggcaaaaccctgccagaaattgccgacggcgccgatgatctgattgctcaactccgagaaaaaagcctgaccctcgatcgtaaggggaacggcaaggaagctcgccgctgcatggtgctggtcgaggtagtggcgatcgcgaaagaagccagcacctggatcaagcaactgcatggcaagttcgacgagctccggggagccgaccaggaggccgcatga

SEQ ID NO: 352568 - DNA, 570 bp, Pseudomonas aeruginosa
atgtacgaccaacgcactgacgccgagcgcgcccgtgatgagaaagaagagctggagtggatccgcatgcagcaggaagaggccgaccggaaaacggcggcattgaaggccgagctggagcgcatgaaagcagccgcacaatcaggcagcggccagaaaaacgtgagaggaagcgtcacgaaagctctgctcccgcgaatcgacatcctgcgcgaggcaacgcgtttaggcacgcccattacgcagcagcaggaaatgctggaacgagccgggatcgtcgtcagctacaacagcctgcggaaattcatccaaaaattcctggctcgtgaatatcgggagtttctggcgaacgtccggactacaggtgccgaccctgattttgggcgcgagctacaccctgacgtaatcgagaggaacaccccttctgaatctgtagcgacaactgcagcaactcaagaaaagaccaccccgcctgcaaaccaggcaccggccgccgcggaccaggcgagacctgaaaacgtgaactcgctcatcgagcaggtgctcgggcgaaaagaccactcaagttag

SEQ ID NO: 352569 - DNA, 1422 bp, Pseudomonas aeruginosa
atgccgcctgagtacgatctcttcgcctacgccaggagctccatcactgcgccggccggctgcggcaagacgcaaatcatcgccgacacgttgacgatgcataggggccccaagcccgttcttgtcctgacccacaccaatgcgggcgtaacggcgctgcgactacgcatgcagcgcgggaatgttccggcctcggcctaccgcatcgccacccttgatgggttcgccatgcggttggtggccatgtttcccatgaggagcgggttggctgctgatgtcctcgagcttcgcaatcgcgctgacgactatcccgccattcggttggcggccaatcaactgattgtgagtggccatattcatgacagtcttgcggcgacatacgcctttctcattgtcgatgaatatcaggactgcaacattgtgcagcacgcgttcgtaactgcgctcgctgctgtcctgcccacttgcgtgcttggtgacccgatgcaagcaatcttcggcttgggtgacaatgtggttgtggactggaatgctcatgtccttcaacaattcccccaaataggtgaactcaatcaaccctggcgctggatcaatgccagggccgagccattcggacgctggctgttggaatgccgtcaaactctacaggcaggcggcaatatcgacctccggcagataccgccacaagtcacctggattcgtctgcaagatgccacggctcgacggcagcgcgcggcggcagcgatgactccagcgctcacggcaaccggccaggtgttggtgattgcagatagccagaattccagggggcgccacgagatggcacgccagacgcatggcgccaccaccgttgagccagtagagcttggcgacttgatcgccttcggagccgcgttcgaccttcaagccggcatggcattgacgctcctggtgaattttgcggccagcgtcatgacgcaggtatcgccatcgacgctagtgcccaggcttgccagtttgctgcgtggcactgcacgaaacccgccatctcctgcggagttggcgctccagacctttgcagaagcgcccagctatccgcgggcatccgatgcactgcgcgctctgcagactcaacgggatgctcgagtatttcggcccgatgtcttctacggatgcctgcgggccctccagatggcaggcagcggcacatgcagctttgccgaagcgacggcccgcgagcgggagcgcaaccgccataacagccgcccgttggcgcggcgtgccatcggaagcacgctgctgctcaaggggcaggaagcagaagtggcggtagtactcaatcctgaatccatgaacgccaagcatctctacgtcgcaatgacccgaggggccgcacatctggtcatctgctcggagacaccggttctgattccgcggccataa

SEQ ID NO: 352570 - DNA, 1299 bp, Pseudomonas aeruginosa
atgatttgcattgagtgcgttacaccggagcctctcaaaaagctgttcgatacgcacggacaggaaggtgactgccagtactgccagcgccacgggaaggctatcgagtcccgggtgctttttgagtacgtctatgaccgtgtcagagagaaccttgcgcaaagggatgacctttcgcatttcgagctgggcatgctctatgagtgcgggtccgacaaaattgccatggcaggcattgatgaggttttgagtgaacggatgaagcttggggaggagaggtatttcgatttgctggtcgatggagttcctgaagagttcgtggcggatgatgacgggcacgaagtccatttctttgacgatgatgggacgttggaaaagaacgtctacgatgaggaatgggatgcgtttgtttcaggagttcagtacacgcaccgcttcttcaatgcgaatgccaaggagttcctcgattctgttttttctccgttggtcaccaatgacgatgcgctcaagcctgaagtcatccggaccatggtccatggcgacttgctgtaccgtgcgcgctacgtcaaagaattcggagatgcggacaaaatcatcaaggatccggctggccagttcggccccacaccaaggtttctggcaagcagtcaaagaatgacgccgaatggcatttccgccctctattgcgcgctggaacgggagacttgcctgagcgaaatccgctccattaccggggacaatgtggtgagcgcggcgctgactccggtcgcggaactgaagctccttgacctgacggtgctaaaccgggtggaatccccggagctgtcacctctggatgtggggtatcgtaaggcgctgcatcgcaaagtcttcctgggctcgctggtcaagaagatgtcccggcccaaggctcgcaatgatgaactgagttatctctcgacccaggtcgtgttcgagtacctacggctgcgcttcggcgagcaggtcgacggattggtcttcccatccgtgcagacgggcgaggcgggtaccaacgttgtcttgttccccgaggccagccgactggcgtacatcctgccggcgggagccgaaaaggacagatttagcgacgagcccgcacctgtccaggtgccaatcgacaagggtagccggctcaagccacccaccaaggtcatggtcgtgcacgactctgtccggtttcacaaagtcactgcgattgagacccgggcccgtgagtatcatcacatctgcgacctcttcatgagcgacgagacgcgtaggcgtctgaacttgaactag

SEQ ID NO: 352571 - DNA, 1419 bp, Pseudomonas aeruginosa
gtggtgagttccaaccctgggcaggccagcagcaacactcggctccagtccgggagaaggccgagccgccgtcaagcagcgcggcatcgcctgttcggcagcgacctggcgcacgagccgcgccggccctacgagcgctacgactatcccggccgctacaagcgcgacgaagccggcaagcccttcaccgagaaccgcctgcgcggccatcgccgcgatgcccgcatcgccctggtcgagggcgacgacccgcggctgctgcccggcctttcctttgacctggacgggcacccgcgggacgaatggaacagcggctggcgcccggtgcgcatgcgccaccacggcgtccagcacaccagccaggccgaagacggcgccgactcggtccagggcacccgctacggctacaccgccgaactggtcaccgaccgcaccgagtggcgcgccgaaccgctgcccaagccgcgcatcgacggcactcagccggccaccgtggtcggcccgcccaacgaagagatttactgcgacaaatggggccgggtgaaaatccagttcccctgggaccgcctgggcaacttcgacgaccacagctcttgctgggtacgcgccgtgcagaactgggccggcgcagcctgggaccacatggccatcccgcgcatcggccaggaagtgctggtggtcttcatgaacggcgaccccgaccagcccatcatcgtcggccgcaccttcatggccacccagcccccgccgtacgaactgccccggcacaagacccggatgaccatcaaaagccagacccacaagggtcagggcttcaacgagttgcgcttcgaggacgaggcaggtcaggaagaggtcttcatccacgcccagaaggaccagaacaacgtcgtcaacaacgacgaaaccactcaggtaggccacgaccgcagcgagcgggtggaaaacgacgaaaccgtctccatcggccacaaccgcaaggaagacgtcggcaacgacgaaaccatctccatcggtcggcaccgcaaggaagacgtcggcaagaacgagaccatctccatcggccgcaaccgccgcgtcaccatcggcgggcacaagaccgagaccatcaccaagaccaaggccgaatccatcggcctggcgaagttcctcaccatcggcgcggcctaccagaccagcgtcggcgcggccatgaacaccaccgtgggattgagccaatccgagcaggtgggcatcaacaagtcggtcatcgtcggcaagacctacagcaccactgcgggcgaggagttctccctcacggtcggcaaatccagcctgatcctgaaagccgacggcaccgtgctgattaacggcgtgaagttcgacttttcctcgtccgagcacacgcagatatccagcaaggtcgtcgacatcaactag

SEQ ID NO: 352572 - DNA, 561 bp, Pseudomonas aeruginosa
atggctggcccccacccactcaatcaggctgtgattgcgcaagtgctgcacgacttgcgcaacggacagctgcgccgcgcgaaatcgatgggcttcgaagacgatgacctcaatgccctcaaggaccccgccatggtgagcttgctcgccaacgccatggtcaattggtgctcagtcatggtcaaccgtgacgttctgcgatacctcctaagacaggtcgatgacgatgcacggcagatttttgaagtcgaccggatgctgcgcctgggggccagtactgaaatgatcagccgcttcttcggcctgacacaccaggagacggccgtccggagaagtgtgctcggattgccaaaaagacgcggccgccaccccgtgctcactgaacagcaggacggtgatctgtggcgaagttggtcacggaccctcaaggacagaggcattgaccatgaagatgatgggggcatgctatcgattgcggccgatctcgccgagtccaccggactgccattgtcggtcgtctggtccgcgatccgtggatggctggatgaaggactcagctga

SEQ ID NO: 352573 - DNA, 1725 bp, Pseudomonas aeruginosa
atggctgacttctccgcacaagagatggcggaaaagctgctggtggatggatttacgccaggaacttctgccgcatcggagctctctgatcccatcgccgacacctatgtggtcgtcacactggacgaacttcgaccgtatgaactcgacccgcggctaaccaagaatccgcgctacgaggaaatcaaggcgtccattcgagagcgcggtctggatgcgcccccgccgatcacgcgtagacccggcgccccacactatgtcatccgcaacggcggaaacacccgtttggccatcttgcgtgaactctggacggagaccaaagaagaacgcttcttccgagttggttgcctgttccgtccgtggcccgaacgcggcgaaatcgtctcgctgaccggtcacctggcagagaacgaactgcatggcaggctatcgttcatcgagcgcgcgttgggcgtggacaaggcacgggaactctacgaactcgaactcggtaagccactttcccaatccgagctggcacgtcgcctgaagcaagacggctatccggtaccccaacctcatatcagtcggatgcaggaggccattcagtatctactgccggcgatacccaatgtgctctatggcggtcttgggcgacacctggtcgaacagctcaccagcctgcgtagagccggtactcggatttgggaggcacgcgcggccgcgagccggcagtcgatggactttccatcactgtttcaggaggtactcctacctttcgatgccgctcctgtggccttctccgtgcaacgcgtgagggacgaacttgtggggcagatggccgagcttctggatatgccctacgacaccttggcgatggagatcttggaggccgagaatcgctggcaactggtcaccagtgaccctgaaccacgaagctcgaccccagtccctggcgtggtgccccccaccggtgtagcgcccgagactgatgctccgacggcaggactccgcgatccagagcttcctccggcgggcgccgcgctcgctgacccgagttcatcgcggccgaagcaacgccagtcggagaggcaccaggcgcaatcagaaggcgagcaatactcggagggggataccggcgtccaacacgcgaccactggcgttgaatcatcaggtcgactggcttcactacaacgactggtagccgagcaccttggcgaagccacgtcggacgcgggctgcgtcggagtgaagaccattccgatgcaagccgacggcctgtatccgataacggatgtctggtacatcgaaccagccctggacgaaccaaagcgcctgcgcatccatatcgagcagttcgcgcgcgaaatcgccgaggaagctgggcagtcccacgccatcggccccagcgacgaggggatcggctttacttgcgatacgccaccagacagcagtgcctctagcttcggccgggctttggtgtcgttgctagcagctttgagcaaccctgacagcgcaggcttgaaggccgaaggccgcgacgatggcgaactgttggttcatgcccttgctcccatgcttcaggggggatcagccgcgcatctaacgacgcgtgactcaccaacccgcatcagtgatgccgggctgatcaagctgttcaggatgctacggcttgcgcgccgactcgtcgacctcgaatccggcgcagccgccgtgcgtggcgatagcgccattccggaacaatga

SEQ ID NO: 352574 - DNA, 276 bp, Pseudomonas aeruginosa
atggctaacgtgcacgagctctgccggggacacaaacaactcctgccgctcatcgagtatgccctcagtgaaggttgggcggtcagtcgtacgcaacggggccacctgtgtttcgtgaaaccgggacttccaccgatttataccagctcaactggaagtgaccatcgtgcacggcgcaatgcccaggccatgctcaagcgtgcgcagcggctagccgacgccaacgtcgaagccaattttccaagtgcggaacctgagggggacagctatggctga

SEQ ID NO: 352575 - DNA, 855 bp, Pseudomonas aeruginosa
atgcgggtcctttccgtggtatccaccaaaggcggagttgggaagaccaccgtggcggcgaacctgggaggcttcgttgcggacgccggcctgcgagtgctgcttatcgacctggatatgcagcccaccctgtcttcctactaccccctcgcacatcgcgcgccgcatggcatatacgaactgctcgccttcaacgagcgcagccatgacttgctggtgtcgcgcacccaggtaaaccgccttgatgtaattctctccaatgacgggaaccgtcaactcagcacgctgttgttgcatgcgccagatgggcgactgcgattgcggaacctactcccggccttcgaggcacactacgacctgcttctagttgacacacagggcgcgcgaagcgtgatgctggaaatggccgtcctggcctcggacctgagcatttcacccgtcacgccggaaatcctctcagctcgggagcttagacgcggcacattgcaattgatggaggacattgctccctatcgccaattgggtgtaactcctcccccgctacatctgctgattaaccgagtccctgcagtctcggccaacgcccgtttgattcagcagacattacgcaaactcttccaggaacagtcaggcgtccaaatactgcgtagcgaagttccggccaatgaagccattcaccgcgcggcagtaaaggggctccccgttcaccgcgtcgaaacccgtcgtccaagcgggcgtgtggcgcctgccgcactgcaagtgatgcaggggctggctggagaactcttcccgcagtggcagccgctgttcgaccaagtgaccggcaaagccagtcaggagatcgcccatggctaa

SEQ ID NO: 352576 - DNA, 219 bp, Pseudomonas aeruginosa
atgttgcagaagaatgagctggataccccagcgcccgaacgtcgctttctgcggcggcctgaagttgaagcaagaactggcttcaagcgtgctcatatctataacctgatgcaggaggggaaattcccgaagcctgtccgggtcggaattcgcgctgtcgcctgggactcactcgaaatcgaccagtggcttgctgaccgcctgcgggagcggacctga

SEQ ID NO: 352577 - DNA, 900 bp, Pseudomonas aeruginosa
atgaacattcgtcagttgcagtatttcctcgttgctgcagaagaagagaacttctctcgctcggcagacagagtccacatccaccagtccgccttatccagagcgataaaggatctagaagcggagctcggcgtatcgctgttcgagcgcggaaagggacgcacacgactgacttggccgggaaaggtgtttcgtgaagacgcccagcgactgctgtcgttcctcagcagcgtacgtgcaagaacgaaagcagccgagcttggctaccgcggctacttgcgaatcgcactgaccgacgggctcgcccagcctcgcatgaccgacctcctggccaagtgccgcgcagaggaacccttgaccgagatcaggctcgtggaaatgaccgtcagagagatgcggcaggccctcaattccgaacaaatcgacgcggggttcacaatccatgacgatttcgatgatttcgacctagtcaaacaccccgtctgggctgatcggctggtattggccatcccatcacatcacccattggtggtccgggacaaagtaccgcttagcgaagccgtccagcacccgatgattgtttgccacccagagcggtgcgaaggtggacataacctgctcagcaggatattccgcaacgctcaactacccgatccgatagcggccgcatacgtgtccggacatgagttgaccatgatgtttgtggctgccgggtacggcatcggactggcacttgaatcccaagtatcaatcttctctcatccgaacatagtattcagagaaatccgggatgagccgatggaagcttcaacgtacctggtaagaccgaatcgaactccatcgcctgaactaatgcgatttattgaacgaacaagcgcgcaccattccttatctgactaa

SEQ ID NO: 352578 - DNA, 123 bp, Pseudomonas aeruginosa
atgacttccctcaagaagccctccccgctcgacttcaaaacccattacggcctggccctggacgacgccgacgacgcgatcatcgtcgacctgttcgccggcggcggcggtgccagcagatga

SEQ ID NO: 352579 - DNA, 210 bp, Pseudomonas aeruginosa
atgaccacccgccccgttcgctcgatcatcgacgaccagctcgacgatatcgaagagtttgccggaaagagcatccgccaggccgtcgagttggccaaccgtcacggctacaacaaaccgttcttcgccgacatatgcggcgacctctgcgttctgcgcttccggcgcagctcccgccttcacgcgacaaccaccctcaccctgaaatga

SEQ ID NO: 352580 - DNA, 180 bp, Pseudomonas aeruginosa
atgaccacccgccccgttcgctcgatcatcgacgaccagctcgacgacctggtgatgccggccggcgccgacatcgccgcggtgctcggcctgccccgcgagaccctggtggtgaatctcccgcgccgcatggcactgaccatcaagaaaggccggaagtgcctgggggtgcggcgatga

SEQ ID NO: 352581 - DNA, 213 bp, Pseudomonas aeruginosa
atgaagaagcacgccaacccggcggcaaccgttgctgcctggaattccgcataccccgtcggcaccgaggtcgactaccgattccatcgcggcgcggcgccgaagcgcacccgtaccactactgaagcccagatcctcggcggacacaccgctgtcgtctggctcgccggcgtgtccggttgcgttgccttatcccactgcgagccggcctga

SEQ ID NO: 352582 - DNA, 1191 bp, Pseudomonas aeruginosa
atgtccagctctatgtgtactcgtatgttcggcgtcatttccctggggttgggtgcattcgctgcggcccaggccatggcggatgtcaacggtggcggtgccacccttcccgagaggttctatcaggagcccggtatcttgcccgccggtttcgccgcctacatcggcgtgggcagcggcaacggcaaggccgccttcctgaacaacgactacaccaggttcgtcgccggcaccaccggcaagaacgtgcactgggccggcagcgattccaagctgaatccgagcggcgaaaccaatccctatctgagcgcccatggcgctgcctgggggccgttgatccaggtgccggcgttcgccacctcggtcgccctgccgttcaacaagacgggcagcaatgccgtcaactttgctgacgtgaataccctctgcggggttttctccggtcgtctgaccaactggagccagattcccggttcgggccgtagcggcttcatcaccgtagtctacgactcgtggagcagcggtaccaccgaactgttcacccgcttcctcaatgcctcctgctccagcaccttggaaggcggcaccttcgccatcaccacccgcttcgccagcagcttctccgttggcctgccgactggtgccgtatcggcccagggcagtcgagatatgatggatgcgctcaacgcagcccaaggtcgcatcacctatatgagcccggactacgccgcgtcgaacctggccggtctcgacgacgccaccaaggtcgcccaggtgcgtggcgtatccccggcgccggccaacgtttcggcggccatcgctgccgttgctccgccgactactgcccagcgttccgatccgaacaactgggtaccggtcttcgctgccaccgccaaccccaacgacacgagcgtgcggccgtatccgaccactggctacccgatcctcggcttcaccaacctgatcttcagccagtgctacgccgatgccacccagacccagcaggtgcgcgacttcttcacccgtcactacggcgccagcgtcaacaacgacgccatgatcagcaaccatcgctttgtgccgctgccggcttactggaagcttgccgtacgccagtcgttcctgccctccaccaataacctgtcgatcggcaaccccagcgtctgcaatggcatcggtcgtccgctctag

SEQ ID NO: 352583 - DNA, 192 bp, Pseudomonas aeruginosa; identical to SEQ ID NO: 344151

SEQ ID NO: 352584 - DNA, 1116 bp, Pseudomonas aeruginosa
ttgctcgacaaactgcatctgttcgtcccgtttcgcctcgagcacatccaactgctcggagtggaaggacgtgcggatccggtgcatgtcgtggatctggaaagcctgggcgtgccgctgcaagggcagatcagtcgaggggagggcggagagctacaggctgactacctgcggcacgcttgggagtcactgagtacgggcttcacgcctttggcgttcaaggtgtttcaccagtccctgggcaagcgcctgatgcccggcgtagagctgaaggccagcccggcgaagttgctccaggggcacaacgtgttcggtccgacctgtatccagaagggggccgaggtgatgttcaagtggctacacgccacgtatcccgacctgttcgccaagctcgatgttccggcgactcaggtctacgccctggactgcacgtattccagccggttgccggatgagcgcaccgcgctccaggtcatccaggcgctgaccaacgtcagcaacggccacaccaagagtcgcggcgacaactaccagacgtccgcctactggggagcgaaagagtcccgtctgaagcgcctgaaggcgtatctcaaacacaccgagtttcaggcccagttggacgaattgaagcgggcagggcgggccgatctgtcggctgctcggtctgctcgggtcatgtctgacccacggttgcaggagtgggtgcgctacctgctccgcatggaggccacggtaatgcaccggtggctggaacgccggggcatcccgtctcggcttgttgatctgatcgcctaccagcagcggctccaagaagaggggcgctgcctgattcaggagtgctggcaagcggttacagcggaccttttcgcggcctttgagggtatccagatgcgagtgattgatgatgaaaatcggctgtcgttctcggcatgcatgaactacgtggagaacggggcgttcgatccggcgattcctgatcgctcgatcgatcagcgcatggttcagcctcagccggcatcgcagcagttccaggtgcagcaggtccagccgcgggatgcgttcgggacgcgagtcactgtagtgcctgatagcagccgttcgccccgcacgttgtaa

SEQ ID NO: 352585 - DNA, 459 bp, Pseudomonas aeruginosa; identical to SEQ ID NO: 332094

SEQ ID NO: 352586 - DNA, 207 bp, Pseudomonas aeruginosa; identical to SEQ ID NO: 329405

SEQ ID NO: 352587 - DNA, 1563 bp, Pseudomonas aeruginosa
atggcgcaggtacttggctttcaattgcttgacgaaggcgcgcttcgccggactgtccatggacagcctcaaggctccgaaagcgaggccgtagcgcgcctgggccgagccgtcgcgcccggcccaggccagttcgttgtcggcgtagtagccgagcagccagggatcgtcgcggtggtcgcgagcagcgatggcgatgacgcgctcggcggccatggcgaagcgcgggtcgaagggatcgggcatggctccccaccagtcgaaaccgctgctgaccgtggcgtagtcgccggtgatcgacagcggcaggctgtagggcatccgcgcctgtgcggcgagcgccggatcgctccagttgccgaggctgttgaaaccccatgccgagaggcgctccagggtgcgctggcgccattcgccggcgagctggtcggcgctcgcctggggagcgatgcgctggcgattggcaccgaggaaatcgaaccagcggccatgcccgaagcgccgcccggcctgcgcggcgacgccgcggcggtcgtcgccctcaccgaagaatgcggccagcggctcaccctccgccggcagttcggcgaacatcggctcgcgtccctcgacgtaggtccggctgccgtcggcggtcaccgcattaacgcccagcgaccagaacggatgtccttccggagtaaccagccaccagcgcccgccacgtttttccgtgcggaagaaaccgctggcttcgaacaccggcccacccagcaggccgccgaaacggtcgcgcgccggtgtctgccgttcccagtcgcggagctgtgcggcctcggccgcataggcgctgcgcaactgttcgtcggaacgaatcttttccggccagtcggcgcggctgtactggccatagcgatcgatcaggccggtcaggatgctccgctccaccgctctccctgcgcgtatgccgaaacgtccgagcaggatgctctggggagcttgcggcgagcgcagggacaggctcagcgccccgaccctggcgcggtccagcgagccctccacgcgtggcgccagcagcatccgctggccttcgaccatctgcggcatcggcggccccgcacgcatgcccagagcctctggcgaaaccgcccgcaacggcaccagcagggtctgcggcgggcctgccggaagctctatggatgcctgcaaccccggcgcgccctgctcgccctcgatcgcgacctccagggtcatgtcccagctcatggcattctggatgcgcaggctcacgtagtccgctgcggaccagtcccaacggccctgcgccggactcatgcgcaaggtgggccgttgcgccgggctgaaggtgacgcgacggagaatgtcgccctccggggtggcctccgccgtcacgctgggcaggtcggcatcctccagggtgatgccgaccacggccatcggcttgacgaagttgaacagcacctgctgggtgtcgttcgccgccagcggcgcggccaccgcgagcaggccgagaagcaggggaagatgccaacgcgaacggatcatgaagcctgttttccttaa

SEQ ID NO: 352588 - DNA, 1857 bp, Pseudomonas aeruginosa
gtgggacaggctggcgtagccgagcaggtcgtcgctgaactggtagctgaggctgagcaacgccgaaggggcgaagttgtactggctgagatcgccggaatcgtaggcaccgagctggccgttgcgcaccgccgcgccgaccccgccgaccgccgcgccgcccagcggagcgaagcgctcgaccttggcgttcttctcctcgtaggtaccgcgcaggccggcggtgaagtccaggcgttcgctgaggtgccaggtgccctgggcgaacagcgcgaagctgtcggtctcgatcttgccgttggccttcgagtaggtgtcgttcagcgcgccgagattggcgccgagcaggtacaggtcggccaacggtccgtaggaggtgaaggtcttgttgccgaggttctgcctgaacgcgtaggcgcccaccacgtagtcgaaggcaccgccggtgggcgaggccaggcggatctcctgggagaactgccggtcgtgcacttccaccccggtgtcgttgatcgccgagacgttcagttgctcgtcgttggccggggtgaagtgccagtagcggtaggcgctgatggaggtcaggcggtagccgccggcgaggttccagttggcctccagcgagctgccgccctggtgcacgctgacgtgctggcggccgttgatgttgaccttcctgcgctgcggatcgcgcaacggcgaagcgccgaccagcgcggcgcgctgccagaaacgctcggcggcgccgtagaccaccatgctgccgttgctcgaatcctcctcgttgtagtcggcgatccagcgcaggctgaagtcctcgttcggctcgaacagcaattgcccgcgcgcgccctggcgctcgccgccgttgagatagttgtcgtcgtggatgttcttgatgtagccgtcgtcgcgggtgcgataggccgagaggcgtccggcgagggtttcgctgagcggcccggaaaccgtgccgcggccctggaagtagccgtcctgcccgccggagacctcgacggtgcgctcggtagtgaaggtcggcgcgcgggtgctgatgttcagcaccccggcggtggtgttcttgccgaacagagtgccctgcggaccgcgcagcagctccagttgctcgatgtccagcaggtcgaacacggccattcccggccgccccaggtagacgttgtcgaggtagatcccggcgctgccttccaggccgtcgctggcggggttgttgccgatgccgcgcacggcgacgctcgactgccgcgcatggatgtaggcgacattgacgctgggcagcacctgctgcaggtcctgcacccgggagatgcgctgggcctcgagagtctcgccaccgagcacggtgatcggcgtcggtaccttctgcgaatcctcctcgcggcgacgcgcggtgacggtaaccttgcccagggccgtatcggccttggccggtgcgctgccggccagcggcggcgcctcctcggcgggcgcgggagcatcggcggcactggccggcaacgcaccgccgagggcgagcagcagggccagggcgtagtcggagccgccgggcggcgttcggcggagcggcaagcggtagtgatacttcatcgtgaatgtcctcggttccggcacagccggacgcaggcagcaggcggccatgccgcgcaaggcagcgatctggcgaaaggttcgaaggggggccggcggacggctcagccccgggcgactgtcagggacgacagccgccggcgacgcggaagggcattcggaacggcggaggtggcgcggcaaaggcacggtggaccatgttcagctcctggggtctatctatgcttattactaaatcgcatatttttctaa

SEQ ID NO: 352589 - DNA, 1098 bp, Pseudomonas aeruginosa
atgcgcatggcccgaccgacttcccccttcgctttaatgccttccgatctcatcgccctgcaaggttggttgcgtatgagtacgctggaacagagcctcgcccagagagcgcgcatcctgcttctactggctgacggattggcgcccaaggccgtcagcgagcagttgcaggtcacgccgccgacggtattcaagtggcgaaaacgttatctggaggcgggaatcgaagggttgagcgatctgccgcgcagcggccagccactcaaacttgggcccgataaaatcaacgaaatcctgacactgaccacccggcgtgtaccccaggaagccactcactggagcgtccgtttgatggccaagtatgcgcgggttaccacgtggcaggttcggcaggtctgggccgcttccgacctcaaaccccatcgtctgaagaccttcaaaatcagcaacgatcctcatttcgccgacaaggtagtcgacgtggtcgggctctatctgaacccaccggataacgccctggtgttgtcggttgacgagaaaacccagatccaggcgttggatcgcacccaaccgatgctgccgctacgccctggtcaagttgagcgtcggacccatgattacaagcgccatggtacggcgagtctgtacgcggctttcgacatcctgaccggccaagtaatcggacggattacccagcgccatcgagccaaggagtttctggcttttctgcaacagattgaacgcagcacgccagccggactggatctgcatgtgattctagataacagttcgacccacaaaacggctgcaatcaagcagtggctggaaaagcatccgcgtttcaaattgcacttcacaccaaccagcgcgtcttggctgaacgccgtggaaggctggtttgcacaactggaaagacgagcgctataccggggtgccttcaccagcgtcgccgacctaaaggtggctatccgtcaatttatcgaggctcataatgagcattcagccaagccgttcaagtggaataaaacggctgaggccatcattagctcggtacataaagcgaagctgagcgtgataaaaaataaattaatggattaa

SEQ ID NO: 352590 - DNA, 630 bp, Pseudomonas aeruginosa; identical to SEQ ID NO: 335262

SEQ ID NO: 352591 - DNA, 177 bp, Pseudomonas aeruginosa
gtgaaacagctccagcaggagcgcgatagcgtgaccccgaagagcaagacgttgacgcttgagcagcaaaagatccaggagctagaggctcggatcaaccggctggagcgggagaaagcgatcctaaaaaaggctaccgctctcttgatgtcggacgaactcgatcgtacgcgctga

SEQ ID NO: 352592 - DNA, 546 bp, Pseudomonas aeruginosa
atgagcaaaaacgaaacaaccaagcagcgcggatggttgaacaagtccgagatggccgcgagcctcgggatttctccgcaagcctttgataaatggggcgttcaaccaatcgagcgaataggtcgagaggccttttacacggtggcggatgtggtcgaaaaccgcatccatcacgccgctcggaaacaacaacctgagggcctagatgcggaaggtctcgacccgctcgctgaaaagaaattgctacaggagcgcctgcgactgacgactgctcaggctgacgcccaggagcagaagaaccaggtccaagcgaagacccttgttccgactccgttcgccaccttcgctcttgccaggatcgcgtccaagatcggctcgaaactggagacggtctgcaagacggtccgcagccaaatacccgatacaccgccgttggtgctggaggcctttgagcgcgagatagcgctggcccgaaatctggccgtggagtttgctgaagacctaccggaaatccttgatgagtactctgccaccctggatgaatga

SEQ ID NO: 352593 - DNA, 315 bp, Pseudomonas aeruginosa
atgccactgttcgtagcgctgttttcgtttctgagttctgtcgcgggtcctctggtggccaaggtgcttatatcgctcggcgtcggtgctgtgacgtatgcggggattaatctgctgattagccaggtgaagacatatgccatatctcagttcggtgcggttggtgctgatgtggctgcgattttgggcttggccaagttcgatgttgcgatgaatattatttttgctgcggtggtggccaaggctgttatctcgggcatggataaggccagtggcagcattaccaagattggcagtgtcgggaaaggtagttaa

SEQ ID NO: 352594 - DNA, 486 bp, Pseudomonas aeruginosa; identical to SEQ ID NO: 341822

SEQ ID NO: 352595 - DNA, 795 bp, Pseudomonas aeruginosa; identical to SEQ ID NO: 332466

SEQ ID NO: 352596 - DNA, 189 bp, Pseudomonas aeruginosa
atgtttctagtccagagactcctcgtggacggcctcagcatatgcgccatcgtcgacatcagactgtcctataagcccactttggtagagacctatctcgtagactctcgacttcagttcatggtgggcactgcgaattgcaaggaccgtggcatcaatgtgcaacctaccacctggatgtcgtcgtaa

SEQ ID NO: 352597 - DNA, 957 bp, Pseudomonas aeruginosa
ttggccggtgagtggagcttcagtggccacttgccgagcaagggcgatgtccgtggcttgatgactgtcagcgtcagcggccaggatgaattcaaggtcgaactcaaaggccagtacgccgacggcaaagccttcgctggcggtggctcggcagtgctgttcaatggctatgaatggcgtgccaacctcaagatcgacggcgtcgccatgcgccaggtgctggctgccaatggtggggaaatccgcgggcggatgttcgagaccgaacacgatgagcgcggtctggacttcgtcgccgccaagcaaggcacggcgcaactattagccgtgcagccggactatctcaaggccggcagcgaaaccgaactgaccctggttggtagtggcctgagcggtactccggtgttcggtgagggcgtcgaggtgctctcggtactggagcagagcccggagcgcattcgggtcaaggtcaaggcggccagcgatgcgccggtcggcgtgcggaccattcgcctgggcgcgcttaaaggcgtggatctggcgctgtacaagcagatcagcgaaatcaaggtggtaccgccgttctcggtcgcgcgggtcggtgacaacggcggttcgacgcccaaggtgcaaggccgcttcgaggccgaggcctggggtaaagacgccaatgaccaggcttaccgcattggtttcgtcccggccacctggtcggtggcgcccttcgatgaacgcgccgccgaagatcaggacgtcaagtttgccggggtcatgagcgccgaagatggcgtcttcaccccaggcggcgccggaccgaatccggcacgcaagatgtcgaccaacaacgccggcaacctcaaggtcatcgcctccgtcgagcagggcgggcagcccatcaagggcgaaggccagctgatagtgaccgtgcaacgctggaataaccctcccatcccttga

SEQ ID NO: 352598 - DNA, 1431 bp, Pseudomonas aeruginosa
atgggcgctattttgaatctggttgaacgcaatctgcacgaagtgcacgtcgatgccgagcgcatgttgtttcacattcccagcagttcgctgtttcagaccgatgaactcaccgccggcattatcgatgcactgcgcgaggccggtagctcggcggatgatttggtgctgcggctggccgggcgttttgccggcaccgaggtgaatgacaccctgcgtgatctgttggcgctggaagtggtcagcgacggttctccgctgtcgccggatatcagcgccaagcgggtcgaacggattgccttgaataccgtggtgttgaacgtcaacaccggctgcaacctgagctgcagctattgctacaaggaagacctggacaagccctccgccggcaagaagatgcagttggacaccgccatcgcttcggtggaaatgctgatcaaggagtcgccggacgagcagcgttacaccgtggtgttcttcggcggtgagccgttgagcaaccgcaagctgatcgaacaggtggtcgattattgcgaggcgcgctttgccgagctaggcaagttcgtcgagttcgtcatgaccaccaacgccaccttgctgaccgaagaggtggccgactacctgaatcgtcaccgctttggcctgtccatcagcatcgatgggccgaagactgtgcatgaccgtaaccgcatcaccgtgggcgggcagggcacctatgacgtggtgcgcaagaaagccgagatgctgctggcgcgctacaacagccgcccggtgggggcgcgggtgaccctgacgcggggcatcaccgatgtcgagcacatctgggatcatctgttcaacgagttgggttttgccgaagtcggctttgccccggtgacctcgggcgatatgagtgacttcaacctgacgtcggaagaattggtagaggtcttcgccaatatgaaggcgctcgggcggcgttacctggaagccgcgctagagcaccgcaacataggcttctccaaccttcatcagttgattaccgacatccacgagggccacaagaaggcgctgccgtgcggcgccgggctgaagatgctggcggtcgatcacaagggtgagctgaacctctgccaccgctttaccggctcggacttgccaacttttggcaacgtccatgaaggggttaaacaggtggagctgggcgacttcctctcccagcgcctggaccgtactaacaccggttgcgaaagctgccgcatccgcaatctgtgctccggcggttgctaccacgagagctatgcccgttacggcgatccgacccacccgacttatcactactgcgatctgatgcgcgactgggtggactttggcatcgaagtctacagccgcatcatggccggcaatccggccttcatcagcagctatatcactccgcggaaggcgaaatga

SEQ ID NO: 352599 - DNA, 1125 bp, Pseudomonas aeruginosa
atgtcgttcaagcactccggcagcctggctgccgcattcgccatgctggccacatcctggtccgtgacggcgttggctgaaaccggcccggccttgcagcctggccacgaatatatggttgtcagcaactacccgaacaacctgcacctggtcgatatccagaccgacaagctctacaaaacctgcaccttaccggatgcctacggcccgggcaccgtgcagatggcaccggacaaaaagaccgcgtacatcctcaataatcactatgcggatatctacggcgtcgatctggacagctgcaagctggtgtttcatgccgcgctggcacaacagcccggtgaacgggcgcggtcgatgttcgcgattgccgtaagccccgacggcaaggaaatctacagcgtagccaacccgaccaagatggggctcgacaactatgtcgtgcaagcaccacggttgcaggtgtatgccgcggatggtgggttgcaggccaagccgctgcgcagcttcccggcaccgcgccaggtgacggtgatgcaaaccggtgctgacggcgcgctgtatatggccggcgccgacatttacaaggtcgatgtgcacaccggcaaggtcgacgtggcggtgccaagtcgtagctggaagcgtccgctctacagcccaccggatgtgctctatgcctggccgcagcagacgccttcaggtgatttcaccatcctctacaccacggtcaagttcaaagacgagaagcaggacatggcgactgccgagttcatctatggcttcttcaatatcgatctggccaccggcaagagcgagaccgtggattttgccccgctgacggaaatctacttctccgccatgcgctcgccgaaagatcagaacctgatctacggggtgctcaatcgcctgaccaagtacgacatcaagcagaagaagcttttggaagtgggcgagctggatcactcctattactgcgtcgcactgaacaaggcggggaacaaggtctacctgaccggcacttttaacgatgtggcggtgtatgacgccgattcgttgaagaaactctccaatatcaagctgcctggcggcgatatggcgattgccacttcgcaaatcttcacccgctga

SEQ ID NO: 352600 - DNA, 369 bp, Pseudomonas aeruginosa
ttgatctcttggcgctgggcgaccatcacgctggcctgcctgctgctggtcggcctcggcaccgccggcggtgtctggctcggcgcgcgacactaccggccgcagttggatgccgcgagcgcggatctggctgcctgccgtgcctcccggggagagttggaatccgcagtggcggagcaggtccggcaggttgccgcgctgcgcctggccggcgaggagcgcgccagggaggcagcccatgcgctggagcagggacgacagcaggccgccgagcggtattccgccgccaaccgtctgctgcgtgatcgcaccgccggcgagcagtgcgcggccgccgaggcggtcattgatcaggagttggggctatga

SEQ ID NO: 352601 - DNA, 1962 bp, Pseudomonas aeruginosa
atgcttgggtacagagcagaaatagacggtttgcgggctattgcagtttccagtgtactactattccatgctgggtttggttttattcctggtggattcgttggggtagatgttttttttgtaatatctgggtatttgattacgtctataattctccgagaaatggaggttggtaagttttcattttcaaagttctacgaacgtcgcgcaaaacggttgcttcctccgcttattccagttttgtgtgcttcgattattttctcatttgccttgcttgattcggatttgcttaaagagtttgcaattagtgtttactctgctgttgggttcgtttctaactggtactttcttcagtctgtgtcatatttcggggggccaggtgagcagactccgcttttgcatttgtggtctttatcgattgaagaacaattctatttcttgtttcctgccatattgttgattgtttttttggtgagaaggcgttttatctttcctgttctgatgtcattgatgttgatgtcggcgttatactctttctatcttgtttttaaatacgacttagatggggctttttataattctgtagcgaggttctgggagctgttggtaggtgctgtgctggcagtaaagccgaattggcgggcagttgggaaagcacctgcgaactttttagaaatactcggtctgagtatgattgttgttgcaatggttttctatagccatactatagcattccccggcctgtctgcggcagttcctgtattaggtgcggctctgataatttcagcaggaggcaatggttcaattgtttctccacttctaaagtccaggccatttgtgtcgctaggtcttatctcttatgctctttacctttggcattggccgattttagtttttgttaggattgttaatcctgggattggcgcggcaggaatggcgctatctctctgcggggcgattgttctagcagtcatgtcttattatctcattgaacgaccaatgcgcacaaaaagcggtctgcgcgctgctcatgttgccacggcaagcgcattatcattaatttttgtggtttgtttttctgcgatagtttctagcgatagactttctgattttcatgataaaatgttcgctgagataaggaggtctatgtatcctggaggccgctccgatatgattgctcgtattgagaaagagtcgaatcgatatcttattgatctaaatgtcaattttaatgggcaatcaggaacatatcaggctgagaaatatgcaggatggacatgtagctacgataaagggaatactatagacaagctttatgagtgccttgtgtcacaagcaaaagataataacgttcttgttatgggggatagcatcggcagagacacaactcatgccttgcgccgagcattccctgaaaccaatttcataatgctgcaccagtcatcatgtccgccaggcgatgctaattcttgcttcaatgggatggccgagcttctggagcgtctgtcaatttcagttaaagttaatgctgtaatcctaaatttccgctacatgccatctaattgggtagcagtatctaatgggatagaggaagcgaagaagctttctaaaaatgtcatactaatgggagtatctccttttttctctatgacatttgtggattttataaaatctattccatcatcgtctgaagttccattgtttattgataacagaaacaccgatcttactcggtggagttatactgatttggcaaatcaagcaagacagatggcgttatcgaaaaatatctatttcgtgaatgttcttgactttttctgccctcagaaaaaatgcagactatgggttgataataggtatggtgatccgcttatatttgatcagcagcacttaaccaacaatggaattagtgagttctctgagtatttgaaaaggcagcctattatttacaaccatatttga

SEQ ID NO: 352602 - DNA, 270 bp, Pseudomonas aeruginosa
atggcagaacttcaaatcaagattggtcgcacgtacagggctaaaaagccgcgcgccgtcaactgcggcgtaagccagctgataaatgaccgaaccgtcaagtatgtcggagcattcgaagttcagtacgacggcccctcagcaaggttcggccagcactatccacgaatccccatcgaaaagtttctcgcttgggccgatcgcgatgtgacagacgaacttcctgttggcgaatacgccgaatggcctccatccaaggcaaaagcctaa

SEQ ID NO: 352603 - DNA, 306 bp, Pseudomonas aeruginosa
atgagcaagcaatcgcatacgcctggcccctgggagatcgagcggtactctgatggcctgatccaaatagtcgggaacatccgcgcagtttcggatcacgaagagcatgtaacgactgtggtcgaagcggtgactcggggtgatgaggcaaacgcacgcctgatcgctgcggcgcctgaactgctctccattgccaagcgctgggctgcgctggatggctcggcatggcatctcgtgcgttacgaagaagagaagcgcgaacttctggcggcgacgaacgaagcaatcgccaaggcaaccgcctaa

SEQ ID NO: 352604 - DNA, 285 bp, Pseudomonas aeruginosa
atgagcaagaagctgcaagtttggtggattccgcaggtgccgatgaaggcattcacggttgacgtttcgagtgttgaggaaggcgtgaagctgatgaacgtgctggctgattacgatgccttccaatacgagaatcgcgtgaaaggcgattactgcaatgcaggcggactcaatcagtggagcgatgatgctgacggcgatggtaatcctggatgggaaagctggtacgacgaagagaccggcgatgacgatccagctcaatggcttgctgagcaggtagcctga

SEQ ID NO: 352605 - DNA, 213 bp, Pseudomonas aeruginosa
atggagcaagagttgaagttactgcggtattcaaaaatgaccactccaggctactactggtggctgccggaatacctcagtgaccaccctgaaaaagtcgaaaactggacgatcataagctggcatccggcaaacagtactcatgcaaaggctgggtttttctatggcccactaaatcctcctgtgacagccacctttccaaaggagtcctga

SEQ ID NO: 352606 - DNA, 1329 bp, Pseudomonas aeruginosa
atggcacgtaagggactctatctgggcggcagcgcgctgctgctcgccgtggtactgctgctggtgttctgggggcgtcccgcggacgccgagatccaggtactgaaggcgcctcgcgcggtggtctggaaagacttcctcggggtcaacgcgcagttcctctggttcagcccggagcgctacaacaagcagatcgaccgcctgcaggacctggggctggagtgggtgcgcctggacctgcactgggaccgcctggaaaccgccgaggaccagtaccagttggcctccctcgaccagttggtcaaggatctcgaggcgcgccagctgaagtcggtgttctacctggtcggttcggcccgcttcatcaccaccgcgccgttctactcgcccttccaggaccagtatccgccgcgcgacccggaagtcttcgcccggcgcatggcgatgctctcgcagcgctacccgagcgtggccgcctggcaggtatggaacgagcccaacctgatcggcttctggcggcccaaggccgacccggaaggctacgccaagctgctccaggccagcaccatcgccctgcgcatggtcgacccggagaagccggtggtttccgccggcatggccttcttcagcgagatgcccgacggccgtaccatgttcgatgccctcggccacctgggcgtggagagcctcggcaccatcgccacctaccacccctatacccagttgccggaaggcaactacccgtggaacctggacttcgtctcccacgccaaccagatcaaccgcgccctgcgcaacgccggcgtgccggcgatctggagcaccgagtggggctggtcggcctacaaggggccgaaggagttgcaggacatcattggcgtcgaaggccaggccgactacgtgctgcgtcgcctggcgctgatgagtgcgctggactacgaccggatcttcctcttcaccctcagcgatctcgaccagcgcgccagcgtgcgcgaccgcgactacggcctgctcgacctggacgccaaccccaagccggtctacctggccctgcaacgctttctcaaggtcaccgggccgaagctgcgcccggccgacccgccggtcaccgaggacctgcccgacggttccttcagcatcggctggacccgcgaggacggtcgcaacgtctggctgttctggtcggtccgcggcggcaacgtgcgcctgccgaagctcaaggaggccaccctgcacgatccgctcagcggcaaggtcacgcccttgagcggcagcgacggcctggaagtcccggtgaagtccagcctgcagatgctggtctgggagtga

SEQ ID NO: 352607 - DNA, 312 bp, Pseudomonas aeruginosa
atgccgttactgatcggggtactactgcgggccatcggctggtcgctgatcccgctgggttggaagctgctgcgcggcttgggattcaccgctgttgccttcgtcggcgtcaaggcggtgatggatcaggccaaggactacgtattcagcaacctgggtggcgtgcctgcgcagtggcttcaagtcctggggcttctgcaagttgacgtgtgcatcaacatcctgttctccgcgtacatcgcccgagctgtgctgtggggtatggacaagtctggcggcaagtccggcatgcgctggaccgggccgaagtaa

SEQ ID NO: 352608 - DNA, 591 bp, Pseudomonas aeruginosa
atgaagactgtcttcttgcgtttacagcatgccctcgacgtcacccgtcgagcggatttcctcgccccgctggcgctgcgcctgtacctggcgccggtgttctggatggccggcagccagaagctggcggacatgccggccaccatcgagtggttcggcaatcccgactggggactcggtctgccgtttcccgaactgctggcctggctcgccgcgctgagcgaggccggtggcgccgtgctgctgttgtgcggcctggccgtgcgctggatcagcctgccgctgatggtgaccatgctggtagcgatcttcgccgtgcactggccgaacggctggcaggcgatcgccgatccgtccgcgccgttcgccaacgcccaggtgctggaggctggcgagaagctggcgcgagcccgggaaatcctgcgcgaatacggcaactacgactggctgacgtcgagcggaagcttcgccatcgtcaacaacggcatcgagttcgccgcgacctacctggtgatgttgctcgcgctgttcttcggcggcgctggcaagtggctttctgctgacttctggattgcgcgaaaattgcgctga

SEQ ID NO: 352609 - DNA, 1587 bp, Pseudomonas aeruginosa
atgcaacgggaattcgtcagcggcgccgggctaggcctgcgtcgcgcgctgctggagccgctcggcgccggcgatgaggtccgggtcgacttcctcgaggtcgccccggagaactggatcggcatcggcggccgtctcggccgccagttccgcgagctgaccgagcgcctgccgttcctctgccatggtctgtctctcaacctcggcggctacgccccgctggacatgtcgttgctgcgcgcgatcaagggtttcatcgagcagcatggcatccgtgcctacagcgagcacctgtcggcctgcgccgacgacggccagctctacgacctgatgccgctgccgttcagcgacgagtcggtgcgccgggtcgccgaacgggtcagggtggtacaggacgtcctcgagcggccgttgatcgtcgagaacgtctcggcgtatgcgcgcttgccgggcgagctggaagaggtcgatttcgtccgcgcggtactggaggaagccgattgccaattgctgctggacgtcaacaacgtctacgtcaacgcctgcaacttcggtttcgacgcccacgcctacatcgccgcgatgcccagccggaggatcgcctacctgcacatggccgggcacgacgaacagggcgccagcctgaagatcgatacccatggcgcgccggtctgcgatccggtctgggaactgctggcacatgcctatgcctgccatggcgaacgcccgacgctgctggagcgcgatttcaacctcccgccactgagcgagctgtatgccgaaaccgatcgcatccgcgagctgcagcggcgcagcggtgaagcgcaactgcgcagccctggggtacggcacatgaaccacacgaccttgcaacggcgtttcgccgcacgtatccgcgatccgcagcaggccttgccgcccggcatcgcgacggagcgcatggcgatctacgaggaactgttcttcaacaacctggacggtttcatcagcagcggtttcccggtcctgcgccagttgttcgacgagccgcgctggcatcgcctggtgcgtgccttcatgcgcgagcatcgctgccgcacaccgtacttcagccaattgggcgaggagttcatcggctggctgcaggacggctaccgcgcggaggagggcgatccgcccttcctgctggagctggctcactacgagtgggtcgagctggccctgtcgctggccgaggcgcctgtcgagacgctgccgcaggcctggtcgtggtcgccactggcctggccgctggcctatcgctggccggtccatcgcctggggccgagccatcggccggtggagccgccggccgagccgacctgcctgctggtctggcgcgatccggcggagcgggtgcgcttcctgcacctgtcgccattcgcctatcgcctcgcgcagcgcctgagcgaggagggggaggcgtcggtgacgctgctgccgttgttgcgcgagttggccggaagctgcggcctgagcgccgacgcggagtatttcgaaaatgccttcgccttgctggaggactggcacgcccagggcatcctcatgggcgagggcgctctggagtga

SEQ ID NO: 352610 - DNA, 699 bp, Pseudomonas aeruginosa
atgacagccaccttctttcgttttcccaccactccgcacctcgcctggctagccaaagacggcatgccacgcgacgacaaggtgttgtcgcccaccgaagcgcaggcgctgttgtccggcgatgtggtcgtggaggagaagctcgacggtgcgaatctcggcctgtctctatcacccgacggcaccgtgcttgctcagaatcgcggccagtatctgggcgagccctatgttggtcagtttgcgcgtttacccgcctggctggcgcaacacaaatccagcttgcttgccgtgctgcgtcctgagttgatgctgttcggcgaatggtgcgccgcacgccattcactggattacgacacgctgcccgactggtttctgttgttcgatgtctatgaccgcagcaagaggcgtttttggagcacatcccggcgcaacgcgctggcctcggaagccggattgttcaccgtgccgcgggtatcgagtggccgcaccaccctggcggcgctgaagcaattggttatggatacagccagtcactatcgcgccgagctgccgctggaaggcgtggtggtacggcgcgaatcagccgactggtgcgaggcgcgtaccaagttggtgcgcccggatttcgcccaagcgatcgacacccattggcgcaagcgcgccatcgagtggaaccgggtagattggacgcggacatga

SEQ ID NO: 352611 - DNA, 543 bp, Pseudomonas aeruginosa
atggcgatgttcctaattgataccaacgtgatgctcgccgccagtgcgatctccgagctgtccaacgtcgctacacgcgccatgccgcgcgagattgaattgcgtgagtcggtctacgagtggctggtgcagttcgatcagtcggacgaccatatggtgctggatgacgccgggttggtgctggcggagtacgagcgcaacatgccgtacaactggcaggaacaggagtacgggctgcaggtgttgcagagcaagcgagatcggatgcaggtcgatgatgtgccaatcgacacgttcgaaggcaatggggaacatatcgccgtgttggcagctgaacacgaagcaatcgtcaccgaccgtgaggatcgcaagtgggttgcttgtgcattggccgcgatgattatgttcgaagaatcacctcctatcgtctacggtgcggaaactgactggcatatcgcaagaacgcaattggaggagttcggaattttctttctgcccttgctgcctgctgcgtggtatcaggacagggttgggtacctatga

SEQ ID NO: 352612 - DNA, 1347 bp, Pseudomonas aeruginosa
atgcttactcatctcaaactggagaacttcaagatctggcgcaccacggggcctgtgcgacttgctccgattactctgctgttgggtaccaattcatcaggcaaatccagtctgatccaaagcctgcagctcatccgtcagaccgtcagaggcgatgatccgagtctcgatctcaatcttggcaatcctgatgctggcgattccgtcacactcggccagttcaaggatgtgctgtgtcgccacggcgcagcaacggaaagcacggcgtccaatcaggtaggtatcgagtttcgctggagcgaaacgggaaatgccgctgaatcggcgatcttctcggcacgctaccgtaaaggccaatccggcagcgctgaactggagttcctgcgcttgggcaaagacggtcaaggcttcagcgtgcaacgccgtaaacccgggatttatcgcctcacgctgggcaatcaaatcaagcccttggggcaaagtgcggattttcgtccgcagcgttcgtttgcattttcaccctctacgctcaacaaactgggtgtgcagggtgaggtaattcggtcggttggtccggcgctgctggacgagttgggtcgcatcatctaccttggccccgtgcgccgtttggcccagcgcgactatgtatgggcgggacgtatgcctgcccatatcggcgacgacggtgccaaagccgtggatgcgttgattgccagcggtgtggcgtgccagcaagccaagaggcgcagtcaagccttgccagcggaagcctatctcttcgagcaaacggtttattggctgaaggagatgaatctggcacatggtctttccgtccgcgcccttggaaattcagcgcgtcatgagttgctggtggaagccgatggccaggccagtaacctcaaagacgttggagtgggggtgtcgcaggtgcttcccgtcattgtggccgccctgtttgcccagcccggccatatcgtgatcgtcgaagaaccagaaagccatctacaccctctggcacagagcaagctggctgagttgctggcgcagttaagcaaggagcgcaacgttcagttcatcgtcgagacgcattcagaacatttgtttcgtcgcatgcagaccttgattgcccgcgaagaagtgtccgttgctgacgccgccatgtatttcgttgaacgtgatggcaaaaatgccaaccttctgcctttggaagttgatgatcttgggcgggtaaaaaactggcccaagcatttttttggagacaccttgggggagactcgcgagcaaacggcgctagccatcaaacgagcgaaagagttgagagcaaaagatggcgatgttcctaattga

SEQ ID NO: 352613 - DNA, 1422 bp, Pseudomonas aeruginosa
atgaaactggtgcatgtcaacgagccaaggcttgagttctttgagggttcacatgtttgtcctaggcgcgggattgcagcctatggggtgtatgacaaaggctctctcacccggagaactcgaatcctaatcggagccatcggcactagcaaagacctcgaagacttttcgagtctgatcgagcgaatgaagtctcctatatcggctgatgtggatgaacacaagggcaatctttttccagacttctgtggattcaatgagcgggttgggtttcatgcggagcttgcgttcaaccaagatttaggccgcccattgaggcaattggatatcgagaaagttgtaaaaataaataatcgaacgcagcgtatagaagcagccctcgacctgtactatgaggagataaagttcctcgcacagaacaggcctgtcgatgtgatcgtttgcgtgctttccaaatctgtttacgatgcagtcagcaaagattcggcgatggaaggcgacgaaaagctggaagagagcatcgaggttcaatcagagttgaatttccggcgggccttgaaggcgaaggccatgcacttgggcaagccgcttcaattggtgcgtgcagattcgctggcatccggcgcaaagggtcagcaggatgacgcaaccaaggcttggaatctcgcgaccgcgctgtattacaaggctggcgcgaccaacccatggcgccttgaaaaggctgaaggcaacacactttcttgtgccttgggtatcgcgttctaccgaagcagagacaagaagacgcttaacaccagcttggctcaggttttcgatgaattgggtaatggattgattttgcggggcacgcctgtgcatctcgacaaaggagatagagtcccaaagctatcggaggagcaggcatataccttgttcaaggctgcgcttgaggaatatcgcaatgcgatgcgaacgtaccctggcagggtcgttgttcacaagacatcaaatttctctgacctggagatttcaggtctcatgagtgcggcctcggacttgcgtatcgatacagttgattttgtgacggtgatggattcgcgacttcgactctttaggactggagcatatcctccttatcgaggtacatccctagtccttgatgaccagcggcagttgctctatacccgaggctcaatctggtactacaagacctatcctgggatgtacattcctcagccacttgagttgcgcgtgatccgctcggagcaaagccccgcctttctggctagggaaatcctcggactgacaaaaatgaactggaacaacacccagcttgatggaaagtaccccatcacgcttagttgcgccagaaaggtgggggagatcatgaagtatttggatgaacatgatcggccacaaattcgctatggctactacatgtaa

SEQ ID NO: 352614 - DNA, 1452 bp, Pseudomonas aeruginosa
atgaagatccttgatctgcagaacgaattccgcgaactgatcgcgcaactccggcatgaaatcgaagccgccagtgcgatggggcagtttgatgcgcataagatttccgagaacctcatgtgcggccttctgcgcgagctgtgtggctggactgacttgcggaatctgaaccgcgagcaagcgaattttcccggaattgatctcgcagacgatacgcgccgagtggcggtgcaggtaacggccaccgcagacatcggcaaggtcaaatacacgctggagcaatttctcagtcgtgatttgcaccagcgttacgaccgattgattgtctatgtactcaccgccaagcaaggcagctactcgcaagcggccgttgattcggtgtgcaagagcaagcacaagttttcagctggcaatgatgtttgggactacaaggagctgtgcaccctggcagccgatgctgaaccacacaagctgcaagctgcgctcaaccatttgaaagcctatctgcgcggagtgcctgttggtttggcggacgaggacattgatccacctttgacgccatcggaatcgctgacggccaacctcgtggaactctattttccgagcaaactcttcattgctcgattgagtgaggatctgctggaaaagcatggcaaaagaaggccaggcttgtggcgaaccaccatcagagagttcaaccaagagaatggactcgcggttccatctgcctacgttatccacagcggcaacctggtgacgttcttcaatctgatcgagcggaacaatccctatcagcacttgtgtgagccaggcacagcggaagaacacaacactgctgattacttcacgatcgacgatgaccacgtgcgcgtcttcaagtcgctgctgagattttccctgcagcatcgcctgtttaaggaacgtgtgcggtgggaaaacgaaattggtgagttcatattcctgcctttggaagatggctttaaccaaagagaagtggtctggcaaggagagaaaaaagccaagcgtaatgtcttttcaaggcaattcaacaaaaaagacccttcaaaggtttttctgcaaaagcatctctcgttcgctgcagattttttgcgtctggatggtcattggttcatggccataacccccagttggttctttagctatggagccaatttcgagcagtctggtttcagtcacgacaacctcagctggatcaagcgccaagaaaataaccagcaggtgatgaatcattttcgatttatatctacctggctgtcctcaattgacgacgaggatcttttctcagaaaaagggacaacggactccttcctctcatttgggactccactcatgctgaatggtgccccctctctggaggagtctggctggaaagccctgcctacgatcaatgaagaagattcggcgcagccgagaaggatgttcggttcatga

SEQ ID NO: 352615 - DNA, 918 bp, Pseudomonas aeruginosa
atgagcaagcacgtcaactggagcggcgtattccccgcggtcaccacccaattcaacgccgatttctcggtgaacctggaggaaacccacacggtcatttccaacctggtgcgcgacggcgtgtccgggctggtggtatgcggcagcgtcggcgagaacacctcgctgaccatcgaggagaagatggccgtcaccgaggtcgccaaggatgcctccggcggccgcgtgccggtgatctgcgggatcgccgagttcaccagcgccggcgcggcgaaggtggccaaggcggtggagcgggtcggcgtcgacggcatcatggtgatgccggcgctggtctattcctccaagccgcacgagaccgccgagcatttccgcagcgtggccagcggcaccgacctgccggtgatggtctacaacaacccgccgatctaccggaacgacgtcaccccggacatcctggtttccctggccgactgcgagaacatcgtctgcttcaaggacagctccggcgacacccgccgcttcatcgacgtacgcaaccaggtgggcgagcgcttcatcctcttcgccggcctcgacgacgtggtcctggaaagcgtggcggtgggtgcccagggctggatctcgggaatgtccaacgtgttcccgaaggaaggcgagaccatcttccgcctggccagggccgggcgcttcgccgaggcgatgccgatctacgagtggctgatgccgatcctccatctcgacgcccgtcccgacctggtgcagtgcatcaagctctgcgaggaactcgccggtcgcggcagcgccctcacccgtccaccgcgcctggccctgcgcggcgccgatcgcgagcacgtcgagcggatcatggccaaggccctggccagccggccggcgctgccggacgtcggcttgtag

SEQ ID NO: 352616 - DNA, 432 bp, Pseudomonas aeruginosa; identical to SEQ ID NO: 328703

SEQ ID NO: 352617 - DNA, 501 bp, Pseudomonas aeruginosa
atgagcggggtgatcggttcgctggagctgatgcagacggtgccgatggacgtcgaactcgccgagtaccagcgcaccgccgccggttcggcgcgggacatgatgcggatggtcaacgacatcctcgccctcatcgaactgcaggccggcaagctctacccgcgccgcgagccgttcagcctgcgcggcctgttcgacagcctgcgcgcgcagtacgcgccgcgcgccgaggagaagggcctgcgcttcgccctgcaactggacgacagcctgccggataccctcgaaggtgatgccggcaagctggcccaggcgctgggctacctggtcgacaacgcgatcaagttcaccgccaggggcagcgtgaccctgcgcgtcgccgccgggcgtacccatgacggggtggcgctgcgggtggaagtgatcgacacggcatcggtttcgacatggccgccggcagcgacctctaccagcgtttcgtccaggccgacagctcgttga

SEQ ID NO: 352618 - DNA, 1026 bp, Pseudomonas aeruginosa
atgctcgcctgccccctccctcccgacgaagccctgcgccagcaggccctggacgacatggcgctggtcgacacccccgccgaacactacctggacgccctggtggaactggcgcgggaaaccttcggggtgaagaccgtgctgatcagtctgatcgaccacgaccgccaatggttcaaggcccgtatcggcctggatgccgaacagacgccgcgcgacctgtccttttgcggccacgccatcctggccagcgaaccgctgatggtgacggacgcctccagggatccgcgttttcacgacaatccgctggtcaccgggccgcccttcatccgcttctacgccggcgagcccctgcacgccagcaatggccaggccatcggcacactctgcctgatcgacccgagcccgcggctgctgaatctccgggaaggacgccagctcaatcgactgtcgatcctggccgaaggatatctccagctacgcagcctcaccgagcacacccgcttcctgcgccaggagatcgaccgggagcagcgcaagtcactgctcgaccccctcacccaattgtggaaccgggccggcttccacgcgctgcaccagcatgaactggagttggcgcgggccagcgaccagcgcatcggcatcatctacagcgatatcgaccatttcaaacgtatcaacgacaccctggggcaccgggccggcgacagcgtcctccgcgaggcggcttcgcgactgcgcgcggcgctgcggccggaagatctcctggcgcgtttcggcggcgaggagttcgtggcgatggtccaggtccgcgagaccacggaactgaccatgatcgccaatcgcatccgcgaactgatggaagcgaccccgatcgactgtgccggcacgtccgtgccggtgaccatcagtgccggctgtaccctggccggcagcggcgaagaaccggaacaggcactcgcccgggcggatgccgcgctgtacgacgccaagcgtgccggacgcaaccgggtggtcagcgtctga

SEQ ID NO: 352619 - DNA, 822 bp, Pseudomonas aeruginosa
atgaaaacgctcacgctgatcgatggccaggaggtcgccgccatcggccagggtacctggcatatcggcgagcagcccggcgaacgcaagcgcgaggtcgcggcgcagcgcgaaggcatcgagctggggatgacgctgatcgataccgccgagatgtacgccgagggcggcgccgaggacgtggtcggcgcggctatcgcgggacgccgcgaagaggtcttcctggtcagcaaggtctacccgcacaacgccagccgcaagggtctgccggcggcctgcgagcgcagcctgcgccggctcggttgcgaaaccatcgacctctacctgctgcactggcagggccggtatccgctggaggaaaccatcgaagccttcgagcggttgcgcgaccagggcaagatcctgcgctggggcgtgtccaacttcgacctgggcgacatgtacgaactggacggcagcgcctgtgccgccaaccaggtgatgtacaacctggaggaacgcggcatcgaatacgacctgctgccctggtgccaggagcgcggcatgccggtgatggcctactgtccggtggggcagggcggcaggctgctacggcacccggcgctcggcgagatcgccgcgcgccacgacgccagcagcgcccaggtcgccctggcctggctactggagcagggggtgatcgcgatcccgaaggcggtgacgtccgctcacatccgccagaatgcggcggcggccgacctggaactgagcgccgacgacctgcgggcgctcgaccaggcgttcccgccacctacccgcaagcgaaacctggcgatcgtctga

SEQ ID NO: 352620 - DNA, 744 bp, Pseudomonas aeruginosa
atgagcaggatcgtcagcactacacaacgattagaaggactgggactgagcggcatggctgccgcttatgaacgccaactcaaccatccggacctccaacagcaggccttcgatgtgcgcctcgggctgatgatggacgctgaagccagtgagcgtgaaacccgcaaaattgaccgactcatcaagggagcgcgactgcgcgatggtcaggcaactttggaggatgtcgattataaggtcagccgaggacttgatcgcagcctgatcatgagtttggctgaatgtgagtggttacgccggaagcaaaacctcgtcctcacaggtgctactggaacgggcaagacctggcttgcctgcgctttcggaagccaggcttgccgccaaggctttatcactagctaccgaacagccacacaactcttcgaagacatcctcttgtcccaggcggacaacacactgcccaagctgcgacgtcaactgatcagaacgcagttgctaattatcgatgatttgggcatcggtggcattaacgctcagataggcccctttctgctcgatattatcgaccaacaatcgcgtagtggctcactgctgatcactagccaatatccgcaagataggtggtacgacctgttcgtcgacccaacgattgccgatgccatcttggaccggatcctccataagtcgcatacgctcccactcaaaggagagtcaatgcgcaagatgaaaagaggaaggaactga

SEQ ID NO: 352621 - DNA, 1689 bp, Pseudomonas aeruginosa
atgtcaggttcgacccatgacctcctcattgtgtgtttcccgatgccgggcgtcaatccggcagtccgtccattcgtccatgaatatgcattgaacgcgatgagcgcggcgttgtcgtgcccgtcgttcggggaacccatgaagatttcaatctatacgcagcgcgagatagtgcgcctgatcagccacggcagcttttctatccgtgccatcggtaggctctgccatgtcgctcctaataccgtgcgcgtagtaagggacgcgctcgccctgacgcgtgaaagctgggaaacgctcaaagaactggatgatgtggccttcagtcgtcgcttgaggccccaacaatcatgctccaccttgcgtaaggcgataccgcaatggcacgaggtgcatgaacagctacggctccgtgacatgacactggaattgctgtggcaggagtttcgggagcgcgaaccagcaggggtatcctacgcacagttcacccgccactaccgggcttggctgaagcagcaaagactaagcatgcgccaagtccatgcgccaggcgacaaactgttcgttgacttctgtgggcgtaccatgtcgatcatcgacccggcgaccggtacgaagacgcaggcgcaggtattcgtggggacactcggttgctcggggtatctgttcgctactgcagtagcaagtcagacgacgcgagattggttgcgttgtcatgtgctggcccttgaacacttgggcggagtaccgcagtttgttgtgccagacaatctgaaggctgctgttatccgggcgcaacgagattctcttcagttgaacaaggcgtactcggagctcgcccagcactacggcttcaccgtcctaccggcgcgcgcgcgcaagccaaaggacaaatcgctggcggaagtcggtgtgcaaatcgtccagcgctgggtgctggctcggttgcgtaatcatgcatttttctcactggaagagttgaaccggcagatcagccattggatggagaggttaaacgaacgcaccactcgcacttacgccaagaatcgccttgagcgtttccttgagctcgatgcccccgcactacaggtgctgccacaactgcgttatgactaccagcagtggcgttaccaactgcgagtcggagccgactaccacatcgaattcaatcagcatcattactccgtacctcatcacctagcccatcaaatagtcgatttgcgggttagcgccgagtggttggaggtggtccatcaacgccgcgtaattgcagcgcatcgcctgagcgatagtcctggtgtcagcaccttgccagagcacagagctcctaaccatcaggagtttttggatctgcagcccgaagcgttgttagcgtgggcggagctgattggtccttccgtgcgggagttcgttcaccgcaatctaacagagcggcaacactttgcgacggggcttcgagccatcgcgagcctcagaaaagacatgcgccaagagcaggtaccacatgtgcgcctagagtcagcctgcgcctatgcgctgacgctcaattgcctaagcatcacccgccttcgcgccatcttgcgcaatgaagctgatctgcgccgcccactagcacccaacagttcgaccgtcgagcacgcaaacatccgtggtgcggcttactacgccgcccagaaaggagaaactgcatga

SEQ ID NO: 352622 - DNA, 996 bp, Pseudomonas aeruginosa
atgcgaaacaatctgcccgcaaaaaagttggctccaggacgggatgccgcagacattctgcgagtacgtttctggtacgaaggcgtgcgtcaacgtgcaggaatggactccgcctatgaactcgaacagctcttcgaaccagagtcattcagaaggcgcccaaaagacggcaagccatgtcatcgatgcaaatggcagcgctatagagagggccggcatacgccacagaatcgcttagctgagcgggtcgacgcgcaattgccgggggcgatgcaggagctacggcacccattgtgggatgtgttgaaactaaagcccaaccgcagcgcgcttagcgaggctcttttgcaacgcctaatgcctaatgtactggccgtgctatacgagccagtgggtggcacccaggtatattggcaacgagcgcctgttgcgcgaactctcattgccaggctggagcgcattgccagccttgatgcattggccgctttggtctggctgctatttgaagctttagctcaggaccatcgtgagcgcgcaaacaatctaatgcgcagtgtctatgccgtccttctgatgctgggtatctggtggcaggagcgacaactggccgactcaatgatggcgcttttcgccgaacgcatattgccgcttgctgcaccgcaatacctgcgtttcaacatgagctcgcaagatctggtcaaagcatcagcggggctcaatctcgttgtttataacaccgatgttagtcagcgctcagatctgccgtggcagcagagagtacgcatcatgcgtaacctgctatcgggtcacttcgggcttgatgtggccagtgcgttttctcccgtgtatgcgttagcctcctgtgaatctcaagaggtccctcctgctgttattgagcaacttcgactcgacgagcaactgcgtgcttggggctggaattgtatccttgccggacgagatgaagcctttccgccatcgagcatttccctcaagtga

SEQ ID NO: 352623 - DNA, 1314 bp, Pseudomonas aeruginosa
atgcgccatcaatcgaactccgcactgccttcatctctgcctggcctcaaacgattggctaagtcgatcggccggcaacaagaaattccccacttccaagcgctcaaccaggccgcccaaaactgcgggtaccaggattatcaccatgctcgtcgtgtcctggagcgactgagtgcaagtgatctctccaccccgggaagctacagcatctacctgtcggcctattggcgcgacacgtccactaagccgttccggtgggggctggaaacgctgaagatcgtattgcccagtccgctgcttgcggtcgtgcagaagcaccagtgcggtagcgcgcgcaaccttgaagcgttctacatcgagtacgaagatcaccttgagatgcgcgggaatctggagtcacaggtgcgtgctcgcgagctgctttatcgggccgcgctgacgctgcagttcatggaagcaactggtctgcgcccggcaacgaccaaggttcagcggaagaaaatgcagatcgtcgaggaactgcccgagcgcgatcatctgtctcgctggttggccccgtccggacagtgggttgtcctggacgagccctacgatcatgtcaccgagccaaagtcgttggcgtcgcgggcggcctgggtggagagtcacggcttgttctgggctcggccagcgtggagcgggctctattacccggacaatgctgttccccacctgatctgtgccgaccaggcgctactgcagcagttggtaaagacgatcgaggccatgcccgaggtcgtgtcccttgatctaaatgagtggcaaggcactactgctgactacaggtcacaattcgtgagcccggcgcgtgaagttgctggtgcgaagcgcaagccacgccctggcaccacctatgggtttagcaaaaacgcgattgagtactggcgccgcccagggttcaagccgctgtggcgccccgatccgtccatgagcctggccaatcatgttgcgttgggcgagatcctccagaggctgagtgtttccggtctccacatcgatgcctaccacacgctcggtggcattcgatcggagctcgaagactggatgttcgcggaaaactcctggggcaaccggaagtgcactagggaagaggagaatgcctactacagcggaaatgaattcgcgcggtaccggacgcctagggagcagctgaaggccgtagatcgagtgcatgcgattctgacccggtcgtatctcgactgcgctccgctgcgcaagatgctcaagcgcctgactgctgcacgcgctgtggtggcggcatctgcagggttgtag

SEQ ID NO: 352624 - DNA, 183 bp, Pseudomonas aeruginosa
atgaccgccaccgagcgtcaaatcaaaccactgatcaagcctgatgcttttgctcacttcgaggcggaagcgcagcgtctggctagccatgtgtcagaaaaccagcttcgcttcctcaaggtggccaaggctaggggcaaggaaatggagcctgtcggccggatggccggcgcccgctcttaa

SEQ ID NO: 352625 - DNA, 909 bp, Pseudomonas aeruginosa
atgaattattccgatagccagaacgccgtgtgctttgaaaacctcaagcaagcggccgtatatttcgaccatgtaattcctgtggcattcagattcatgagaggccaaggcgaagggagtgacgttgctatcgagattccagaagaaatctcgggcagcatcttggttaatcttgtttttggattcacaccaaacagcaatacggaaaagtggactcgcctaggaaagttcatcgacacgtgggaagcctttgcaaaggcaattcatcaagcgcgagacagattttcaaatagctacgaggatgtaaagcgcctctatctcgatgatgcgccagtgggtacgacatctagcgttagagccgaattcagaaagttcacggcagcgctcggaaagaactactcatcagttctattgccgaccaacacggtacaggagaaccatggcagcgcgtatactactctgacacttgcgcgcatacctttcgtcgatacgtcaaatgccacgtgggaacaagttctggagctgcgcagcgactctgaagcaaagcgcaaactgcgcaatcttagattatttctgcatgagaactacagagacaattctcctgcgtttatctctgacgacttacatcggcggattgaagaattccaagctgctcgcagaaaacatggcttcgagatggtcacaggctcaatatctgcacttttcgacgccaagagtcttcaggctgctgcggctagcgcgctagctggaacactctttggcggcccaattggtgcgctaacatcggctgtaacggttgaaattggatccgttgcgttggaggccgccaagcgaatctacgcaattaaagattttgaaaattcgcacgaacttgcgtttttattccatgctaacaaagcgctttcataa

SEQ ID NO: 352626 - DNA, 795 bp, Pseudomonas aeruginosa
atggacaaggaacgttatcaaggcacaagtggcagaaatatgcccccgcttgggtcgtctacttatggttacaaaccaatgcccaccaacatacaaagacttaggaacgccattgaagaatggcttatccgaaacgaattggacatggatacccacttctactctatggaagagtggatggcacgtaaagaacagctcctaaacgatgccgatctggttcttgtgtttgaaggggggcttcacactttgctgaactacgggggagatacgtcagagttcgatgattatatagagtcttttgggtactactatgagcttggacactcttggaacataggcttttatccaataccagactacgactttcgaccacttttgggttcatacgctcagaggcttcgagatccgcgctggcagcgcaaagcaaaactggtcaaagaacgagccggctggaaatgccaagattgcggcggaacaagccgactcgaaacgcatcactgctactatacacaaatgagcagcggccacgagccatgggaatacccgctcagcgcacttagatgcctatgccacggctgccacgacctcagggcaaaagcagaaagtcggatgagagcctacttggcgaggctaaccacgacgcaattggatactttgcggaacggccttgataacgccttttattggtttgatcaagacgctgttctgtcgctcctattagctctcgggcacagcgacgaaaaaatcagctctgccgttgtcaatttcctacaaaagagaaatggaactgattaa

SEQ ID NO: 352627 - DNA, 672 bp, Pseudomonas aeruginosa; identical to SEQ ID NO: 321489

SEQ ID NO: 352628 - DNA, 273 bp, Pseudomonas aeruginosa
atgaccactatggttgggatatttgtctcgccggacgagatgagtcgctatgagctttgttcattcaacaaactagacttcatacctccagacaataaggccatccgtatagaaatgccaaaactaacaattagagagcttagaaagatcgagcagcagttaccgaagactgatggcatggagctttccctgggttccatccctccatcagacgcggaaaaattctgcaagatgtatcggtacttcccaaattttgctgttatggagtcttag

SEQ ID NO: 352629 - DNA, 579 bp, Pseudomonas aeruginosa
atgaatgtctcgctgatcgacatcgccgaggtccgcatgggctactcattccgcagtcgtctggagacggatgcggagggcgacgtcgccgtgattcagatgaaggacattgacgatgcaaacctgttccatcccgaggggttggcccgcatccagatgcccgacatgaaggatcgccatctggttcaggagggggacctgttgtttcggtcgcggggggtgaccaactcggctgcgcttgttgggggaggccttggccgcgcggtgctggctgcgccgatgcttctgattcggccgaagaccgaaatcgtcgagcctgcctacctgcagtggttcatcaaccacccgactacgcaggctgtgcttgccgggcaggcggccggaacggccgtgaagatgatcggcaagggggtgcttgatgacctcgtggtggcactgccgccgcttgagaggcagcgactcatcgtcgaggtcgcacagctcgcgtcgcgcgaggcggccttgctggaggagttgagggggcgccgaaaggcgctgctcgaaagaatcctgctgcgagaagcgcaggaggcccgctga

SEQ ID NO: 352630 - DNA, 243 bp, Pseudomonas aeruginosa
atggccaacaaggcttcatccagcaacacgcggcacgtcgtgccgaaccccaacggtggttgggacaacaagcgcggcggggcgacccgtgccgggtctcaccatgacaccaaacaggacgccatcgacgccgcacggcgcatgagtcagcgtgagggatcggaactgaagatccacaaccgcgacgggaagatcggtcagtccgacagccacggcaacgaccccaggaacatccccggctga

SEQ ID NO: 352631 - DNA, 1581 bp, Pseudomonas aeruginosa
atgaccgaaaagctgtctcaacaagaagtcaatgccacagcctgggccgcgtgcgacacgttccggggcgtggtcgatcccgcgcagtacaaggactacatcctggtgatgttgttcctcaagtacatcagcgatctctggaatgaccactacgccgaatacaaggcgcagtacggcgacgacgaccagcgcatccgccgcaagctcgagcgcgagcgcttcgtcctgccgtatgtcgagttgaaagaagaggattcgcagaccggggaaagccgcgtcatcgaccgcttcctgggcgacttcaacgcgctgtacgaacgccgcaacgagcccaacatcggcgagctgatcaacatcgtgctcgaccacgtcgaggacgcgaacaaggccaagctcgagggcgttttccgcaacatcgacttcaacagcgaagccaatctcggcaaggccaaggatcgcaaccgccgcttgaagaccttgctggaggacttcgccaagctcgacctgcgcccgacccgggtatccgaagatgtcatcggtaacacctacatctacctgatcgagcgctttggatcggatgctggcaagaaggccggcgagttctatacgccgaagatggtctcacggctgttgtcggcactggcgcgaccgaagccgggcgaccgcatctgcgacccgtcctgcggttccggcagcttgctgatcgaggctgcgcagatggtcgaggcgcagggcagccacaactatgccctcttcggtgaggaggtcaacggtgccacctgggccctcgcgcggatgaacatgttcatccacagcaaggacgccgcccgcgtcgagtggtgcgacacgctcaatagcccggcgctcatcgaaggtgaccggctgatgaagttcaacgtggtcgttgccaacccgcccttctcactggacaagtggggcgcggaccacgctgacaacgaccgcttcaaccgcttctggcgcggcgtgccgcccaagtccaagggcgactgggcgttcatcaccaacatgatcgagcgcgcgctgccccaggaaggccgggtcgcggtcgtcgtgccgcatggggtgctgttccgcggcggcgccgaaggccgcatccgccagaagctcatcgaggaaaacctgctcgatgccgtcgtcggcctgcccggcaacctgttcccgaccacgtccatcccagtggcgatcttgctcttcgaccgctcgcgtgagaaaggcgggtcgcgcgaacacgtccgcgacatcctgttcgtcgacgccagcagtgaattcatccccggcaagaaccagaaccaactttccgaggagcacttcgagaagatcgtcacgacggtggccgcgcgccgcaacgtcgacaagtacgcctacgtggcgtccctggatgagattgccgagaacgacttcaacctgaatatcccccgctacgtcgacaccttcgaagaggaggaagagatcgacgtcgcggccgtacagcgcgagatcgaccagctggagcaggagctcaccgaggtccgcgcccggatgcgccgacacctccaggaactgggtgtggaggtggtctga

SEQ ID NO: 352632 - DNA, 219 bp, Pseudomonas aeruginosa
atgacgggcgaactcaagctcgaggcgctcctgcagttcaacaagcgggaggtgctgacccacgcgggaaacatcggcgcccaagtcgcggaacggttggcgcaggcgcagtacgccgagttcgatgcccggcgcgattggcagcagatgccgagtacgcaggctcaagaacagatccagcggcagcttgagcgcaaggtagctgggaggaagaaatga

SEQ ID NO: 352633 - DNA, 1179 bp, Pseudomonas aeruginosa
atgaaatctggaatcacacgccgccttggagagattgctgatgttcagcagggctacacgttcaagcccggctaccaggggcagtccgcaggggaatggatctacgcgaaagtcgccgacatcggctctccgtcaagttcaaagtacttgcgcaagtccctgaactacgtcagctccgaggtactacgggaaatgcgggcgaccccgtttcctgcagggagcatcgtcttccctcgcgtcggagcggctcttcgaaacaataacaagcgaatcctcgccgaggacagtctgaccgacgataacgtgctcgtcgtcacggtgcgggacaaagacatttgcgacccggagtatctctactactggttcgattttcacgaccttcaggacttttgcaactcaggaaccgtccctgtgatcaacggacggaacctgaagctccaggatgtaccgctgccgaacatccagatacagaggaaaaccgctggcatcctctccgtctgggacgatgccattgagaaatgcaagcgcttgagtgaggcgaaagagcagcattacattcacgagctttcgcggctaatcagcagggcacatcacccacacagtcacattggtgcctttgcgcgtgaacttagcgaacgtaaccggcaaggcaacgaacgcgtcctgagcgtgaccaactcgcgaggcttcgtattacccgaagaacaattcgaacggagggtcgcgagcaccgacctgtcgaattacaaggtggtgcgacgcgggcaatatgcctacaacccctctcgtatcaacgtcggttctatcgcacgtctcgatggatgggacgacggcgtcttgagtccaatgtacgttgttttcgaaattgacgagaccaaggccgagtcggactacttcgtgcattggctggattcgcatgaggcccggcagcgcatcaagaatagcgctcaagggagcgtgcgcgaaaccgtctcgttcggtgatttcgcagctatccatttcccactgccagaaaggcaacgccaaaccagcattgcggcgtatttgagctgcttgcgcaacgaaattggcctgcttgagcggcagactaaccagcttcgccttcaaaagcgcggtctcatgcagaagctgctgaccggcgaatggcgcgtgcccgtcgccgaggaggcggtcgcatga

SEQ ID NO: 352634 - DNA, 840 bp, Pseudomonas aeruginosa
atgaagttcgcgtacatcgatgagtccggagatgccggcgaaggcgacgtgttcgtcatggcagggttgctgatcgatgcctatcgcctgcgcaagtacacaagccagttcgatcaggccctttccgcgttcctggtgaagcatccgggcgccccaaaggaactgaagacaaaggccttcatcaatggcaaaggcggatggaacgtcgttgcgcccgatgaacgcaagcagttcctcacggacatgtgcgacctggccgtcgaagtatcgaagatctacggcttcggtatgtccttccaggccttcaatgcggcgtgcgctggtggcgcctacgcgatccccggctcgaaggactactggcctctgaccggaatgttcatcagcggcctgatccaaaagaagatgcagacgcagtcaaacaacaagggtttgtccgtcatcatcttcgacgacaacaaggttcacatgcccaagctgtcggatgggctgtattacgcgaatccctggttcgatgggctctaccagcagagcaagaccgtcaaaggcaaaacggtgtggcaactgcccaagctatccgaacgcttcgaccaggtcatcaacaccgcattcgcgatcaagtcggaacattcctcgctcgtacaaattgccgatgcggtttcatatgtgtatcgcagatggctggagcttacggcgctaccggaggcctatccgggggaaaaggcgttctacgagggtctggttcacaagctcgatggccgacgggaaaggttggggcgtacgccgaaagccgagtgcgtcgacttctacaacgcgatcaagcacccggcatgggtgatctga

SEQ ID NO: 352635 - DNA, 1623 bp, Pseudomonas aeruginosa
atgagcgaaacagaactgcgaagcactggcgacgcacccgccttcacgcatagggagcccgtgcgggtccgtgagcgcgagctgcttcgtgtcgcggcggcgctctccggcaccgaccacgttgccgcagccagggcagcccgaagcgaggtgctgtcatgggcggcgaaacagatcagtgatcagctgccggctgctgcggcagaggggcaatctttcgagcatcttcggggcggccgaacctgccttggggcgagcttcgaagatggccgccgcgctctgtgggccctgcgggtggatcggccggatgccaacgtcgcccagcgcacctggaccaccgagatcgtcattggatacgcgcctaccagtggacctgccctgttcagcctgcggctgctggtcagtacgcccgaggcattcctgcccattgaaccttctgttccgggattggtacggcaagtcgctacggcctgcggtctgcagcacggtgatgctcgcattgatggattgccttggttcatcacctcccaggccgacgcggaggacttggtcggcgaattgaccagccctagccgctccatgccctacttggtgtgttctatcgctgagggggagttcgctccccggttcgatgttcgcttgttggcaaaggccgccctgggaattgcaagggtggttgtcgtgccgtcagtccatacctgggtcttaacggagcagcttggcaagccccggtcggtctacaacggcgccgtgcgcgcctacatgcctgggttctcgcaagatgcgaacccttatgcgcaccggctgttcttcgtcgagccagtagcagacgatggccgagcgagatcgaccctcacggcgctgcgttggcttgttgcgaacgagagcttgcgtcgcttgcggttgggtgacgacgttgttgccttctcagaggttcgggaatcgagtctcgacttcgagcggaaacggctgaagcaggccggttcatcagaggcagagcagctcaaggctgctcagattcaggtcgacgcgttgaaggacgatctggaacgctccaaggctgagactgaacagtggctgtccgagtacgggcgtgctgaggaagaagctcagaactatcagctgcagttgcgtggcgcccaattccggattcagcagctgctggcgcagatcaaggaacgcggcgatgagccagactcagccgtccaactcccggaaagctgggacacgtttgccgattggtgcgacgagatcctcagcggccgcgtcttgctctccagcagggcacgtcgagagaccaagtctgccgatttcgatgatccacaaacggcagcccgctgcttgctttggttggccaacgagtaccgcgattcgcggatgaacggtgccgccggagacctccgcaagcccatcgccgatagcatccacaacgaacgctgcggcgccgacacgtttgacttcgcctggaatggccgccaagtgccagtggaatggcacatcaagaatggtggcaacacccgcgatccacggcgctgcttgcgcatctattacttttgggacgaagagagccaggttgttgtgatcgccacgatgccggcccacgttcggacgggagcgacctga

SEQ ID NO: 352636 - DNA, 3210 bp, Pseudomonas aeruginosa
atggaaggatttcgattcaacgagaagtacctgtcgcagatccctgccctgcaggtcttgatcaacctgggctacacctatctcacatccgagcaggcgctggcagcgaggggctgcaagcctgggcaggtgctgttggaggaggtgctgcgcgagcggctgaagaagaacaaccgcatccagtacaaggggcagagctatctcttctccgaggaaaacatccagaccgccatccagcgactgaagaacgtcaagtacgacggcctgctgaagaccaatgaggcgatctatgacttgctgaccctgggcgtgtcgctagagcagtccatcgagggggacagcaagagcttcacactcagctacatcgactggaagaacccggccaacaacgactaccacgtcaccgctgagtttcctgtcgagcggacgcgcagcacggaaacctgtcgcccggacatcgtgctattcgtcaatggcatccccttcgcggtgatcgagtgcaagtcacccaaggtggagatcggtcaggcggtgtcgcagatgatccgcaaccagcgcgaggagtacatccccaagctcttcacgtacacgcaactgctaatcggcgtgaacaagaatggcgggcagtacgcgacgacaggcacgccggccaagttctgggcgttatggcgcgagcagttcgacgaagcgaaggccgtcgcagcggcggtcaattcccccctgaagccccagaacaaggaggcgctcttttctggcgacttcgccatcgcgcgcacgttcttcgatgcgttggaacgggagggcgagcgccatgtgaccgagcaggataggacgctttacagcctgtgccgccctgcacggttgctcgatctggcactgcagttcaccgtctttgacgggggcatccgcaaggtcgcccgctaccagcagttcttcgccatcaagcgcgtgatcgaacgggtgaagcaccgggacgacgtgggaaggcgtttgggcggcatcatctggcacacgcagggttcgggcaagtcactgacgatggtgatgttggccagggcgctggccctggaccccgacatccgaaacccacgcatcgtcctggtcacggatcgggtggatttggacaagcagctcggcaacacatttgctgcttgcggcctgacgcctgaccgggcggacagcggacgccacttgctggagctggtctccgagaacaaagcgcacatcgtcaccacgctcattcacaagttcgacaaagcgctgtcgatcaggaagcacgtcgaggaatcggccgacatcttcatcctggtcgatgagagccaccgcaccaacttcggcggctttgccgcgcgcatgcgccaaatgttcccgatggcctgctaccttggctttaccgggacgccgctgatgaagaaggagaagaacaacttcgccaagttcggtgggttgatcgacacctacgcgatcaatcaggcagtcaaggatggggcggtggtccctctgctctacgaggcgcggcatgtggagatggagcagaacgagaaggccatcgacacctggttcgagcgccacacccagggtctgacggacgcgcagaaggcggacctgaagaagaagtacagccgggcggagatgctcaacaaggccgaccaggtgatctacatgcgtgccttcgacatcagcgagcacttccggcagaactggaagggcaccggcttcaaggcccagctcgtcgccccgagcaaggcggccgcgctgacgtacaagaagttcctcgacgagatcgggcacgtgaccagcgaagtcatcatctcgcccccggatacccgcgagggcaacgaggagacggacgacgagccgactaatgaagtcgtcgccttttgggaacggatgatgaagcggtatggctccgaggaggagtacaacaagcaggtcatcaacctgttcaagcacggcgacgacccggagatcctcatcgtcgtcgacaagctcctgaccggcttcgacgcgccgcgcaatacggtcctgtacctgacgcgcaagctgcgcgagcacacactgcttcaggccatcgcacgtgtgaaccggttgtatgacgatgacgagggcacgcaacccaaggagttcggctacatcatcgactacgccggcatcctgggtgagctcgaccaagcgctgaccacctacagcgcactcgatggattcgacgaggcagaccttgcaggggccttggtcagtatcaatgaggaagtgaccaagctgcctcagcgccacgccgatctttgggacctcttcaaagaggtcaagaaccagcacgacgaagaagcctacgagcagctgctggcggacgaaaagctgcgggagtccttctacgagcgactggcagcctacggcaagacgctgtcaattgcgatgtcgtctgagcagttcatcgcatcgacgcccgagaagaagctccagtcgtacaagaacgatctgaggcggtttacgaacctgaaggcgtccgtcaagttgcggtacgccgagtcggtggactaccgggacttcgaacccaagatcaagaagctactggacacgcacatttcggcgagcgaggtggtccgcctgaacgagcccgtgaacatcttcgatgaggaggcgttcaagcaggtggtcgaagaacaaggggagactaaggccacggcagccaaggcggatatgatcgcgcacgcgaccaagaaggccatcagcgagcgcttggaacaggaccccgtgttctacgagaaattctcgaagctcatccagcaggccatcgacgacttccgtgccaaacgcatctccgatctggaatacctaaacaaggtcagtgagatcaaggacgcggtggtcaaccgacgcagtgacgatgccccggcgcagttggccagtaacgacaatgcccttgctttgtatggcgttctcaagccctatgtgctcggccacgtgaaggcggaagagacagcagcgacgcttgctgccgactctgctgtcgacatctggtcgatcattcaacgaaacaagaaggtgggcttttgggacgacttggacgcacaacgtcgaacgatgaacgagatcgacgactacctgtacgacgaggtcaaggacaaaaagggcgtcgagctgacgaccggcgagatggacgacatcatcgaccggacgatgcagctggctcgacaccggatggcggtatga

SEQ ID NO: 352637 - DNA, 729 bp, Pseudomonas aeruginosa
atgagcggacggaacggctcggtctgctacggcgacgaggtcatccgctatgaggtcatcgagcgcccgtcgagacgaacacttggcatcgaggttcacccgggtgggcgcgttctcgtgctcgcgccgaggggatgcgatgacgcaaccatagacgagaagcttcgcctgcgcgcagggtgggtcagccgtcagctggaaacgttctcgcgttatgaaatacacaccgcgcccaggcagtatctgagcggtgaatcgcatcgctacctgggacgacagtaccgcttgcgcgtcaaggcaaacgacccggacgcctgtcaggatcaagtgaaactgacccgcggcgaaatgttggtcatcggcccagggggactggccccctcgaaggtgaaggagctactgcgacgctggtatcttggtcgagcccgtgaggtgttcgatgctgtgctgacggatgcctttgatacgttccagcgacttgggcacgagaggccacgcatcgtagtacgcgagatgcgtagccgatggggaagcttgtctcctggcgggcagatgaccttgaactcacggctggtgcaagcaccacgcccctgtgtcgaatatgtgatcgtgcacgagctctgccacctggtgcacaagaatcacggctcagagtttttagctttgcttggacagaccttgccggattggcaggcgcgcaagcagaggcttgaacaggccctactctga

SEQ ID NO: 352638 - DNA, 1128 bp, Pseudomonas aeruginosa
atgacacaggacgatagttcatccagaagcgagcagggcgagcccgggaagaaagggctcaatctcgatctgctgttcagaccggcaactgccgtaccgacgtccgtcggtacgctgtacctgtacggtctgcgcacttcggaccttagcgcctgggagacgctgcccggcgaggagcctatcgcccgcatccgggctttcgtgcctcacatagcgagcctggtcgaggcaacagggttcaaggacgaacggctgccgctggcagctgaggacgttgatcggctctccgacgcagagatggaacatgtcgccgaggtctatgccgagacgcttctccgtgggccacggatcgatggcgaggaatcggcgaagcctgagcgcgaaaacgccgaaccggcggcagcctacctagaccgactgctgaagcacgaagcccaagaacagtcgcaacagctacgaagggtgcgcgagaagatggtggcatcgaccagcagcatcttcgatcaagtccgaaggagttctgcaaccctgggatcgactctcagcgcgttcgagcaactgacgaagagttcacccacggtcgagattcgctcgccgagcatggatcacttccacgcgatgaacgagcactttgctcgccaggcgcgcgaacgagctgaagagctcgagatggtcaggctgaccgggaagatgaccgctgagtccgccaagacgctcaaggacctcgccgaggcggcgacggtgttgctggaacaattagacgagcgcgacaagagagctgaccgctccacgcgcaagcagatcaccatcgccgtctggtcagtcggcatttcggcggtgctggccttgttcgccttaattgtttcggggctggcctacctccaagacaaggataacaacgcggccggagacaaatggcagacggaactgatcgccaccgttcgggatggcagccatcagcgcgataccaacgagaaggaagcgcagcgcctgcgcgatcaggttgccgaacttgaagccaagattgcgcgcatcgagtcggctcaggctgcagcttcgccgggcaagagtgcagattcagctgcgcggcgcgccaccaatcccggcagcaccttgccgccgctgtag

SEQ ID NO: 352639 - DNA, 474 bp, Pseudomonas aeruginosa
atgatggaggtgccaacaacggccattgaactggcaatgcgcttcgagggatttgagcgcagggtgaagcgcggcacggaaataaccgccatcccctacgtgtgcccggcaggcttctggacaattggctacggccacctgtgtgacccgacgcatccgccgatcacagaggccgaagccgaggcctatctcgcgcgcgacctaatgaccgcgctcaacgccactttgcgctactgcccggtactggccaccgagccggaggggcggctcgcggccatcctggacttcacgttcaacctcggtgcagggcgtctacagacgtcgacgctgcggcggcgggtgaaccagcgggactggcaggcagccgcaattgaactgcgccgatgggtctacagcggcggcaaggtgctgccgggattggtggcgcgccgcgcagctgaatctgcactcttgcccggcgaagctgcagcctga

SEQ ID NO: 352640 - DNA, 300 bp, Pseudomonas aeruginosa
atgactgaatctgaaaaggtgactccggcagagaacacgatcctcctgcggcgggaggacttcgatgaattgctggcccgtgccgccgaacgcggtgccgagcgcgtgctcgcccacctcggcctggaaaacggccatgccgcccgcgacatccgggaactgcgtgatctgctggatgcgtggcgtgacgcacgccgtaccgcgtggcagacgaccatcaaggtcatcaccaccggcatcctggcggcgctgctggttggtgcggccatcaagctcaagctgatgggaggcacgcaatga

SEQ ID NO: 352641 - DNA, 354 bp, Pseudomonas aeruginosa
atggcagcaatgcaaggcccgaacctgggcgtgaactacggctgggccgcccgcgagtcggggtggaacaccggaatggatgccaacctaaagctgctggacgccgtgctgcagttgtcggtgaagtcgcgggcgcaagccacgccgccgaccacgccaacgaacggcgaccggtacatcgtggcacccagcccctccggcgcgtgggtcggaaaagccggccagatcgccgtgcgcatcgatgcgggatggtcgttctacgcaccgaagatcggctggacctgcttcatcgaggacgagggcgtgctctcggcctacaaggccaccggctggagtgcagggctggccatctga

SEQ ID NO: 352642 - DNA, 2223 bp, Pseudomonas aeruginosa
atgagcgggggcggcaaaggcagcaagagcgtcacggtcggctaccgctactacgcggggatgcatctggcgctgtgccacggcccggtcgattcgctcaacaagatcgtggtcggcgagcgcacggcgtggtcggggtcgctgacgtccagcggccggatcgccatcgatcagccgaatctgttcggcggcgacgagcgcgaaggcgggatcgtcggcgccgtggatctggtgatgggcaacgcgtcggacggccagaacgactacctggtgaccaagttgggcaccaacgtgccggctttccggggcgtggtgtcgctggtactgcgccagccgcaactgtcggcgatgaacccctacatcaagccgtggagcgcggaagtcacgcgcatcatccgccgatctgacggttctccgcagtggtactcggacaaggccgccatcgcgggcgacatgaatccggcgcacatcatttatgagtgcctgaccgaccgcatctggggccggggctacagctcggcagaaatcgacgacgcctcgtttcgcgccgccgccgacacgctctacgccgagaacttcggcctgtcgatcctgtgggatcagcagcaggacatcgaggccttcatcgagcgcatcctgcagcacatcgacggctcgatctacgtgagcccgcgcaccgggctgttcacgctgaaactgactcgcgacgactacgatccggcgacgctgctggagctgaaccagaccaacgtgatccggcttgagtctttcgagcgcaccttgcccgaggagctgatcaatcaggtcacgctgtcctaccacgaccgcacgaccgacaaaagcgtgtcgatctcggtgcaggacatcgccggcatcgagcggtctctgggcgaaatcaaggatgccaaggtcagctacgagggcgtggccaacggcgccttggccgcacgcctcgcgatgcgggatcttcggcaattgtcgtccaccttggcgaagatcacgctggtggccaaccgcactgccgccagcctcaacatcggcgacgtgttcaggttctcctggcccgagttgcggatcgagcagttgatcctgcgagtggcgcagatcagctatgggacgctggccgacggccgtgtgcggatcacctgcgtcgaggacgtgttcggcctgcccgacgccgtctacctggcgcccgccgcgagcggctgggtcgatccccggcaggcccccatcccggcgaacttcgtgtcggtgagcgaactgccgtactggacgattgttcacgaactgaccggcgagtcggccgcggcccaggccgagatcgattcgaatggcgggttcctgtccgtgtcgacggtgcgcccctcggatggggcgatcaactatgcggtgctgacccggcagggatcggcggccttcgagaagataggcgtcggtgacttcatcccgtcctgcgtgctggcgaacgacatcgggcaaaccgagacggtgttgaacgtgctctacggcgtggacctcgacctggtgacgctcgacacctacgcgctgctcgatggcgagctggttgccgtgaaagcggtcaatgtggccgccggtaccgtgacggtggatcgaggcgtgctggacacggtgccggcgaagcattcggccggcgcccggctgtacttcgtcgagggcggacagttctacagcacgacccagtacctcagcggcgagacggtgcaggccaaggtgctgcctgccaccgggatgggcgtcctggcggaagtgtcggccaccgcgatcggctacaccttcgccaagcggcagatccggccctatccgccggggaagtttcgggtcaacaacctcgactacggcctgagctacatcaccggtgaggtgacggtcagctgggcgcaccgcagccgggtactgcagaccgcctatctggtgacgcagggggaagcgaatatcgggccggagcctgggacaacttatacggtgaggatctacggcgaagccggcacgctcaagcacaccgaaacggggctgaccggtacgagttggacctatccgatggccaccgagatttccgagagcggcctgaatcggccgaacgagaaactgaccatcaaggtcgaggcgatacgcgacggccacaccagctggcaggcccaacaaatcgacatccccgagtgccggggctacgacatgttctacggggcaagttatggcgaatga

SEQ ID NO: 352643 - DNA, 216 bp, Pseudomonas aeruginosa
atgattgctacccatctcgatgccaaggccctcggctattgcaacgccgggctgcgccgttggtttccgcgcgacggggtgaccttcgatctgttccgccagcagggcgtgagcaccgactggctgcgggccaccggggatgcgatggccatccggctggccgagtacgtcgagcagcaggccgcttctgtaacgaatgagggagccaaggtatga

SEQ ID NO: 352644 - DNA, 231 bp, Pseudomonas aeruginosa
atgtggcaatacctgatcgtgtgggtgatcacgacggtcctgtcgtcgctgctcgccccgaaacccaagaccaccacgccgcaacccggcgatgtcgatgctccggtcgccgcgaccgacagcccgatcccggtgctgtttggcacgcggacgatcaagcagccgaattgcgtctggttcggcgatgtgcgcacgacgccgatcaagaccaagggaggcggcaagaaatga

SEQ ID NO: 352645 - DNA, 804 bp, Pseudomonas aeruginosa
atgacctatcagagctttgaggcgagcctccattcggggcagccggtcgagttgtaccggttcgcgctgggggccaccgtctggtgctacacgtcggcacgggatgccgtgagctacaacgccgagaagtacaccccggcgccgatccggcgctcggagatcgagcagacgcaggaattcggccgggcgatgctgaacctggaagcggcgctcgacatcggcgtcgtgcagtccttcatcgtgaccccgcccgatggggtgctgtcgctcaccatctttcgccagcacctgaccgacctgggcgccgagttcatcacctggtggaaaggccgcgtcgtctcggtggtgttcggcggcgtcacggtgcagatgcgctgcgagccgattttcacgacgctcaaacgttcggggcgccgggcgaactaccagatcaactgccgccatccgctctaccacggcggctgcaaggtcaactctgccgactacaaaaccgccggcatcgtcgagagcgtggcggggctggaggtgaccgcctcggtcttcctgcccaagccgatcgcctggttcgtcggcggccggctgatggccgccggggcgcaacggatgatcgtcgccagctccggcggcgcggtgaccctgtccgcgccgattccgggcctgaaggccggcgacgcgttcgaggcgtatccgggctgcgaccacacactcgcgacctgcgccgccaagttcggcaaccaactgaactacggcggctttccctacatcccggtgaagaacccctttaccggggacgccatcgtttga

SEQ ID NO: 352646 - DNA, 1683 bp, Pseudomonas aeruginosa
atgcccgacttcgccggagccttcacgtcgagcgttctgagcggcgcagcagccgcagggatgaacaacctgtgggacgatggtcggcccgcgtactacgcacccaccaccgtcattgctgccattaacggcgcgatgggtgtcatcgccagcggccaaccttcgcccgaggccttgattgctcgggcaggctcgcactgcgccgccttctcggacgactactaccaccggatctacttgtcgccgtcccggatcgagttcggcaacctcgtcatctccgcgacccgtaccgtcgaagtctggaacgcgttcctggacccggtgacaatcttccagcttgacggcgacaccgagggcctgtccctggggttctttccgcccgcgaggatgcgggggctggaggacatcttctacgacgtcacggcgacgctcgacggaccgagcttcgtcgatacgctgctgacgctgcatttctcggccggcggcacgcgcaatctggcgatcagctatggccgggtgctggtcatgggcctgctgcacgactggcaaggcggcttcaccgagcggctggagtggctcaccgacgtgctgacgatgcgcagtggtgccgagcagcgggtacggcttcgcgctgatccccggcgctcgttcgagttcgatgtgctggagtacggcaacggcggtcagctcgatctcctgatgaacgtctggcagtcgcgggtctatgcggtgccggtgtggaccgacaaggcgcggctcgcagccccgatctatcccggcgacaccgtgctggccgtgagcacgacggatctcgactaccacgccggcggattggccatcgtcgggtcgaacaccggcgccaccgaggccctggaagtcctgtccctgaccgccgacacgatcacgctcaagcgcccggtgctcgggaactggcccgcaggcgcctggatcgcgccggcccggctggggcgtctgcccgctcagcagacggtcaatcggccgacggcggcaattgcccaggcgaagctgcgattcgagctggaggatctggcctcgacggtgacagcgactatttcgcccatccagtaccggggctacgacacgctgctgcgtcatccgaatcgggtcgaggacgtcagcgtcgagtaccagcggctcgtcgacgtgttcgaccacgagaccggcacgccggcggtgatcgacattcccaatcgcgctttcatcgtgcgccgctaccagtttctgctgccggatcgtgcggacctcaccacgatgcggggctggctcgcagcccgcgccggccgccaagtgccgttctgggtgccgacctgggagcggggcctcgaggttgcgcagccctttgcgctggatgcgaccgcaatcctggtccaggcccgaggtttctcgacctattaccagaccatgcccggccgccaggatgtcgccttcctgcacaacgatggcacttggtacctgcggcagatcgccgccttcgagttcgtggacggggtggtggaacggatgcggatcgatgcagccctcggcgtcgcctgcgcgccgtccgatttccggatcgtctgcttcctggaactggcgcggctggagagcgatgccgtggagatcttcttcgagacggatcgcgtgacgcgggtgaccttgccacttcggagcatcaacggatga

SEQ ID NO: 352647 - DNA, 1143 bp, Pseudomonas aeruginosa
atggcttacatcaccggcgcgtcggcggacatcaacacgctgctgactgccatcaagaatttcgcggtcgccaacggctggacggccaacgcaaccgacacctttacgctgactttcccgacctactcgtcgaatggcggcgcgacccatgccggcacgacgtcgatgatttcctcggtcagcagctccgatgcgtacaagaaccagtcggaaacgagcctgaccgcgaaccgggtcgtgctgaccaagaacggcgtgtcctaccaactgttcgcagtcaacaagaagctctacaagaacggggtgaacggcacctatagctgcctggaggcctgggtttgcgacggttttgctgccggcacggccgccaacctgcagagcaacaaccgcaagttcgtgatggtcggtccgatggccacctcgctctatgcctaccacctgttctccaacggcgacttcgtgcatgtggtgatcgaggaaacgccgggccgattccgccacctgtccttcgggttcatcaacaagtacggcgctttcgccggaggccagtatttgagcgcaggctgccccatcgaatcgttcacgaccacggcctacgccttcaacagctcgaatcagatggtcccgttcggatcgaacggccaagggctgtcgcgatcggcgctcgcgtcgaacggttatcccggtacctacgtccgggccgacatcgacggctggacggtcggatggcgcctgctttcgaccggtgtctgggatacggccaacctggatgcctacggctgcacgacgtattccaactcggtgaacaaccgcgcaggctatatctcggggggaccccaggtttccttccacaccctggcacacgatctggcctaccactgctccccgcagagctacaacggcctggcgccgatgatgccgtgctacgtcggcgtgaaccgcactccgtacgtcggcacctggacgctgctcggtgagtttcccgatgtgcgctttctgaacatcgccaacttcaacccgggcgacgagctgaccctcggcaccgacgtgtggaagatcttcccgctgtggaacaaggcctacacgctcggggcggaaccgatcagctacgactacggcctggcttaccgcaaggtggtctga

SEQ ID NO: 352648 - DNA, 972 bp, Pseudomonas aeruginosa
atggcctggacctccggcacggcaacgaatgccgccgatctcttcaacaagctgatcacatttttgaccgccgatgcgacgctggtcgccggtggcgaggcctggagcctgctgcgccgcgacaccttcacgtcggatgcgaaacgggacctggtcgaactgcgcggccccggctcctcggcgggcgatgcgatctacgtgcagatttgtctgttcgccgacgcggcagcgcccgcccattcgattcgcatgctcggctcgcagtcctggcaaagcgccgtttcgatcagcacacccgagggtcagccgggcagtctgctctcgggcgccggctcactcggcatcgtgccgaggatgccggtgttcaacagcgcgatcagctactggttcgtcgccaacgggcggcgcttcatcgtcgtggcgaaatcctcggcgtattggggcgcgctctacgccggcttcatcctgccctacggcacgccgtcgcagtacccgtatccgctcttcatcggcgccaacacgtcgcgcggtgacaactatcagagtgcggatctcgacatcgccaacagcgccttctggcgtaacgacggcgaatacggcagctacagcgcggcgatcctgcagccgagcggcggctgggtcggcacgaaccgcttcgatacgacctacaccggccgcacctggccctgggcgatgtcgttggagacgcggaagaacagcgtcgggcgctacgacctgggcaatctcacgcagttgccaagcggcgcgagcccgttgctgccggccattctctacgactgcgcgacctcgcgtcccttcaacatctggggcgaactccagggcgtgtttgccgtgccgggcttcggggtggccgcaggcgacaccgtgaccgtggccggccaatcccatctggtcgtgcaggctgcgacctccaccaatgcggcgcgcttcgccgccatccaactgaactga

SEQ ID NO: 352649 - DNA, 3378 bp, Pseudomonas aeruginosa
atggcgaacaaccgcgcccagatcctcatcaccgccgtcgatgagacgcgaagggcctttcagtcgatcaatggcagtctgtctcagctgcgcgaccaggccggtcaggtcggcgccgttctgtcccgcatcggtggggccatcggggtcggcttgggcgtgcgcgaactggtggaggtcgccgaccagtacaagaacctgcaggcgcgcctcaagctcgcggtgaccacgcaggaggagttcaaccgcgccgatgccgcgctgttcgagatcgcgcagcgcaaccgcgcgccgctggcagagaccgtcacgctctacgcgcggctggccccgtcggtgcaggcgctggggcgttcgcaggcggacgtgctggcggccaccgacgccatcggccaggccgtgtcgctttccggagcgtccagcgaggcggcggccggtgcactattgcagctcgggcaggccttcgcctcggggcaactgcgtggcgaggagttcaactccgtcatcgagcagacgccgcgactggcgcaggccatcgccgacgggatgggcgtgcctctgggctcgctgcgggccctggcccaggaaggcaagatcacctccgcagcggtgctcgatgccttgctgaaggagcggacgcgcctcgccgaggaatacgcgagcctgcccgatacggtgtcgggcgcgctcacccgcctcaagaacgccttccagcgcgccttcggcgagcgggatgccaattcggggctgaccgctggcctcgcgcaggcgcttcaactggtcgcccagcacctggaactgctgatcgatctggccggcgtcgtgctggtcgccgccttcggccggatggcgggtgcgtttgccaccagcatcgccgccgcccgcgccgaagcggcagcgcggctggccaacctgcgcacgctcgaagccgaggcgctggcgcgggtgcgcgtggccgataccgccctggcccaggcgcgagcgcaaggcctcgccaccagcgcgctggtcgccgacgcggccaaggcccggctgcaagccaccgccgccaccaacgccgtgacgcaggccgtcgcttccacatcgctgctggggcgtgcggcggggctgttgcgcggggcgctggcgctcctgggcggccccatcggcgtcatcgtgaccacggcgacgctgctggcgggcgcgctctattcggcgcgcaatgcggtggtcgagttcggcggcaagaccgcgtcgatcaagcagatcgtcggcgccacctgggacctggtggtcgagaaggtcggcgaagtcgtcggcgccctggggcgactggtcggtgccaacgacctctcctgggcccgcgtacgcgaagtgatggtcggcgcgatcaaaaccatcggcacgacgatccgcacgatgatcaatggcgtcatcggcgcgttcaatgcggtcggcagtgtcgcgggcatcacggccgccttcctggtcgagcgcttccgcaatgccttctccgacatcggggaactggcgcaggcgctgggccaggacgtggcggcagccttcagcggcgacttctcgatgtcttcgctgcgcgccgccctcggtcgccgactcggcgagatgcgcgacttcggcaaggagctcgcggggaccgtgcgcgacgcggtcacgcgcgactatgtcggggaagccgcccaggccatcgccggccgcatccgacccgaaaagactcagcccggcgtcttcggccgcccgcaaccgccggccaaaccgacgcccgacaagggcgtcgaggccgcgaatctcgctctcgtgcaagcccacgccgaggcggaactcaagatcctcaaggacgcgctggagcgccaggcgcgcacactggacgcggcgctcgaagaccgcttgatctcgctgaaggactactacgcagcgaagacccggatcgagcagcaggagatcgacgcggaaatccgtcgcgcgcaggtagcgctggcggaacagcaacgcttggtcaaggcgggcaaggacgagcccgctcgtctcaaggcgaaagccgagatcgccaagctcgaggcggatctgaccgtcctcaacaacaagcgcgccgacgtcgaagtcgccaatgcccgcaaggccgtccaggccgagcgggagttgcgtgaggagctcgccaaggtccgcgacgaactgctcgatctcaccggcgccgcgaccagccaggatcgaagcgcggccatcgcgcgccagtaccagagcctgatcgagcggctgcgcgccgagggcgacaccgacggcgtcgccacggtcggccgtctgatcgacgtcaaagctgcacaggccgacctcgcagcattggaagcgcagtggcggcaggtcactgaacggctgcgcaatgcgcaggaggcgatccaaacccagcaacaggccggtctgctgagcgagtcgcaggcccgccagcagatcgtggccttgcagcagcaatcggccatcgagatggaacgcctgctgccgacgatgcagcaagcggcgcaggccatcgggcccgaggccgtgatccgcgtgcaggcgtggcgcaatgaactggcgcgaaccaagctcgtcgtcgacgaaatggccccgctgtggaaccgaatcggcgagagctttggcggggcgctcaatgggatgctgaccggtgcgcaaacgtggcgcgcggccatgtctggcctgtttcagcaggtggccgatgccttcctgcagcagatcgtgatccagccgttccagcaatggatcgcgatgcaggcgcgcatgctggcgctcaaactcggtttcatccagcaagagcaggtggcggacgccgccgccagtagtgtcaaggtcgcgcagaagtctgccgagacgacagcggtggtgtcgatggatgcggcaaaggctggcgcgggcgcggcggcatcgcaggcgtccattccctacgtcggtccggtgctggcggtagcggcaatggcggcgatggtcgccgcggtgatggcgctgctgggtggagtgaagaagttcgcctccgggggactggtcagcggccccggcacctcgaccagcgactccatcccggcgcggctctcccacggcgagtacgtggtcaatgcccgcgcggtgagccggctcggggtgtcgttcctcgacgccatcaacggcctgtctgccgggccgcgtttttccggcggtcgcctggcctttgccgccggtggcctcgtgccggaagcctcggcgcagccggccacgaaccaaaacatccgcatcgtgaatgtcatcgacccggcgatggcggccgactacctcaacagcagcgccggcgagcgcgtggtgatgaacctcatccagcgcaacgccgcgtcggtgcgcaacattctgggacggtga

SEQ ID NO: 352650 - DNA, 390 bp, Pseudomonas aeruginosa
atgacctcctccgatctcgatgtgctcgtgccgcagacccaggtgctggaactggccgggcagcgcctgacgatcagcccgctggtcgtcggcgaactgccggcgatgctcaaggcggtgcggccttttgctgaacagttggccggcgaaccggattggctagcgctgctctgcgaccacggcgatgccttgctaaccgcattggcgctggccagtcgccagccgcgcgacagggtggacgccttggcgctcgacgacgcaatcacgctggccgccgccgtgttcgaggtgaatgccgattttttcgtgcgccgggtcgcgccgaaggtcggcgatctggcgcagagcctgaacggccgactggctggatcgacgccgtcgcccgcctga

SEQ ID NO: 352651 - DNA, 753 bp, Pseudomonas aeruginosa
atgccgtatttctctggacaaggccgtgtctacatcggcgcccgcgacgccgccggcaacccgcaagggctgaatttcgtcggcaacgtgcccgaactcaaggtctcgctgtcggtggaaacgctggagcatcaggagtcgaccagcggccagcgcctgaccgacctgcaactgatcaagaccaagaagggcgagttcgcctgcacgctggaggaactgatcgcggtgaacctgtcgctcgcgctctacggcacgactgtcgagcagaccagcggcacggttaccagcgaggcgttgccgaacccggtcacggccggaagcctctacctgctggccaagcagaacgtctcctcggtggtggtcaaggactcctcggccacgcccaagacgctgccggccgtgcagtacagcctcaatgccaagcatggctcgctgtcgatcaccgacaagaccacgggtgggccctttgtggagccgttcaaggtcgactacgcctatggcgtggcccaatcgacggcgctgttcacccagccgctgcccgagcgctgggtgcgtttcgagggcctgaacaccgctgacagcaaccgcgaggtggtgatcgacctgtaccgcgttgccatcaacccggccaaggagctgtcgatcatcaccgaggagctgctcaagttcgagctctccgggcaggtgctggccgacacgcagaagtccgctaccggcgacctgggccaattcggccgcatcgtgctgctgtaa

SEQ ID NO: 352652 - DNA, 180 bp, Pseudomonas aeruginosa
atgctcattgaactgctcaaaccccacacccacgccggcgtgctgtacgcagccggcgcccgactcgacgtcgacgaggccaccgcacgctggctgatcgaacgcggcgtcgccaaacctaccgaggcgcccgatgagccgggcgtcaaaccgcaacccaccgcacgcaagggagactga

SEQ ID NO: 352653 - DNA, 426 bp, Pseudomonas aeruginosa
atgaactccatccgcgagcgcatcctgcgcgaggtcgtggcacgtctgtcggacgccgtcgcgcctgtgccggtgctgcgccatccgaccatccccatcacccgcgaagccagccccgcgctgctcctcttcgccgagagcgacagcatcaccggccacgcgaatcacctggtggatcgatccctcaccctgcgccttacggtagcgacgcgtggcgaggacgcgttcgacctggccgatcgaaccctagtggcggcccaccaagcgctgatgcgcgacccgagcgtcggcggcctcgccctcctgctcaacgaaatcgactgcgaatgggacgccgaggacgccgatgccggcgccgttgccatgccagcgcgatacgaagtgcgctaccgcacgtacgcccttgacctgaccaagaacggatga

SEQ ID NO: 352654 - DNA, 285 bp, Pseudomonas aeruginosa
atgggcctgatcgaacaactctacgaggcggcggatcgggccggtctgctggtgatcgccgaggtcgccggcagaagcattgcggtggacttctcggctgccgacgagtcggtgctcgacggactggtgcgggctgcggactacacgattcgttttcccgcgtccgcgctgccggaacttgccaccggccacacgctttccattgccggcgtcacctaccaggtgcgcgatatccgcagcatcggtgatggcagcgagcgccgcgccgacctctcccgtctctga

SEQ ID NO: 352655 - DNA, 1011 bp, Pseudomonas aeruginosa
atgcagaacatcttcgaaaaccccgccttctcgatgtcggcgctcaccgccgccatcaacttcctgcccaacaactacgaccgcctcggcgcgatgggcctgttcgtcgacaagccgcagcgtttccgctcggtgatcgtcgaggagcaaaacggtgtgctcacgctgctgccgacgatgcccccgggctcgccgggcacagtgggcgttcgtggcaagcgcaaggtgcggtcgttcaccatcccccacatcccgcacgatgacgtgatcctgcccgaggaagtccagggcatccgcgccttcggttccgaaacggaattgcagaccgtggcgggcgtgatggcgcagcacctgcagacgatgcgcaacaagcacgcgatcacgctggagcacctgcgcttcggggcgctcaagggccagatcctcgacgccgacggcagcgtcatctacgacctctacaacgagttcgagatcacgcccaagactttcaccttcaacatctccaatccggccaatggctgggatgtgaagaagggttgcctggacgtgattcgctacgtcgaagacaacctgcagggcgagcggatgaccggcctgcacgccttcgtcggcgaggacttcttcgacgcgctcaccgggcatgacgaggtcaaggctgcctacgaccgctggcaggatggacaggcgctgcgcacggatctgcgcgcaggcttcaccttcgccgggatcaccttcgaggagcatcgtggccgcgcggtggctccgggcagtgctgtgcgccgcttcatcgaacccgacgagggccacatcctgccgctgggcacgatggataccttcgctacctattacgcccctgccgacttcaacgagacggcgaacactgtggccttgccgctgtacgccaagcaggagccgcgcaagttcgaccggggcaccgatctgcacacgcaggccaatccgctgccgctgtgccaccgcccggcactgctggtcaagctggtgatggcctga

SEQ ID NO: 352656 - DNA, 381 bp, Pseudomonas aeruginosa
atgcccacggtgtttaccgaatcgatgaacttgggcgacctgctcaagtacgaggccccgaacctttactcgcgcgaccgcgtcaccgtggccgctggccagaccctgccgctgggcgcggtcgtcgggatggtcaccgccaccggcaaggtcaagcagatcgacccttcggccaccgacggcagccagtacgccgccggagtgctgatgcaggcctgcgacgcggcgcttgccgaacgcactgacggcctgatgttcgcccgtcacgccatcgtctccgaccacgcgctgcagtggccgaccggcatcaccaccgccgagcagcaggccgccattgcccagctcaaggcgctgggtgtcctcgtccgccagggagtctga

SEQ ID NO: 352657 - DNA, 1239 bp, Pseudomonas aeruginosa
atgaccctgctgccccatctggcggcacgcctctttggcgtgccgctggcgatccatcgcccaaaacttgacgtgatcctggccgtgctcggcccccgggtcggcttggcagatctggctgcaccgaccggcttcacgccgcccacgcgccctgcgtccacccagccccccggtgtggccgtcatctcgatccacggcacgctggtgcggcgcaccgtggggctggaagccgaatcgggcttgaccagttacgcagggctgaccgcgcagttggacgcggccctggccaaccctgaggtcgccgcgatcctgctggacatcgattcgccgggtggcgagtccggtggtgtgttcgatctggccgatcgcatccgcgcggctgcccagatcaagccggtctgggccgtggccaacgacatggccttctcggccgcctacgcgctggcgtccgctgccagcaaggtgttcgtctcgcgcaccggcggtgtcggctcgattggtgtgatcgcaatgcacgtcgaccagtccgaaaaggacgcccaggacggcgttcgctacaccgccgtgttcgcgggcgaccgcaagaacgacctcaatccgcacgagccgatttccagcgaagcccacgcctttctcaaggccgaagtgaatcgcatctacggcctgttcgtcgagacggtggcccgcaaccggggcatcgagccgtccgccgtgcgggataccgaggccggtctgtttttcgggcaggcggccgtcgccatcgggctggccgacgccatcggcactttcgacgacgcgctcgcgcagctctccaaatccgtttccccactcccgaatctggcggcaagccactcgggctctttccgcaacctccagatggagttttcaatgaatgatcgaaccggccccgctgctcctgatcggcttgctgctgatcctgctggcagttcttctcaatcggccgccgccacggcaatgaccgtggccgacgccgtcgaaatcgcccagacctgcacgttggccgggcgcaccgacctgatcgcgggcttccttgaagcccaggcttcgcccgccaaggtgcgcagccagctcctggccgcgcaggccgaggccagccccgagatcgtcagccgcatcgcccccgacgccgctgcgtccctcactgccgcaagcaacccgctgctcgatgccgcgaagcaactcgcggccaagtccgcatcgctgaagaaggagatctga

SEQ ID NO: 352658 - DNA, 1512 bp, Pseudomonas aeruginosa
atggcctggtattccaaactccgaagcctcttcggtcagcctcctgttcacgaggcggcgggtcgtggccgtcgctcgctggcgtggatgcccggcaaccccggcgcggtcgcggcgatgctggcgaccaatgctgaactgcgcggcaagagccgtgacctcgtccgccgcaatgcctgggcgcaggccggtatcgaagccttcgtggccaacgcggtcggcaccggcatcaagccccagagcctgtcgcccgacgaggcgttcaaggccgaggtgcaggcgctgtggcgcgactggactgcggaagccgacgcggccgggcagaccgacttctacggcctgcaggcactggcctgccgcgcaatgctcgaaggcggcgaatgcctgatccggttgcggccgcgacgcccggaggacgggctggtcgttccgctgcagctccagttgctggagcccgagcacctgccgatcaatctgaacaccgatctgccttcgggcaacgtcgtgcgctccggcatcgagttcgacagcttggggcggcgcgttgcctaccacctgtaccgctcgcaccccgaggacgggcgtcttgcgccgatgtcgggccagggcggcatggacacggtgcgcatcgacgcgaaggaaatcatccacctgttccgcgtgctgcgcccgggccagatccggggcgagccgtggctgtcgcgggccctggtcaagctcaacgagctcgaccagtacgacgacgccgaactggtgcgcaagaagacagccgcgatgttcgcgggcttcgtgacccgtcagaaccccgaggacaacttgatgggcgaaggcgcggccgacgccgacggcattgcgctcaccgggctggagccgggaacgctgcagatcctggagcccggcgaggacatcaagttctccgatccggcggacgtcggcggctcctactccgaattcctgcgcacgcagttccgtgcggtcgccgccgccatcggcatcacctacgagcagttgaccggcgatctgacgggcgtgaactactcgtccatccgcgccgggatgttggagttccggcggcgctgcgagatggtgcagcacagcgtgttggtgcatcagatgtgccgcccggtctgggcggcctggatgaagcaggccgtgctcgccggtgcgctcgaagccccgggcttcgcgcgcggtggggccgcccgccgtcgccagtacctgcaggtgaagtggattccgcagggctggcagtgggtcgatccggagaaggaattcaaggcgatgttgctggccatccgcgcgggcctgatgagccgctcggaggccatctcggccttcggctacgacgccgaggacgtcgaccgcgagatcgccgccgacaaccagcgcgccgacgacctcggcctgatcttcgactccgacccgcgccgcacatccaaggacggcggtagcgccgagccgaacaagaacgctgccgacaccacacaaaccggcagttcatcgactacctga

SEQ ID NO: 352659 - DNA, 207 bp, Pseudomonas aeruginosa
atgacctacaccaccacccaactcgacgcactcaagcgcgcgctggccaccggcgagcgccgcgtgagcttcggcgacaagacggtcgagtaccgctcggtcgaggaactgcagtcggcgatccgcacggtcgaggccgaactggcacgcaatgcgggatcgagcacgaagcgccagatccgcgtcacgaccgcgaaggggttctga

SEQ ID NO: 352660 - DNA, 198 bp, Pseudomonas aeruginosa
atgaaccagctcgacaccctcctcacgcagatcgcccagcagcacctccgcatcgaaaccctggagacgcgcaaatcggacagcctcgacttccatgacctggcggtctggtgcctgcgtgatgcccttgaagccgcgttcaacgcaggtgtcgagcagggtcgcaaggccgcgaaggcgaacaaggccggcagctga

SEQ ID NO: 352661 - DNA, 528 bp, Pseudomonas aeruginosa
atgaccaccacccaactgaccccggcccagcacgcgatcctggcctacgccctcgaacacaccgacggcaagatcgactggtttcccgacaacatcaaaggcggcgcgcgcaagaaggtgctcgacggcttgttcaaccgcgccctgatcaccccctcgggcaccgactggttcgtcgccgccgagggctacgacgcaatggggcacgcccgtcccgcgcctgcgccactggccgccgacccggagatcgaagccgccgtggcggcagccgaagccgagtgggccaaggagaagaccccggagcaagtgccggccaagccccgcacccgcgagaacagcaagcaggccgaagtcatccggatgctgaagcgccccgagggcgcgacggtacgccagatctgcgacgccaccggctggcaggcgcacacggtacgcggcaccttcgctggagccttcaagaagaagcttggcctgaccatcgtctcggacaaggcccaaggcggcgaacgggtctaccggatcgcctga

SEQ ID NO: 352662 - DNA, 369 bp, Pseudomonas aeruginosa
atgaccaccacccagcaaatccccaccacccagaacgatgcctggggcttttggggcacgatgaacgagcaggccagcgccgcgtggccgttggcgatgacagccatctcggacgccaccggccagcccctcgaatccgtccgcatcttcctggacagccgccacggacgccactttgccgacgatgttcagaacgggctgtaccggggccagactctggcggacgcgatcaacgccgccacccagcagtggatgggatggacgattggccgccagaccagcaagcaatacggcatcccgcgcggcctgccttaccttacgggcttcgtgattcactgcgagatcaccgacgagtcgctcgccgcctga

SEQ ID NO: 352663 - DNA, 1491 bp, Pseudomonas aeruginosa
ttgcaccccgccagtccgccacccatcacgagcccgcccacggttttccgtcggcgggttttctttttcgaggaaccgattctgaacacgctcaacgtcgagtaccgcaaggtcgaggcgctgattccctacgcccgcaatccgcgcacgcacaccgacgagcaggtggccaagatcgcggccagcatcgtcgagtacgggtggacgaacccggtgctggtggacggcgacaacggcatcatcgcgggccacggccgtctggctgccgcgcgcaagctgggactggatcaggtgccggtcatcgaactggcccatatgtctccgacgcaaaagcgcgcctacgttatctccgacaaccggctggcgctcgacgcgggctggaacgaggaactgctggcgctggagatggccgagttgtccgaggccgggtacgaccttgcgctgaccggcttcgaggatgccgaaatcgaggcattgctcgcggatgacgtggcggtcgctgacgccgaccaggagcaggatgccgatgaaccggacgccgctgacgacgtgccggaggcccctgtggtgccggtgtcccgccccggcgatgtctgggtcattggccagcatcgcttgatctgcggcgacgcgaccgacgcgagcgtggtcgccgcgctgatggatggtgctcgcgcccgactgtgcttcacctcgccgccctacggcaatcaacgtgactacacctcgggcggcatcgccgattgggatggcctgatgcacggcgtgttcggccatctgccgatggctcaggatggccaggtgctggtcaacctcgggttgatccaccgcgacaacgaggtcatcccgtattgggatgcgtggctcggctggatgcgcacgcagggctggcggcgcttcgcttggtacgtctgggatcaagggcccgggatgcccggcgactgggcgggccgcttcgccccgagttttgaattcgtctttcatttcaaccgcgcgagccgcaagcccaacaagatcgtcccctgcaagcacgcaggccaggagtcgcacctgcgcgccgacggctcgtccacggcgatgcgcagcaaggatggcgaggtcggcggctggacgcacaagggccagccgacacaggacacccgcattcccgactcggtgatccgcgtgatgcgccacaaggggaagatcgggcaggacatcgaccacccggctgtgttcccggtggcgctgccggagttcgtgatcgaggcctacaccgacgcgggggacatcgtgttcgaacccttcggcggcagcggcacgacgatgctggcgtccgagcgcactggtcggacctgccgcacggtcgagatcgcgccggagtacgtggacgtcgccatcaagcgtttccagcagaatcaccccggcgtgcccgtcacgctgttggccacaggccaatcgttcgaccacgtcgccaacgagcgtctggccaccacggaggccgagcaatga

SEQ ID NO: 352664 - DNA, 204 bp, Pseudomonas aeruginosa
gtgaaggttccgacaccccaataccgctgccccctcggtcggctgcaaccccaggccacggatctggacgccatcaaggaacgtggctggcgcgaccagcacatcctggtggtcaacgcgtccgacgaacgtctggacttcatcgagcgcgagatcgtgcgacgcattggtgaacggctgtacggagggccacgtcatggctga

SEQ ID NO: 352665 - DNA, 465 bp, Pseudomonas aeruginosa
atgaacacgacgatcctggcccttgatctgggcacacacaccgggtgggctctgcagcacctggacggcagcatcaccagcggcacggagcacttcaagccgcaacgattcgagggcggcgggatgcgcttccttcgcttcaagcgctggctcaacgaactgctctcggccagcagccacatcaacgcggtgttcttcgaggaggttcgacggcacgcgggcgtggatgcggcgcacgcctatggcggcttcatggggcacctgaccgcgtggtgtgagcatcacaacatcccgtatcaaggcgttccggtcggcacgatcaagaagcacgcgaccggaaagggcaacgcgggcaaggacgaaatgatcgcgtccgtccgcgagcgtggtcacgccccgaccgacgacaacgaagccgacgcgctggccctgctgcactgggccatcgagacgcaggaggtgtga

SEQ ID NO: 352666 - DNA, 2280 bp, Pseudomonas aeruginosa
atgatcgacttcaacaacacaactcaaactgcggagcacagccgagagtcagagcgcgacgagatccgcgccgaactgatcgcgcgtctggaatcggtgctgaccacgatgttcccgacaggcaagaagcgccggggcaagttcctgatcggcgacgtgctgggaagccccggcgacagcctcgaggtggtgctcgaaggcgagaaggcagggctgtggacggatcgcgccacgggcgatggcggcgacatcttcgccttgatcgccgcctatctcggggccaatgtccacaccgacttcccaggggtgctcgacgaagccgccgatctgctcggtcgctcgcggtcggtgcctgtgcgccgggccaagaaggaagcaccggtcgacgatctcggcccggccacggccaagtgggactacttcgacgtcacaggcaagttgatcgcggtcgtctaccgctacgacccgcccgggcgcaagaaggagttccggccgtgggatgccaagcggcgcaagatggccccgcccgatccgcgcccgctttacaaccagccgggtctggccgctgccagtcaggtcgtgctggtcgagggcgagaaatgcgcggaggccttgatcgctatcggcgtggtggcgaccacggcgatgcacggtgcgaatgctcccgtcgacaagaccgactggtcgcctctcgcgggcaagtcggtgctgatctggcccgaccgcgatgcgccgggctgggactatgccgaccgcgcgtcgcaggcgatcttgcaggccggcgcgaccaccgtcgccatcctggtaccgcccgacgacaagccggacggctgggacgcggccgacgcgatccccgagggcttcgacgtcggcggtttcctcgccgtcggcgagcggatgccggtgatgcgctcggtcgaggacacgtcgccgccggacttgctcaccggcgtcgactggacaacggaggacgggctgtcctcggcattcactcgccgctatggcgaggactggcgctactgcgcgctatggggcaagtggctggtctggactggtgtgcgctggaatcccgatcaggtgctctacgtctcgcacttggcgcgtggcatctgccggatggcgtcgctcaaggcggacagccctcggctcaaaggcaagctggccagctcggccacgatttcctcggtcgagaagatcgcacgatccgatccgaagcacgcatccaccgccgaggagtgggacgccgacgtctgggcgctcaacaccccgggtggcgtggtcgatctgcgcacgggccgtatgcggccgcaccggcgcgatgaccggatgaccaaggtgaccaccgccacgccgcagggcgacagtccgacgtggcgtgcattccttgccgacgtcaccggcggcgacgccgagttgatgacctacctgcagttgatggtcggctactgcctgacgggggtgaccagcgagcacgcgctgttcttcctgtacggcacgggcgcgaacggcaagtcggtgttcgtcaacgtggtgaccacgatcctcggcgactacgcggccaacgcgccgatggacacgttcatggaagcacgcaccgaccgccacccgaccgatctcgcaggcctgcgcggcgcacgctttgtgtcgtccatcgaaaccgagcaagggcggcgctggaacgaatccaaggtcaaggcaatcaccgggggcgacaaggtgtcggcgcggttcatgcgccaggacttcttcgaatacgtcccgcagttcaagttggtgatcgcgggcaaccacaagccatcgatccgcaacgtggacgaggcgatgaagcggcgactgcacctgatcccgttcacggtgacgatcccgcccgagcgccgagacggcaggctgaccgagaagctgctcaaggagcgcgacgggattctggcgtgggcggtcgagggctgcagcctctggcagcgccagggcttgaagccgcccgccagcgtggtgacggcgaccgaggagtatttcgaggccgaggacgcgcttgggcagtggatcgaagagcgctgcctgctggccaagacccagcgcgaaggcgtctccgagctgttcgccgactggcgtgaatgggccgaacgcgcaggcgagtacgtgggctcggtcaagcgcttctccgagctgatggcgacccgcaagttcgagaggtgtcggctgaccggaggcgctcgcggcatcgcgggcatcgccctcaggcccaagccgtacagccacgcctacccctaccgagatgactga

SEQ ID NO: 352667 - DNA, 255 bp, Pseudomonas aeruginosa
atgaccgacaacaacactctggcaaatgccatcgagccgatgatcgacgccaagcaggcggcggccgcactgcgcctgccgtactactggttcgccgaccacgcgatgcgcaccaagtaccggattccgcattacctgatgggcggtctggtgcgctatcgcttgtccgaactttccgcatgggctgcgcgcagcgccgccgtccagggccgtgatgctcaggatgcggacgcacctgtcgagggagccgaatga

SEQ ID NO: 352668 - DNA, 477 bp, Pseudomonas aeruginosa
atgaaatgctgggtctgcaaacgacaggcccggggtttcggccacaccgacaaccgtcacggtgtcggcgatccccggcgctatcccatcgactgggtgttctgctcacagcgctgccagaacgcgtttcacgcgctgtacggcaactggctgcgggtcaaggaaggccacgtcgacatcaaggaggtcaccatgatcgatccgtctgatgtcgaactggccgcgatgaagaagtgcctcaaggccttcggcgaggcggcgggcgagatcggctttgccaagccgctgggcgactactccgaagccgaggcgctgcaggtgatcgacgccatcgtcacctgctggacagatgcgatggtcgagcaccacgaggtgagcaagtacccgccggtgcggggcatgacgcccacgcccgatccgctggccaacccgttcgccgatctggaggacgacctgccctgggagacgaagccatga

SEQ ID NO: 352669 - DNA, 264 bp, Pseudomonas aeruginosa
atgcaaaaccaagtcccatctgttcaatccggccggaacgccacccggcccctcccggccggtgccacgcgcatcgcccttgacgagaacgagctcgccgcccgctgggggctctccgtcaaaaccctgcgccgctggcggcaggaacagctcggccccgtcttctgcaagctaggggcgcgcgtcacctacctgatctccgaagtcgaagccttcgagcggcgcgtctcgcgttactcgactttcgctcgggcgtaccagtga

SEQ ID NO: 352670 - DNA, 2265 bp, Pseudomonas aeruginosa
gtggccaagaagtctcagaaaaacagcaagcacatcaccgacctgatcaactcggcgaccctgccagccctctcgctgctggcgcaagtcgacaagttcgcattccttggcgttctcgatgcgaccaagccggaacatcaggcgcgctccgaactgcttgaatgcatcccatcggtcaagcgcgaagacatcaccattgctgaccaggaggcggtgcggctgctccaactggtgcgcttccgtaccgaggagatgctggagcacgcctacggggaaatcgaattcgagaaccacccggagatcgccaccttcgagcggtcggccgacgcgatgaccaggttgatttggttgcgcgtgaaagccccccgcatcttcgatcagatcgagacgatctacctcacgcaccatttccacggccacaagaagtttctcgggttcaccgtgcgcgacggcgacggtcgtgacttcgaatggacgcaggaggtcgccgacaagttgcacgaaggcgtcggcgagattctgggcctggacgacgagtccaagaaaagctgcgaggtcatccatttcgagatggatgacggcgatgaaaccgccatgcggcggctgcactatctggtcgtctaccaccccggcaagatgaagttgctgcgccagatgaaggatcggcggcgcgacctgctcctgttcacgcccgcgctcgaagcgacgctggtgtacgaccccgccgagaacaaggtgcatgtgctttctgacaagcagagcactgccaagcgcctcgctgatcgtttcgcagtgatcggcttcgagaagcccctctcgaaacagcccgtggatgctgtcagctacgagctggccatgttcaaacaggcggtgaatctcaaggatgccaaggccacgggcgcggtgatcctggatgcatggatttcttcgctgtccgtgacactcggccacacgcgccacagtgtcacgctggcgctggccaacagcgacaacgtctggggtctttccgacctgcactttggcgaccgcaacccgctgtcgagctgccgctccgtgctcgaagtgaagctgtcattcgtgatccgacttgacggcgaggaagatgcacgcgcgctcgacatcaccgtgggccagcgcggctcttgcaacctgctgacgctgcctgatcctcgaatgcgccggtgcggcgaggacatcctgacctcactgggcgtcatgaagcgggtgcaaccggccaaggtcggagccgacttggcgctgttccgcgccgagatgaagctgctcgacctcgctgtcgatgatgtcgatggtcatctgctgacggcgctcgatctgcctgccgccgatcttgtcagcaaggggctgttgaaaaagaaagcgcccggcgactacatcaccgttcctgtcgaggatgaggatggccagcccggcttccgacgcctcaaggtgaacttcaacagcaccaacacctgggcgcaggacgagctcactggtgaacgccatgagctttccgaaggagacctgtgccggtacacggtcgacaaatcctacctgcgcgaacggctggatcagctgctcaaacaacaacttgtcgacatccccctgaccgtagacgagcaggagccctacgtgctcggcaactaccacatgggcgatcagcgtctgccggtcgcgctcgtgtcacgcctctgggagccaaagcacgccgacaagatggacactgcgctgcggcagtcgaatctgggtttgactatcgtgctgaccaccacgtcgggcttgccgcgccgattcctcggccctggcatcgtcgtgtcactggacaccttggcacaggacgtcaacgggcaagtttcgattgacctgtctcgggtcgacggtgaggtgcgccgacgtcagagcgccgccgtcgtgaccgatgtaccacgcttgatcaaggatgacgcgcgcagcggcgtgctggtgggcccgtggcctgattcgtggacgttgacgaagaaggaatggatcgacgtagtcgaggtcttcgtcaatggctgggaatctgggcgacgcaaatggacgcgaccgcagatcgaggcagcgtctggcgtcacgttccgcacgatggccgaactcttccgtggcgcaccggaatggctgacctacttccggggtgccgacggcaatgacaagcctcgcctgtgggagctgaacatcggcacgcccgatcatctcgatgccgctcagggcacggacgcgacacctgtcgagcccgagatcgcataa

SEQ ID NO: 352671 - DNA, 522 bp, Pseudomonas aeruginosa
atgcagaaaatccgagtcttcgctgacaccaatgtcatcctcgaatcattccgcaccggctgctggaccgcgatcagtagccatttcgccatcgagaccgttcaaaaatgcgtcgaggaaacgctgaccggcaaccccggtgatccccgccatgtcactgttcctcccgccgacctgaaggcgggccttgcgggcgagcatccggtgacgcgaaaagagcttgcggcgctggtgctggcccatccctcctgcggcacgctcgacgacggcgagaaacacctcctcgcatggctgctcgccaacaagctgctgccctctgccatcgtcgtcgtcaccaccgccgacaaggcggcattggtcgcatcccacggcctgggctggctcgactgcgcggtgtcgttggaggatctggcaagaaaggctggcgtcggtcgcgccaacctcgacgcgctcgccctgcagtaccgcgaggactggctgtccagcatcaagaccaagatcaagttgggaatcatcccgtga

SEQ ID NO: 352672 - DNA, 1122 bp, Pseudomonas aeruginosa
atgctcgaaaaaatctcgcaaaagctgatcggctaccgcgtcaaggcggcgcgcgagtccaagggctggacgcaggatcagctcacccagggcctcggcctcaatgaccgccaatcggtttccgacatcgaaaacggcaagcgcgcgctcaagccggacgaattgctggcgttgtccgatctgctggagcgggacatcgagttcttcatcgacccgttcgccgtcgccggcgaagcccagttctcctggcgcgccgctcccgaagtccccgaagacagtcttgacggcttcgaactgaaggccggtcagtggatcggcctgctgcgctggctacgcgagcagcaggacagtcgggcgagcgtgctcaagcgcgccctgcgcctgtcggcgcagtcgtcctttgaggatgcgcaagagcgcgccgagagtctggtgaccgagctcgatctcggcgtgattccggccgagacgctgatcgacaagatcgagcgcgagctcgacattccggtgctgttcgtcgacacggtggaagccgacgacggcaaaaccatttcaggcgccacctgccatctcgaagagatgggcgtcattctgatcaaccggaatgaaaccgaggcgcgccgcttctatgatctggcacacgagctgtttcacgcactgacctgggatgcgatgaagcccgaccaccgggaatcgaattccatcgaggagcgcaacaaagggaaacgcatcgagcagctggcgaacaacttcgccgctgccctgctgatgccgcgcgcctccctgaacaaactgatcgatggcaaccgccagggcgacatcgcccacctgtgcgaagtcgcggcgctgctgcgcgtcgcgccggtggcgctggcatggcgactgttcaacctcaagctcatcggtgacgacacccgtcgcgcgctctctcaagagaagcagcgaccatcggtgtcgggcccacccaaacggttctccgtatccttcgtgcgaatgctgcatgaagcgctggagaacggacggctgtcggctcgcaaggccgcgaaagccatgggtctaggactaggcagtctgactgaattgttcgctcagtacgacctccccgcaccgttcgagctttga

SEQ ID NO: 352673 - DNA, 195 bp, Pseudomonas aeruginosa
atgaagaacctcaaactcgcatctccctcagagatgaccgcctgcgcccgtgctggcgaaattaccaccatccttgcggccgccatcgtccgcacccagctcgcgcaaggctgggaacggagagaagttggccttggcttcctgcccgaccagcgcgttcatacaaacccctatcaaccggagaagttgtcatga

SEQ ID NO: 352674 - DNA, 453 bp, Pseudomonas aeruginosa
atgaacgaccaacaagcatccgtcgccgcgcgcattgcggagctgtcccgcctgcccatcgccgaactttggccgctgtgggatcggtatttcaccagccgcccgatcaatccgaaccgggccttcgtcgagtcccgcatcgcttacaaactacaggaggaagcctttggcggccttgcccaggccacgcgtcagcgccttgaggccatcggcgcgaagcactccaagatcaagctgcgcgccaagccgcgcgatttccatttcgcgccgggcacgatcctgttgcgcgagtggggaaatcgggagcacaaggtggcggtcaccgccgacgggctgttcgagtacgagggaagcactttcaagagcctgaccgccgtggcgcggcacatcaccggcacgcactggtccggaccgctgttcttcgggttggctggcaaaggaggtgcgcagtga

SEQ ID NO: 352675 - DNA, 372 bp, Pseudomonas aeruginosa
atggacgaatccctggaaacctttgtcccgctggtattccgccgccgtggcgtgcagcgcgtcgcatccgatgaccgggacgtccacgatgtcaccctgatagacgggctggcgcgcgccttctactggcagcacctgctggattccggcgcaatggcgagcggctcagccatcgcgcgggccgagaaactgcacccctcggtgatcaatgaactgctgcgcctgacgctgctcgcccccgacatcatcgagcagatgatggccgggcgacagccgcgccgcctcacgctgatgtggttccagcgcaaccgcctgccggtggattggcaggcccagcgagagctgatggcgagtttcgagggcgaggcatga

SEQ ID NO: 352676 - DNA, 480 bp, Pseudomonas aeruginosa
atgagcaagaagcaccgaggacaagccaggggcgatccggtcacctaccaacggccgaccccggcgggcggcgtgcagctggagaccttcatgccctggacgctggtgcgccggggcctgaagaagcagatcatcacgccactggatgccccgcaggagtttctggacgaggcgcggcgtgagcggctgatgcgcgaggcggatcaggacaccccgctgatgcgggccctcgggctcgcgttccactggcagcgcctgctcgacgagggtcggttcaactcgatgaccgaaatcgcggtggccgagggcatcgaccggggacaggccagcaagatcgctcagttggcccgcgtcgctccggacatcgtggaggcgtgcgtgaccgggcaggccaagggcctcaccctgcaacggctgaaccgcagtccggttccggccgcctgggatgcccaaagggcgcagtaccgccagctcccctga

SEQ ID NO: 352677 - DNA, 228 bp, Pseudomonas aeruginosa
atgagaaccgtggaagaagtgatgccgatccagtcagacgccgagtaccagcaggtgctggagacgatccgggccgcgtccgacgaggcggcgagcgatgagcgtgtacttgcgctgcggcagcgcgccgaagcctatgagcaacgactccggatcgatccggagcgcttgcgtgcgctggtggaattggccgcccaggcgcaggacttgaaaatgggatacgactga

SEQ ID NO: 352678 - DNA, 285 bp, Pseudomonas aeruginosa
atggccaactcacgcaagcatctgatctacctggtctacgggcgacagacctaccaccaggaagccctgttcagcatcgccagcgccttcgcccacctccgcgacggggcggcgcatggcctgacggtcagggtctataccgacgaccccagtccctacgccggcctgccggtgcaggtccgcgaagtgacggccgaggagctggtcgcctggtgccaaccgcacggctatcacttccgcgccaagcacgtggccctgcgcgacgccctggaagacgccgactag

SEQ ID NO: 352679 - DNA, 1026 bp, Pseudomonas aeruginosa
atggctaagaagtacactcatataaagaacccactaacggttattgctatatttgcgacgtttgctgaggtcggtggaacaatcgtgctgccgcttttggagggagaggttcaagagcggtacgtttggttcttgatggcttttccagtgttcttggtttggcaattttttcgagtgctgtggcacaagcatgaagttttatacgcccccaaggattatcgggatgataataattttctttcggcaaagggtataactcctgcgtcacaggcctcggtgatcgctaaagttattgatgaggcaagccaagccagtgatgaaattttgaacgatgattcgattggtcctgagcctcaggtgacttacggctcagacgaaatcattaatggaaccgtacacgaggatgcccatgaggaggaggaggaggcgaattacgagcctgagtctgaagcaaaaccgagagcctcggtcgaaagggaccataaatcagcggccgccgatgccagtgctgcttggtcagcagcagatgctgcacgcaaatttagcttaaaaaattatgaggcactcatggcagctgccggttttactgtctctggtgatgcaagtggggctgtagctaccactgggttggccagtatgatccaagctagggcgaaagtagaagaacatgtatttaaagttttaagtgaggatgataagactgcattcctcaggaacgtatccgtacgtggtatcccagatcatgtttttagtggggtctcaacacgtccagatgagacggttctggtggagatagtctttgcgtcacacgtagtgcgtaatagaaagaagattcaggagttgatggggaaggttagtaattattatcatgatgcttcttcgccgattggtggaaattttcaattggtggtcgtcattgtgagtgatacaaatacttatgaatcagttgtggctgtcaagtttttgaaggaatcaattctaagctacaatgttccggttaaaatacgtgagataacgatgccatag

SEQ ID NO: 352680 - DNA, 210 bp, Pseudomonas aeruginosa
atgattgaacaactgaaggccatgcttgaagagcagcgcgtgcgcctccgccagctcgaaaaactgagctacaccggacgcattgccgatgggctgcgcgcccaggtccgcgagctgtgcagcagcctggaaggggccattaagacggccgaatttctggagacgcagaaggctgccgaatccgaactctacgcccgcttcgccgaataa

SEQ ID NO: 352681 - DNA, 372 bp, Pseudomonas aeruginosa
atgctgatcctcacccgccgagtcggcgaaaccctgcacattggcgacgacatcaccgtgaccgtcgtcgagaacagaggcggccagatccgcctcggcatcactgccccggacgacgttgcgatccaccgttctgaaatctatgcgcgtaccggcaacgtccgccctgtgccgccggcagatcttgtcgaagcctggaacagcaggcattccggcccggccactgttgactattgcgcgtaccgggacgccgcccccgttcgaactcgcacgctcgggccggctcggctatccgccgccggcatggctgtcgtgtgggtcgagggccaggccacgccggtgctgctgcgcaactgcaccgctgtttcctga

SEQ ID NO: 352682 - DNA, 3831 bp, Pseudomonas aeruginosa; identical to SEQ ID NO: 350629

SEQ ID NO: 352683 - DNA, 222 bp, Pseudomonas aeruginosa
atggccttcagcaatgaacgcgcggttcggatgattgaggaaggcatcacggccatgcgccggtcccacttcccgcgccccgaacagagcttcctccacggccagatcgaactggcctacgcagtggacttcatcgacacccgcctctacgacgacatgcgccgccggctcgacgccgcagcggattcgcgctgggcagaactcaggagcactcgggtatga

SEQ ID NO: 352684 - DNA, 843 bp, Pseudomonas aeruginosa; identical to SEQ ID NO: 318225

SEQ ID NO: 352685 - DNA, 240 bp, Pseudomonas aeruginosa
atgccctatcgaggcgccttgtctattggcgtgcccggcatggtccacgccttggtcgagatgcatcagcgcttcggacgattgtccctgcaccaggtcatggcgcccgcgatcggccttgctgaccgcggatttcctctgacgcgcctgggggcctggtccatcgcggtgagtgagccgctccttcgacgccactcggaagccgcagcggtctttctgttgatttgcacccaaatttga

SEQ ID NO: 352686 - DNA, 960 bp, Pseudomonas aeruginosa
atgaggcccacggtccgcgtgaagggttcaacccggtctgctacacattctccatcttctttcttgctcgtgaaacgcggacgccgagcgctaagagaaagaaggtgcatcgtgagctacacccctcttcccccacgtccgagtctcgaattgctgcggaagcgcgctaaacgccggttgaccgacctgcgggcggcgtctccggaagcacgcctcttcgatgcgcagttgcagcttgctcgggagcatgggttctcaagttggcgcgccttgaaggagcagattgaccgcgtccgcagagaaggccgcttccgcgccgacggtagtccggcccatcttccagacgaaacggtgatcaatgggtggccggacttcacctccgaacgcccgttgaaggtgttggtgagcggctgtctcaccggcttgcctgtgggcgtggaaggtaaaccctatggtgaatatccgcccatcgtcaggttcttagcgaggcctgaggtcgatgcggtgacattctgtcctgagcacttcgcattcggaacgccgagggactgcccggacattcatggcggtgatggatacgacgtgctcgacggccgcgcccgggttctttcagaggccggacaagactggactgacgccatggtggaagcggcccgtcagatgttgcgcatcgcccaggcgcaccaggctcgacttgcgctgctgcaggacattagcgctgcctgcggatcgcaggttatctatcggggtgctcggaaagcaggggctccgcaccaggtcggcgcaggcgtgtgcgcggcgctgctcatccgcaacggcatcgctgttatcagccagcgcgacttcaagagcttcgacctcatcctacgcaaactggatcctgcccgatcgccccggccggacctgagggatcatcaccaaaacgactggtatcgaacgttcttcggcggggacgggtaa

SEQ ID NO: 352687 - DNA, 414 bp, Pseudomonas aeruginosa
atgttcaaagtctctggccgcaccgacgaagcggtcaccccgatgactgataattttagaccgtggttagaaccccgtctggccgatggtcggtacttcggctggctgatcctcgcggacgctgaagtaatcgccggcgtggggatgatggtgctcgactggccgccccacccatcgcatccggaccagggcgcgcgcggctacgtcctgaacatgtacgtcgaaccaacctatcggcggcgcggtttgggcaagcggttgatggacctttgccgtctggaagcagagcgcagaggtctcacctacacggtcctacatgccacccaacagggacgggggctctacgaacaactcggttggaggccgacaaccgagatgtcgcttacgcttgatgctcaggatggcgccaactga

SEQ ID NO: 352688 - DNA, 453 bp, Pseudomonas aeruginosa
atggcgcgacgctccgacccttgggctgtcgccgatcggatggcctggggggaggaggaggccatttacgccgacgagctggctcccctagttgcgccgctcatcgagcgtctgatgcccgtcgaagccgacggccaagttatccacggtgatttcggaggcaatgttctcttcgaagacggcttgccgccggcggtgatcgacttttcaccggattggcggccagcagcgtttgctaaagcagtggtcgtcgtggacgcgctggcgtggcatgaggcagacgagtcgctcattgactacgtcggcagcgacgagaactcggggcagttactccttcgcgccgaacttaggcgactgctcgaactcgaccagcatcaacgtcaatccggacgcgggttcagcgaccagctgaagccacacgagcgggtcgttgcgcacttggtctcgcgttag

SEQ ID NO: 352689 - DNA, 573 bp, Pseudomonas aeruginosa
atgttggtggggtacgccagggtttcgacacgtgatcaaacccacgcgctgcaactcgatgcgctccgcaaagcagaatgtgagcgcatcttcgaggagacggcgtctggcgctcagcgcgctcgaccgcagcttgccgccgcactcgactacgtccgcaagggcgacaccatcgtggtctggaagctcgatcggctggcccgctcgatcaaacagctaatcgagaccgtcgagcacctggagcgacgcgaaatcggctttcggtcgctgacggagcagatcgacaccacgactgctggcggtcggctgatcttccacattttcggggctttggccgagttcgagcgctcgataatccgcgaacggtccagggcaggcctagaggccgctagggcgcgcggacggatcggcggtcggccgagggcgctctcgccgaccgacttgatcgccgcgaaggcgatgctgaccaaccgcgacatcaccgtagtcgaagtcgcgcggcgcctgagtgtgtctcccgccacattgtatcgacatctgccagggggtcgtacagcggccgaactggaatga

SEQ ID NO: 352690 - DNA, 744 bp, Pseudomonas aeruginosa
atgaaaaccacaagaaaaccgaaagtccccttgaaccaggccacgcgcaaccgcctgctcgacgaagcggtcgacgactacgcgatccacaccctggacagcgctggccgtatcgccagctggagcgccggcgcggcgcgcctgttcggccacgacgcgagcgagatcctcggccgcgactacgcctgctttcatacccgcaaggaccgcgacgccggcgttccgcaacaggcgctgcgccaggcggatgccgagggccgcttcgagaccgagggttggcgggtgcgcagcaacggcaagcgcttctgggcgcaggtggtgatcgacgccatccgcgacagccagggccagttgctcggcttcgcccagctgatccacgacctcagcgaagggcgcgcggccaaggaggcgctgcggcgcagccaggagcagttccgcctgctggtgcagagcgttaccgactacgccatctacatgctcgaccaccgcgggcggatcaccaactggaacctcggcgcccagcggatcaagggctacctgccggaagaggtgatcggccggcacttctcctgcttctacacccccgaagaccgcgaggccggcgagccggcccgcggcctggccgccgccgaacgcgaagggcgtttcgagaaggaaggctggcgggtgcgcaaggacggcagtcgcttctgggccaacgtggtgatcgatccgatccgatccgcgacagcgatggccggctga

SEQ ID NO: 352691 - DNA, 744 bp, Pseudomonas aeruginosa
atgcctggccaagtaaccgccgttgaagtcatacgacagagcgagcaaggggtgtcggtgagaccattccttgttcgaggtgatgatggcaatcggtacttcgtgaaaggcctgcatcgcgcaggaggtccgtcgctgatctcggaggtgatagctgccgagctagggggctgccttggccttccgatcccagactggcgcatcatggatatccctcaagcgcttatcgatttcagccctatcgacaacatacacgatctctcaggcgggccggctttcgcctcgctgcagatcgagaatgctagtgaactgatgtgggctggggtacaaaaaatacccgtagagcttaggcgcaaggtcctcgtcttcgactggtgggtgcagaacggggacaggagcctgggcgaaaacggagggaacgtaaatctgctcttggactctcaaggtaacttggtggtaatcgatcacaatgctgcgtttgacgccacgctcaccgctgagcagttcggcacgtaccacgtcttccgcgaccaactgagtcacctccatgatctggtcactcgtcaggaatatggcaggtcgcttgacgcagcccttatgcactgggataggatttcagcccttctcccggtagagtggatctaccgagatcgagacgagatcgacgaaaccatacccaccctgcgtcaaaggcttgaaacgctgcatcagttcagggacgaatgcttctgggggcagctatga

SEQ ID NO: 352692 - DNA, 843 bp, Pseudomonas aeruginosa
atgaactacttctgcaattactcgataatccgattcctgccttaccccgaaaccggcgaattcgtgaatatcggagtggttcttctggccagcaacggcgaatttctctacaaaatcgaaacgaagcgccaacgggtaacccagtttttccataaactcgactacaagatctatatccgggctcggggcgagatcgatcaggagctttcgcgattgtcgggcttcttcaataggcaccgaaatcaacagcacacgcagcttacggcctttaagaatctaattcatcctcgcgagacgatgatccgtttcagtgcgcctgggaccattgcagtggagcatgtgggagaagcgctgcaatcgattttcgatcattacatcaaccacagcttcgccaacaaggaatacgaggaaaaggtactggagcggcaactgggccagttgctgatagctgcaaatctgaagcagaggtacaaagagcacaagctcggcaccaccgattaccccgtaaaattcccctatgtcctgatggatgctgacggagccaatgcggcacaggccatcaagcctattcacctaggtcacgatgagcccgcaaaaattcttgagcatggggatgtgtggctagccagggtccggcggcttcataaattacagatgctggctcgcgacaccctttttatcgcggcaccgccatcaagccagaagaaaaagcttcataccgcctatggcgacattgttgagcaactcagagagtttgattcggtgcgggtggtaagtaatacactgagtgagcaaggattgctgtctgagattcgctccggaataccagattccacgcactga

SEQ ID NO: 352693 - DNA, 225 bp, Pseudomonas aeruginosa; identical to SEQ ID NO: 326413

SEQ ID NO: 352694 - DNA, 720 bp, Pseudomonas aeruginosa
atgcagcgaacgcacgcctgggagagcaaaagactgcaccttgcgcactcaagggtgcttatacttccactccatgcatcttcccgatatgaatctcctggtcgccctcaacgttcttctcgaagagggcagcgtggtcggagccgcgcgccgcatgcacctcagcccaccggcgatgagccgtaccctgtcgcggatccgcgaggcggtaggcgacccgatcatggtccgcgccggccgcaagctggtgcccacgccccgcgccctggaactgcaggagcaggtccggcaactggtggaccaggcccgcgacctgttcaacacccgcgagaccatccaactggacaagctggagcgctgcttcaccctgcgttccaacaacaccctggtcggcggtctggccacccgcatactggaaatcttcagcaaggaagcgccacgctgtaccctgcgctttgccccagaatcggacatagacgacgaagccctgcggcagaaccgcatcgacctctacatcggcgcctcgtcctggatggagcccgaggtcaagacccagcaactgctcaccacccgcttcgtcggcctggcccgccaggggcatccgatcttcgacggcgacatcaccccgcagcgcttcgccgccttcccccacatcagcgtctcgcgccgcggactccaccacggcccgctggaccaagccctgggagagctggggggtga

SEQ ID NO: 352695 - DNA, 657 bp, Pseudomonas aeruginosa
atgaatgatttggcggttttgcctacccccagcaaagtattccggtcattgctaacggctaccggctaccgcccttgcctggaaggtaaaggatttggtcgagatcttgatcacctagccctcgaagagcgctcgggcagcaacttcgacttattggagaactgtcaagctcaatggctacggaccattcgggacgatgctggggcggactggagcaatctggccgagtccgcctggaataggcacagcaacctgctgcgctcactggcgcgaaaggcagataccaccgggatgattcaggatcgtgcgcgacctgccatctttaggatgctggtgatccctgagatttcaggctttgttcgtcgcgtgcatcaagagttaccgttgctagatattcggcagtggtgggattccccctttgccacctggcttatcgctgcacaacaacaaagctcactttctgcacaaaaattgttagagcggcttgccaatcacgtagatctggacgagcgcacgctggagcgctggcagcagggtaacgctatcggtaaaagcctgtggccgtaccgcgatacggttactccccgcgccgcgtgcaccacaacgcggcgcggcctgcccgaaatacaggcagcaccccgtgctcatgccccatga

SEQ ID NO: 352696 - DNA, 345 bp, Pseudomonas aeruginosa
atgcgccattcgaccgttacctgccattgctgcggaaaaatcatggtgccacgcacgacgtatagccgaggtctgctggggtattcgcctaccagcagtcattgcccgttctgtctgagcgataattggcacggtggcaatccgagcttgcatgaacgcattttctggctaatggggttcggcttgggagttcttgcatgcgtcatggtgggtgctttgttgttcaagctgcaatggctggctggtatcgaaggtgtatatccatggctcaccctactgactaatgctgttgcgatctgggctggctatcgcttctatgcctggtttttggcagaagaggactga

SEQ ID NO: 352697 - DNA, 333 bp, Pseudomonas aeruginosa
atgcggagccacgggctcgccggcgacgatcctgaccggctcgcgcggctgttggtcggccgcagcctcggtggcggcgatatcgatgagcatctgctcgccattggtcgcgtcctgcaggcgcaggcgcgctggaggaatcggctcgttggcaagcaggtagagtgcaccgccggtactctggacgcgcaacttgccctgcaggtcccgaggaacgccaactcgcacgttcttgtcgacaaagacaatacgttcctggccgaccgtcaatggaatggccaacggaatgcgctcccagcgcagaatctccaccgcgtgggccagtgtgggtag

SEQ ID NO: 352698 - DNA, 390 bp, Pseudomonas aeruginosa
atgtccaagcaatccaccagcttcgaaatcggctttgccctcggcagtgttgtgcgtgagttccgcagagcgctcaggcgccctccggtcgtagtgcaagcacaagcgccggttgcgttgagcgtccagcgcatcgatcctgccttcctggccggcccgaccgctggcgagctagaacacatcagcgacatcccagccatcgtccggctgaagaaggtcaacctgaatgactggtatctagccaatacgcgcgaggtgcaaaagcccaagcgcgcacgcaaacccaagccggccaaggcgaccgccaaagctgaaacgccagtcaggaaggagctcaagctgggttccctcgatcaactgatcgccccggttgatccgctgacctgctga

SEQ ID NO: 352699 - DNA, 195 bp, Pseudomonas aeruginosa; identical to SEQ ID NO: 344396

SEQ ID NO: 352700 - DNA, 363 bp, Pseudomonas aeruginosa
atgggatggcttttctcacatcagacgaaggaagacctgctgcgtgagctgctggccccaaccagtactttcgcaggcagcaccaaggtgctggcacacgcagtctccggcaatgaactttggactgtcgtaaaacgaaccttccaccttgccggattctatttcggcaagccggccggtcactcgatcaccatgatcgagctgcacttgctggactgctcggccgggcaatggggctacaagaccattccagaaagtgccggcccgttctactacggctgtccgctggagttcctggacctggctcacgatgagatcaaccaggaatggcgtgaacgcctgacgcacgaacaccaagcctga

SEQ ID NO: 352701 - DNA, 720 bp, Pseudomonas aeruginosa
atgaccgaggtggaacacgtagaactcgtccaggcggccggcacgttcgcattccacgtacatacgcttcagcagatcagcgtcgcctttcgggtcgaagactatcaccacctcgtagtccggctgctcctctgcgcgccggcgccgatagccgtggtgaaccgtctgggtccgccggcccatcttcactcgctggcgtcggccccggtagtgggtgcggcgaatatcctgggtgatgaacagttccgcgagtcgcgtcttacccacccgcgtggtgccaagcaccagggtgtggccgacgcgctcgcccagttgcaatcccacgtcctcctctcgcggttcgatgccgtggagccgaggcagaccgcccacgggtggcaacggccgagcggggttccaggccacgtcccaggcagtggctttggcgaccagcttcagggggaagggggcaaactcgagctgcttctccaaccggcgcgcgcgctggtagagcggcgagggctcgacgtaggaggcgaactggggcaggtaggtatctgccaggcgctgcgtatgcttctgcgtccagcgaaatcctttaccgatgaacaggtgttcattgctgaccggcatctcggcgctggtcatcgtgtacttcggcagtcggcgaatgttccgccggtagcggagcaccacgccggcctgcttcagccgcacgatacccagccagacgaagcatag

SEQ ID NO: 352702 - DNA, 246 bp, Pseudomonas aeruginosa
gtggcacgcgacagcgacatgcgtcccatgctcggcgtcagcatcgagttgatgctgttctcgatgtcgctgaggatcgatgtcttcagctccgaactggtggtctgcttgctgccggagtcgccgctgatgccggagctgccattctgtccggtggatccggagccgtccccgctgatgccggcggccgtcgtcataccggaacgcacggtggagtccaccgtgttgacgtcgtcaaaggcgtag

SEQ ID NO: 352703 - DNA, 354 bp, Pseudomonas aeruginosa
atgttcgacaactcgattcccgatggccagggtggctacaaggatcgcggcggcttctggtgcagcgtcgagtggtggcatcaggatgcccagcgtttcgccgaactgttcgcgaaaggtatgcgcgtcaaggtcgaaggccgggcgatcatggaccgctggccggacaaagagtctggcgaagaagtacaggcgctgaaggtcgaagcctcgcgcatttccatccttccgcatcgcctggccgaggtcaccctgttgccgtcgaccaatggccaggcgacccagcatcagcagactcggcaagtctcgcagcaggactacgacagcgccttcgacgacgacatccccatgtag

SEQ ID NO: 352704 - DNA, 351 bp, Pseudomonas aeruginosa
atggccaaggatacccgcgatacccagaccctcgacgccttcccggccaagccatccaggggccggcctcgcaaggctgacgcgctctccaatgctgagcggcagcgcctctaccgtcagcggcaggcaagcaaagcaccccaggtggatgcggatgccctgatccgtctgcagaaggaattcgaccggcatgttgatgatgcgcgcgccctggtggcccatcttcgaaagaccattgcgcagatggagcttgaggtagatctgtgccgcaaagagcgatccgatgccatgcgcgtctacagcatttaccgtgagcgcctggagcttgctggtctccccacggactattag

SEQ ID NO: 352705 - DNA, 234 bp, Pseudomonas aeruginosa
atgcacgtcactggcgcgcagctcagtggccttacgaatgatcttgaccacgcgctcctgcatctgggtggcgcgctggccatcgctatcgaccagaccgtccatggcgacggcgcggtaaagctggtgaatggtctgcaggtcggtgaggttgagctggtatcggaagccacggcgatcgagacggtcgatgaacgacagaacgtgaatgtcgttctggtggctctccgatag

SEQ ID NO: 352706 - DNA, 606 bp, Pseudomonas aeruginosa
atgcccagtcccaccccgctctaccagatcgaagaatgcccagacctgtacgttgacgcctgcgtgtgcgacgagcagcgcaacctggtctttctttcggcctggggccgcgacaccgtgacacaagagttcctggccaggctgacgctgggccgggaagcaaatgggatcgaccatttccacatcatcgtgcacggccgccgcttacctgtctttccaaaccaggatctcctggagaaacgcaccacccgccagttccgcggcacgttgttcggcagcctgctcaacctctggctgttcgatcggcgcgcctcggcgcccgaccgaggcaatcacctcgccttcgcactcctgcagcgcgatgaggatccacaccagaggctctggccgctggtgatggaaacctgtccgctccccctcctgcagcactggcgcgagcctgtgatggagatcctcacccagcaccagatgttgaccgccctacccgggacgatcggcaacgtctgcgcctggcgactcgccctgcgggtcgacgtgctcgagcccaccctcggtgagctgatccgcgaaagcattcttaccaccgatgctcaggcgcaagcctga

SEQ ID NO: 352707 - DNA, 177 bp, Pseudomonas aeruginosa
atgggcaatttcatcgccgcaaccttccagcacccgtacttgggaccccggggcgacgcttccgacaccaccaccgtgtatctggtgacgcgcggccgcggccttgccgacgcgctcctgccctcctccatcagccagatcgatcccaaaggaggccgtcgtggcgctgaccggtaa

SEQ ID NO: 352708 - DNA, 357 bp, Pseudomonas aeruginosa
atgctgaaattcaccatccagaaactgtccgccctccaccggagcctggctgccatcactttggcgctccccggtatcgccttggctgcactccccaaacccgaggcacctacccgtggggagggctcggggatcatgcaaaccatccagaacttcggctatgacggagcgatgttcctcgcggcactcatctgcgtggctgtctttttgggggtcgcttggcatacctacggcacctatcacgctatccatgacgggaagaagaagtggtcggatctcggagcgggcgtggccgtaggtgtcggcctgctgatcttgatcatttatctcgtcaccaaagcctccaccatcatgtaa

SEQ ID NO: 352709 - DNA, 270 bp, Pseudomonas aeruginosa; identical to SEQ ID NO: 329849

SEQ ID NO: 352710 - DNA, 276 bp, Pseudomonas aeruginosa; identical to SEQ ID NO: 336422

SEQ ID NO: 352711 - DNA, 267 bp, Pseudomonas aeruginosa
ttgaagtgctttcccgattgggagtggtacaacataaatatattcggaaccgacgaccccaatcatttctgggtcgaatgcgacggtcacggcaagattcttttccccggatatcccgaaggttattacgaaaaccacttcctgcattccttcgaacttgaagacggcaagatcaagcgcaaccgcgaattcatgaacgtcttccaacaattgcgcgccttgagcattccggtcccgcagatcaaacgcgaaggcattcccacctga

SEQ ID NO: 352712 - DNA, 195 bp, Pseudomonas aeruginosa
atgggcttctcgatcaccaccagcaagttgccccaggacgcctgtatcacgctggccaccaagatcgcgaagaacaccttcgagcagaccaagatcaacagcggatccgcgatcaccggagaagtgaccaccgcagccgcgacccaggcctgcagcagcgacagcaacagcattacctggacctatagttcgtga

SEQ ID NO: 352713 - DNA, 141 bp, Pseudomonas aeruginosa
atgtatgtgctccataccccgaaaaactcagactggcgcctgtccagtttcctggcccgcctcgatactgtactgagtcgaagtaaagaaatttattcttccaagcttgaactgctagaacaggaggtgcagctgaggtaa

SEQ ID NO: 352714 - DNA, 1368 bp, Pseudomonas aeruginosa
atggcgctcacagacgtcgccgtccggcaggcccgcccgaccggcaaagactacaccctccctgattttgatggcctttcattggcggtgtccgccaagggcggcaagtcgtggcacttcaggtactactgggccgccaaacagaagcggatgtccctgggtacctatccggcgatcagcctgcgggaggcgcgcgcgttgcgcgatgaggcccgtgccttggctgccaaaggcgtcaaccccaaggtcgaccgtaagcacaagctccgcgctgtccgtttggcgagcgagaacagcttcaaggcagtgtatctgcagtggctcgcgcaccgcaggcaggaactcaaggaggggcggcagagcacgctgtcgcagatccagcgcatcttcgacaaagacgtgcttcctgccttgggtggcatcgccattcatgatgtccgtcgccccgacctcctggccgtactggctcgcatcgagcagcgtcgtgcattcaccactgcggaaaaggtgcgcacctggctcaggcacttgttccgctttgccatggtgaaagtcgagggggtggagggtaatcccgcatcggatctggatgtggtggcggttcccaaaccgccggtggttaataatccctttctgcggctgcacgagttgcctgagctgctatgcaagctacgccgttataggggcatgatgaccacgcaactcggcatccgcctgttgctgctgacaggtgtgcgcacgggtgagttgcgccatgcgacgccagatcaattcgatctggagcgtggcctgtggatcattccacccgaggtggtcaagcaactacaggatggtatgcgcaagcgtgggcggcggccacaggatattccagcctatatcgtgccgttgtcggttcaggcgatcgaaatcgttcgtcagttactggggcaggtcaagccagcccagtgttatctgctggctcatcgcagtgaactgaaaaagcgcatcagtgagaacacactgaatggagcgctcaagcgcatgggctaccaggggctgctcaccggacatggtattcgtggcacgctctccacagcgctcaacgagattggctaccccagaatctgggtggacgcccagctctcgcacgcagacccaaacagggtcagcgcgacatacaaccacgctctgtatgtggagccacgacggaggatgatgcaggactgggctgatcggctcgatctgctggagcggggggaagtaaaaactgcgggtaagcatttgacgatacttattgacggcataccggcactgggtgaaaggccaaaagtatctggcgaatcggtggtgaacccgtggcttggccaaaaacacgggaaaggcggatga

SEQ ID NO: 352715 - DNA, 636 bp, Pseudomonas aeruginosa
atgatgagcacgtctacatcgacttgtaacctgtcagcgataatcggaagagcaacttctggcatagaccataagccctcacatcaactggtgaggcaggtcgccctgaaattgttcagtgaaataggatttcataatgtcagcctgagaaaactggccaatacattggaaatgcagcccggatcactctacaaccacatagatggcaagcaagagctgttattcgaactgatcgacgaatacgaaacggacttactcgataccattaaagttgatctaccatcaggtagctctcccgaacaccggctctctgcctacatccgctcacatctcggattcaatgcttcgagcccacaacatcgctccattgcacaacttgaattcagaaaccttaccccaaatcaacaaaagatcattgaagccatccgcgcagagtacacattcatactcgctgaaataattcagcacggcatactaactcaagtattcagacccatccccctccaagtagccacacgcctaattctatccatgctaactgaaatgagcagagaggataaaagcaatgccactttaaccattgaagatagcacgacactactccacgagactgtgcttagaatcctgcatacctga

SEQ ID NO: 352716 - DNA, 801 bp, Pseudomonas aeruginosa
atgaccgacttcaccaccgtacagcttgaaaaagacccacgcggcttcgccaccctgtggctgaaccgccctgaaaagaacaacgccttcaacgccgaaatgatccgcgagctgattcttgccctcgatgccgtgggtgaggacaagagcctacgctttctcctgctgcgcggccgtggcaagcacttttccgctggcgccgacctggcctggatgcagcacgccgcgactctcgactacaacgccaacttgaatgacgcccgcgagctggccgagctgatgtacaacctgcacggcctgaagatccctaccctggccgtcgtccagggtgcggccttcggcggtgcggtgggcctggccagttgctgcgacatggccatcggcgccgaagatgccctgttctcgctgtccgaagtgcgcatcggcctggctccggcggtgatcagccccttcgtcgtgcaggccatcggcgaacgcgcggccaagcgctacgcgctgaccgccgaacgcttcgatggcaagcgcgcccgcgaactgggcctgctcgccgagtgtttcccgattggcgagctggacgctcaggtcgaggcctggatcggcaatctgctgcacaacagcccgcaagcgatgcgcgccagcaaggatctgctgcgcgaagtcggcagcggtgagctaaccccggcgctgcgtcgttacacggaaaataccatcgcccgcctgcgcgtcagcgccgagggccaggaaggcctgcgtgctttcctcgacaaacgcaaaccgagctggcaggagcaccaagcatga

SEQ ID NO: 352717 - DNA, 798 bp, Pseudomonas aeruginosa
atgcaacgtctcgaaggcaaggtcgccgtgctcacaggagcgggcagcggcatcggccgggccacggcccggatgttcgccgggcagggcgcgtgcgtggtggtcaccgacctctacgaacacgcggcgcgggaagtcgagcaaggcatagtcgagagtggtggtcgcgccatcgcgctgcgggtcgacgtcggtgtggaagatgacctgcggcggatgatcgcgcttgcgctcgacgccttcgggcgtctcgatgtgctgttcaacaatgccgtcaacaagaatccggcgaccgtgcgcgatgtggatttcctcgacttcaacgaggagctgttccacgccaacatgcgggtcaacgtgctcggcggcgtgctggcctgcaagcacgccctgccgcacatgctggggaggggagaggggtcgatcatcttcacctcgtcgaccagctcgatcgccggcgaggtcgcccagttcagctacggcgcctcgaaggcggcgctgaactggtacgtgcagagcatcgccgcgaccttcggcaagcgcggtatccgctgtaacgccatcctccccggcgtgatccgtaccccggcgatggagagctgggccaacgtggcgatgcagacggccttcctcgatatccagaacgttccgcgtctcggcgagccggaggacatcgccggcatggcgctgtacctggcctcggacgaatcccgctacgtcaacggcgcgctattgcgcgtcgacggcggcatgagctgcaccacgccgatggtgccggtcgtgcgcgcttacctctga

SEQ ID NO: 352718 - DNA, 843 bp, Pseudomonas aeruginosa
atgatgggtgaactcgaacaagccagcgatgcgctggcgttcaaacggaaatacggcccctgggcgctgatcgccggggcctcgcacggggtgggcgcggcgtttgcccgccagttggcggcgcgtggcctgaactgcgtgctggtggcgcggcgccaggacgccctggacgcgctgcgcctggaactggttgcccaccatggcgtcgaggtgctggtggtcagccaggacctgtcgcatgctgacgcggcgagtagcctgctcgccgccgtggcggagcgcgagatcggcctgttcgtctacaacgccggcggcgaccctttccttacccgtttcctcgacacctcggtggagggctggagctcgctgctgcgtctcaacgcctcgacgccgatggcgtgctgtcatgccttcggagggcggatgcttggccgtggccggggaggggtgatcctggttggttcccaggccgccctgggcggcatccgcaagctggccatgtacagcgccagcaagggcttcgcgatgaacctcggcgagtcgctatgggccgagtggcaggatcgtggcgtggacgtgctgaacctgctcatcggcaccgtggataccccgacgatgcgcgaagctatggtcaggttgaacatccccgatgccctgagcatgcccttgccccaggccgaagacgtggttgccgtggccctggacggactgggcaacgggccgacgctgatccacccagacgacctggcgtccggcgaaccgcaccggcggccaggcgtcgcacgccgtgaacacaccattggcaaaagcgccgaggcggcggtcttcatcggtgccgattga

SEQ ID NO: 352719 - DNA, 906 bp, Pseudomonas aeruginosa
atgaacgcgatcagctacaatgaatacgaatccgaacatactggcgatttctggaccgaagcctcgctacgcaaacaaggtttcgacattcgcctggaacacgcccactggcccagctcgggcacggccttgatcaagctccagaagaattgcctggtacgcatgctactgacgccagccggccttgcctgcaacggcaccccacacaatttcggcagcttcgacggtcatgccgcgcactgtttcaagccacttggccagcttctgttcattcctcatggtaccgaattccatctcaaacatggcgcctaccagcagaagtcgctgatctgcatgttcgatccggcgaacctaggctcgctggccgctctccactgggactggaacagccgcgcctgcgaggaaatgctcaacctacagagcctctacctgcaagctaccctgcgacgtttggcggaagaggtcaccacccccggcttcgccagcgaactgcacatcgaatgcctactgaccggcatcgccctggagctgcaccgggagtttctccgtgaccacggcgacaccgaggagaacggcaaactcagccctggccaactcctgctgctaagggaaatgttggaagcaggcccagagggggatacgtccttgcggcatctggcagcggcctgttccttgccggttaggcagctatcgactcgcctcaagaacaccaccggcaagacgctacgccgctatgccgcggagatccgggtcagaaaggccatgacgctgctctccgatcaacgcttgctgatcaagcaggtcgcctatggcgcgggcttccagaatgccgcggcttttaccgcggcctttcgtaaggaagtgggactgaccccagaagagttccgccggcagcgcagccgctga

SEQ ID NO: 352720 - DNA, 1686 bp, Pseudomonas aeruginosa
atgaaacagatcatgaagcttggccggaaaacagtctcgctcagtgccctggcggtcgcagtcatgggctgcgtcggtggcgcgacggcagcgtcgttcgatgtgggcaacccggatgttcgcctgcgctgggacaataccctgaggtacaacctcggcgtccgcatggaagagcaggactccaagatcatgaacaacccgaactacgacgagtccgatggcaagttcgacaagggcgacatcgtgaccaatcgtctcgacctgctcagcgagctcgatctgtcctatcgcaacgatttcggggcacgggtcagtgccgccctctggtacgaccacgcctaccgtgataccgatgtcgatagctacatccgcggctttgccaccagctatagaaacgaccgttacagctccgaggccaaacgctacgttcatggcccttcgggcgagatccttgacgccttcgtctggaccaacttcagcctgggcgcgacgccggtcaacctgaaagctggtcgccacaccaactactggggcgagggcttgctgttcggcgcgcattcggtcgcctactcgcaggctccccttgatggtatgaaggcggtaaccagtcccggcatcgagaccaaggaagtcttcctgccgatcggccaggtttcggccaaggcgcaggtgacagacaacctgacgctggctggtcagtacttctacgaatgggacaacagccgctttccttacggcggcacctattttggtgctgcggacatgttgttcgaggggactcacaggttgccggccctgcctgctggcgtacaccctgcattccccgatggcgtcaatctcaaccgcactacctcgaaacgaggccgtgacggcgagaactggggtgtgatggccaagcttaacgtcgaggcgatcgaaacgaccctaggggcctactatcgcgagttcgacgactaccaaccctggttggcgccgcaggtcgactcagttggcggttcttacaggctggtctatccgcgtgacgtcaagctttatggcctcagtttctcgcgcgccatcgccaccgctgctgtcggcgccgagctttcctatcgtaagggcggtgctctcaatgccaccggcgtcagccttatcgataatgaggggccgcgtggcgataccctgcatgcagtggtcaatgccgtgtatggcgtgccgcgtaacttcattgccgacaacgctaccctggtcgccgaacttgcctacagccgcctgcagaaggtgactgagcacaaagagctgttcaagggcgaaggctacaactgcgtcgatgtgcaaacaggtggtcggggcgataaatccgatggttgttcgaccaaggattactgggccgttgcggtgaactacaccccgcagtatgtcgaaatcctgccgtcttggaccctggaagtgccgctgaccatcaactatggcctgaagggcaacgccgccagcgctggtggcggaagcgagggcgctctgtcctggtcggtgggtgccaagatgatctaccgtcaggaacacgagttcagcctgcgctacgccgacgtatcggcccaggagaagaactcccgcaatatctatggcgagcgcatggtcaatggcaacggcaacgtgggcggaactgatcgcggttggctggccttcacttacaaaacctccttttaa

SEQ ID NO: 352721 - DNA, 1158 bp, Pseudomonas aeruginosa
atgattagccccggccttgatgtgattcatccgttgcaccgccgtgtagatacggtcatgcgctcatgtcgccagcggttgtgtactgccgcgctgatttccctgttgccgcttttggtaacaattagggtggaggccgctgtcggctccgaccccttggatgcgccagcggcgatgatcgatgccggtgtgtcggctccggtgataggcgttgcgcaagtcggtggaaccctggtcagtgtcggtccgcgtgggctgatccagcgttccgacgatggtggccgctcctggcagcaggtacccagcccggtgtccagtgatctggttcaggtacgtttcagcgatgagcgcaacggttggattgttggtcacgactctgtgttgctgcatacctccgacggtggcgacagctggcagattcagcttgacgggcgtcgcctgctggccttgctgcagggctggtacggccagcgtgctgaggctggagatgcgatagccgatgacatgctccgtgaaatcggcatggccatgactacctcggcgacgcccgatgtaatggccgctccttttctcgatgtgttgttcgacggccggggccacggtttcgtggttggcgcattcggcatgatcctgcacagccaggatgccggcgcgacttgggagccctggatcgagcgcaccgacaatgatcggcgcatgcacctgtacggcctggacgagcgccatggggtgttctacgtcgctggcgaacaggggctgctaatgcgcctggagccgcaggcagggcgcttcgtcgcgctggaggttccctacggcggtaccttctttggtgtgcgggctctcgacgacctgctgcttgtgcatggcctgcgtggcaacctgttcgccagtcgcgatgacggccagcaatggcagaaagtcgaaaccggcctggactccagtctggtgagcctggtgaagcggggcggccagctggtcgtcgtcagccagggtggacagatggtcgccgtcaatcccaacaccctggctgttacctcgctgcagcctgtgcgggtcggtgagatctacgcggcgagcattttcagtgtggctgaagacatgttggtcgtggcgctgttttccggcgcccgggttgtcgctatcgccaaggcggactga

SEQ ID NO: 352722 - DNA, 576 bp, Pseudomonas aeruginosa
atgaacgaattgcaacgcctgctcgaacccaccccgctgccgccaactgaccgcgccaagcgggttttcagcggcgatccgctgtaccacgagatcctcgacttcctccacgacgaggccgagctgctcgacaccctgcaactgcgccagtggggcgagagcctgacccaagacctggagtacaacctgccgatccgcctgacccgcccggtgcgtcagcaggcacagaccgtggtgcgcaccgtgcaacacatgcacgacaactacggctcgatgatggtgcggatcatgcgcatcaccgacaccaagagcgcctggggcgaggacccgccctcgcgcaccaagcgcctggtcagcaacgtccgcgtgttcgccaccgacaaggccgacgaatacaaggtgctgagctacctgctggtgacccgtagccgcttcgacttcgacgacttcgacctgatcccctgcgaacgccacgacatcctgcgccgcgaggacggacagctgaagctggcgcgccgcgaggtgatcgtcgaccaggcggtgatcggcacaccgaacctcggaatcttcttctga

SEQ ID NO: 352723 - DNA, 1398 bp, Pseudomonas aeruginosa
atgaccagttacacgaatccggcactgagcgatggtacgaaaatctcggacctgatcgacctggacacccgtgaagtgaagatgcggacactgtccgaccccgaactctacaacctggaaatgaagaagatcttcgccaggacctgggtgttcctcggccacgaaacagaaattcccaacaaaggcgactatgtggttcgcgacatgggctccgactcggtgatcgtcgcccgttctggcgataaccaaatctatgtatcgctgaacgtctgcccacaccgcggcatgaaaatatccaccctcgacggtggtaacgcctccacccacctgtgcatctaccatggttgggccttcaagcccaacggcgacttcatcggcgcgccggtggagaaagagtgcatgcacggcaagacccgcacgaaagcggagctgggcctgaagaaagctcgggtgacactctacggcggtctgatcttcgccacctggaacatcgacggtccatccttcgaggaattcctcggcgacgccaagtggtacttcgacaccctctggtgccgcactaccgctggcatggaagtcctcggcccgccgcagcgcttcgttatccgtgccaactggaagaccgcctgcgagcaatcggcttccgacggcttccacaccctgaccctgcaccgctggctgggcgaggtcggcccctacgccaagaagccggacgccgagggcaagggtggcgacctgaccccagaaatgtacggagccgaagtgtggaccgagcacgggcacaccatgcgttgcatcgagctggaccgcaagatccgccgcctcaccggcaaggacccggccaccctgagcgccgcggaaaagctcgccctgctgccgccgccgggcatcaccaaggagatggttccggagctgctcgagcgcttcagcgatgagcaattgcagctgatgagctcccacccgccacaggtcggcaacttcttccccaatggcctgttcgagttcatctacctgccccagccggatggcaccgtgctcggcgccatggcgctgcacgcctacgtgcccaaggggccggacaagctggagttcatcaactggatcctcgccgagaaggacaccccgccggaaatcaaagcgcgcatgctgcgccagtcgatccagttgctcggcacctccggcatggtcgagcaggacgactccgacacctggccgcaccagaccatcgtcgccaagggcgcgatgagccaggacatcaccctcaagtaccaggcgctctacgagactggcaagcccgtcgactggccgggaccgggcaacgttggcgaaggcttcaccaaggacgacacccagtggcaatggtggctgtactggcaccaactgatgaccaccgcctga

SEQ ID NO: 352724 - DNA, 567 bp, Pseudomonas aeruginosa
atgcgtctctacctgcgcgaaaaaccgtcccagggcagggatatcgccaaggtgctcggtgccaaacggcaagtcgaagacggcctgatcggcccggagataaccgtcacctggtgcatcggccacctgcgggaagctgcgcctcccgaggcctacggcgagcagtacaagcaatggtcgctggagcagttgccgatcattccgtcgcagcggaagttggaggtcaaaccgaaaaccgcgaaacagctcagtgttgttcagcacctgctcggtgaagcagatgccgtggtgattgccaccgacgcggatcgggaaggcgagatgatcgcccacgaaattcgggagcgttgtcaccatcacgggccggtgcaacgaatgtggctatcgactctaaacgaagactcgatccgcaaggctctggttacgctgaagcccggcgcggagaccctgcccctctactacttactccgccccacccgccccgtgcagatttacaagcctcactcgacactcatgcaactggcgacgatcttatgtccttcgaggtcgcgtacatacgccgcatag

SEQ ID NO: 352725 - DNA, 978 bp, Pseudomonas aeruginosa
atgaaaaccaccgtagtcagcatgatgttcgcctcgacactgctcattgccagcagtgcatctgccgaaatcttttcgctcaagatggaaaacgacatattcactggtggccgggatggtcactacaccaacggtatcgagggaagctggtctttcgaaccggctcaggatcattggatcaggggcatggccgatgtcgtgccttactggtctgccagcgatctcacctatgcggcctacagattcggccaccagatgtacacgcccgaggagatcgaacaggttcagttgcaggaggacgacaggccctacgcgggcttgctcttcgccggcgtgacgctgttttcctcagagcagggcgatggccggcgcatcaccgatacgctgacgctagatgtcggtctagtcggacagggggcaggcggcaaacgactgcagcgcgccgtgcacaaggtcaccagcagtgatgagccaaaaggttggaaccaccagttggagaacgagccgttcgtcaacctgggttatgaaaaacgctggtggaagcaggacagccttgctgggctggaactggagtacggccccagcatgggtggcgccattggcaatctctatacttacgcctccgccggagctggagtgagattcgggcatggcctggatcgtagcctgagccaggcatcgatcacaccggcctctagccacgtgcagtacttcagtcccaacaaagagtttgcctggttcttcttcgccaacctcgaaggacgcctgatggcacacaacatgctgctggacggaaatacctttcgcaacagccactccgtcaaccgcgagaaatgggtgggggatgcccagttgggcttagcgctgatgtgggatcgttggcagttgtccattgccaatgtctggcgtagccgtgagttcgaaacccaagacaaacacgaccagttcggctcgatttcactgtcaacctggctgtga

SEQ ID NO: 352726 - DNA, 216 bp, Pseudomonas aeruginosa
atgaaaaaagcctttctcgcactttccactctgaccctcggcctgctcgtcggctgctccacaccctcgctgatcgtgctcagcaatggccaggaaattcagaccctggacaagcctaaatacgatgccaaaagcggcttttacgagttcaagcaacccgacggcaaactgcagcgcctcaacaaggatcaggtgcataccatcaaagccctctga

SEQ ID NO: 352727 - DNA, 1419 bp, Pseudomonas aeruginosa
gtgaatcgatcgaacgcattgcgcagtgcactgaccatgatcctccttttcacctccacgacgggctgggcgcaggaaacacagcggcctgtcgctggaaaactggtaggcatctatcaggaagcggcgaagaacaatgccgatatcgccgccgcgcgcgccgattatcgggctcgccgcgaagtggtgccgcaggcccgtgccgggttgctgcccaacctctcggcgggcgccaattacggcgacacgcgtaccgagatcgattcgccgagcgcgaccatctcgcgtagcggtctggtttaccaggccaacctcagccagccgctgttccgtgccgaccgctggttccagctgcaggccgccgaggccaccagcgagcaggccgcgctggaattgtccgccaccgagcagaacctgatcctgcagagcgccgagacctacttcgccgtgctgcgtgcccaggacaccctggcttcgaccaaggccgaggaagcggcgttcaagcgccaactggatcaggccaacgagcgtttcgacgtcggcctttccgacaagaccgacgtgctcgaggcacaggccggcttcgacaccgcccgcgccaaccgcctgctcgccgagcgtgcggtggatgatgccttccaggcgctggtcaccctgaccaaccgcgagttccgcaacatcgaaggcctccagcacagcctgccgcttctcacgccggagcccaacgatgccaccacctgggtcaacactgccgccgcgcagaacctcaacctgcaggccagctatttcgcggtcaatgccgccgaagaaaccctgcgccagcgcaagtccggccatgcgccaaccctggacgcagtggtcagctaccagaagggcgataacgacagcctgggcttcagcaactcgggattgccactgtcgccgacttacagtagcgatgtttcgcagcgctccatcggcctgcagttgaacattccgctgtacagcggcggcctgaccagctcgcaggtgcgcgaggcctatcagcgcctgggccagaccgagcagttgcgcgagagcctgcgtcgccaggtggtacagaacacccgcaacctgttccgtgcggtgaataccgacgtggaaaccgtgcaggcccgccgccagtcgatcatttccaaccagagtgccttggaagccaccgagatcggctatcaggtcggtactcgcaacatcgtcgacgtgctcgacgcccagcgccagctgtacagcgcggtgcgcaactacaacgacgcgcgctacgactacatcctcaacaacctgcgcctgaagcaggccgccggcaccctcagcccgaatgacctggaagcgctgcagcaatacctgaaacccgactacgaccccgacaaagacttcctgccagcggaaaccccggaggcctga

SEQ ID NO: 352728 - DNA, 1116 bp, Pseudomonas aeruginosa
atgcgcaccctgagcaatatcctgcaactgggtatcaaggaattgcgcagtctgtaccgtgatccggcgctgctgctgttgatcctctacgttttcaccctcggcatctattccagtgccacaggcgtaccggaagccccgcaccgcgccactatcggcgtaatcgacgaggatcgctcgcaggtctccacccgcatcatcagcgccttccagttgccctacttcctcaaacccaaacccatcgacctgatcgaaatggatcagggtatggacgccgggctctacaccttcaccctgaacatcccgccgagcttccagcaagacctgctggccgggcgcaaccccacgatccagctcaacgtcgacgccacccagatcacccaggcattcaccggtgccggacacatccagcagatcatcaatgacgaagtgagcgagttcctcgaccgctaccgtagccagcaggcgctgccggtcgaggccgtggtacacgtcaagtacaaccccaacctggtgcgctcctggttcggcgcagtgaacgaggtgatcaaccagatcaccatgctgtcgatcatccttaccggcgccgcgctgatccgcgaacgtgagcacggcaccatcgagcacctgctggtgatgccggtcacgccgttcgagatcatgtcggccaaggtctggtcaatgggcctggtggttctcacagcatcggccatcgccctacgcttcgtcgtcgagggctggctggaagtaccgatccacggttcgattgcgctgttcctgttcggcgccgctctgcatctgttcgccaccacctcgatgggcatcttcttcggcaccctggcccgctcgatgccgcaactgggtctgctggtgattctcgtgctgatgccgctgcagatactgtcgggcggtatgacgccgcgcgaaagcatgcccgaactggtgcagcagatcatgctggtggcgcccaccacccatttcgtcgaactcgcccaggccattctgttccgcgccgccggcccttccatcgtctggccgcaactgctggccctggtggccatcggcagcctgttcttcgttggcgccctgtcccgcctgcgtaaatccctgcattga

SEQ ID NO: 352729 - DNA, 2739 bp, Pseudomonas aeruginosa
atgaccccgcccccaccagtggcacgcctcggtggcgtgagcctgcgctacaagacgaactgcgcgctcgacagggtcgatctggaggttcccgccgggcgcatgatcggcctgatcggcccggacggcgtcggcaagtcgagcctgctggcactggtttccggcgctcggcgcatccagtcgggcacgatcgaggtacttggcggcgatatggcctcgcgccagcaccgccgcgcggtttgcccgcgcatcgcctacatgccgcagggcctgggcaagaacctctactcgacgctgacggtgttcgagaacctcgacttcttcggtcgcctgttcggccagggccaggccgaacgcgcggcgcgcatcgccgacctgacccgcagcactggcctggcccctttcaccgatcggccggcgggcaagctgtccggcggcatgaagcagaagctcggcctgtgctgtgcgctgatccacgaccccgatctgctgattctcgacgagcccaccaccggcgtcgatccgctggcgcgcaaccagttctgggatctaatcgatcgcatacgccagcgccgtcccggcatgagcgtgatcgtcgccaccgcctatatggacgaagcgcagcgcttcgactggctggtggccatggacgatggacgtattctcgataccggatcccccgccgaactgctcgaacgcaccgccagcagcaacctcgaagccgccttcatcgccctgctcccggaagaaaaacgccgtggtcaccatgcgctggtgattccaccgcgcccggccagctcaggcgaagcggcaatcgccatcgaggcgcacgagctaacctgccgtttcggcgatttcgtcgccgtggatcacgtcgatttccgcatcgagcgtggggaaatcttcggtttcctcggctccaacggctgcggcaagtccaccaccatgaaaatgctcaccggcctgcagccggccagcgaggggaactgcgcgctgttcggccaacccgtcgacccgcgcgacatcgatacccgccggcgggtcggctacatgtctcaggcgttctcactgtacagcgagctgagcgtacgccagaacctcgacctgcatgcccggctattccacatacctgccgaacgacgggacgcgcggatcgaggaaatgctcaccgaattcgacctgcgcaacgtcgccgagcagttgcccggcgacctgcctctgggcgtgcgccagcgcctgtctctggccgtggcggtgatccatcagccggagatcctgatcctcgacgaacccacctccggggtcgacccggtggctcgcgacggcttctgggaactgctgataaagctgtcgcgcgaggacggagtgaccatcttcatctccacccacttcatgaacgaggccctgcgctgcgatcgcatgtcgatgatgcacgctggtcgggtgctggacagcgacacgccgcgcggtctgatggccaaacgcggcttggacagtctggaagacaccttcatcgcctacctgaaggatgttgccgaggacgccgccagcgccgacgacacaccgcagacacccggcacagtcagcgcaggcgccggtgcggatctgaaggcacgcttcagcctgcgccgcctgttcagctacgcccggcgggagtcgatggaactgcgccgcgacccgatccgcgcgaccctggcgctgctcggtaccgtcatgctgatgttcatcatgggttatggcatcagcatggacgtcgaggatctcagctacgccgtgctcgaccgcgaccagaccaccaccagccaggcctatgcgctgaacatcgccggctcacgctacttcgtcgaaaagcctcccctgcgcagctacgaagagctcgacctgcgcatgcgcaccggtgatatcagcctggcagtggaaatcccccctaacttcggccgtgacctcaagcgcggtgccaacccacagatcggtttctgggtggacggtgccatgccgacccgcgccgacaccgtcaagggctatgtccagggcatccactttagctacctgcaggagctgcagcgtaccgtcagtcaacagatcccggacaaccgggccgacgtcgccctgcgctaccgctacaacccggacgtgcagagcctgccagccatggtgccggcagtgattcccctactgctgatgctgattccggcgatgctcaccgccctcggcgtagtacgcgagaaggaactgggctcgatcaccaacttctacgtcaccccggtcacccgcctggagtttctcctcggcaagcagttgccctacgtcgccctgggcatgatcaacttcttcctactggtgatgctcgcggtgttcgtgttcggcgtgccggtcaagggcagcatgctcaccctgaccttgggcgccctgctctatatcgcctgtgccaccggtctgggcctgctgatgtcatccgtgctcaacagccagatagcggcgatcttcggcaccgccatcgccaccctgatccccgccgcccagttttccgggctgatccatccggtatcggccatggagggcgccggtgcccttatcggccagatctacccgaccagccacttcctgatcatcagccgtggcgtgttctcgaaaagcctggggctggaggagctgtacccctatctcatccctctgctactgaccattcccgtgctcatgctgctcagcgtcgccggcctgaaaaagcaggagaaataa

SEQ ID NO: 352730 - DNA, 789 bp, Pseudomonas aeruginosa
gtgcgccaggccgagaacgccgagcgcaccgccatcgctcaggtcagtctgcgcgaaagcgagaaggtcagcaccgaggccatggtgcagcagcgccaggccgagctgaccgccacgcagaagcgtcatgcccgtaccgctaccctggttcagcgcaatgccctgccgcgccagcaactggacgacgacctggctgcactgcaaagcgctcaggcagcactggccgccgcccgtgctcaggtggcttcggccatggccggcatcagcgccgcccatgcccaggtggacgaagcccgctcggctgtggaggcggccggcgccagcgtcgagcggctgcaggccgacctctacgacagccagctcaaaacgccccgcgccggccgcgtgcaataccgagtagcccagccaggcgaggtgctaggcgccggcggcaaggtgctcaacctggtagatctccgcgacgtctacatgacgttcttcctgcctgagcgccaagctggccgtgtgcccttaggcagcgaggtgcgcctggtgctggacgccgcaccgcagtacgtgattccagccagggtcagctatgtggccagcgtcgcccagttcacgccgaagacggtggagaccgccagtgagcgcgagaagctgatgttccgggtcaaggcgcgcctcgatcccgaactgctgagcaaacacctgcagcaggtgaaaaccggcgtccccggcatggcctacctgcgtctcgactcagaggccgagtggcctgagcacctgcgcatccgggtgccgcaatga

SEQ ID NO: 352731 - DNA, 672 bp, Pseudomonas aeruginosa
atgcccccagtcaccgatactgcgcgagaacctcgccaggcccgtggccagaaacgtttcgacagcgtgctcgatgcctgcgcccgattgctgatcactcagggagaggccgcgctgaccatgcatggcctagcccatgctgcacagacctcaataggctcgctctaccattttttcccggacaaacgtagcgttctggaagcacttggcaaacgtcatctcgacgctctgcgggtcaccgccgagcaagtagaagcccagccagacaccttctgggccagttgcacccacgagcagttgatcgatcaactgctgcgcccctatcttgagtactctgtgcggcatccagactttctccacctcatccgccgtagcggcagctccctgccgcccaccagcgaccagcaactggaggagaaggtacacgccatgttcctgcgtgccctcaccctacgcctgcccatggccagcaccgaggagcagtatgcctatgccgccaccctattcagcttgccaattggcatgctgacccagcagtcgctcgaatacgacgcagcgctgcgccaacgtatcctgacccgggaaatcccgagagcactggccgcctacatcggcgccatcgaggccgcccacggcttcgccccggacaagcaacgcacgggcaggcggtag

SEQ ID NO: 352732 - DNA, 1956 bp, Pseudomonas aeruginosa
atgaatccagccgtctatctcgaccgttcctgcatcgtcagcgctagatgcaggtctttccttcccgttacgctactgcttgccgcgttgttgtcattggccggttgtgcgggagtcaaggtcaacgcgatcagcaacgaggactacctgtcgttgcgccgtggcgacgtactgaccaccggtaatctcagtgcctcggctaccaccgcgctgcaggtggtgggcgttgatgagaagagctgtctgacggatctgccggcctgtcgcgagaggctggccgataacggcggtctggacgatgagcggcggctatcggcgctgtcggagttgtggttgaagacggcgctggatctggacagggcaggcagtgctgagcagagcctggacgcctacctggaaagcgcccgttttgcctacgcttacctgttcttcagcacacgctcaccgagccagcgggcgctggaggatcgccagacccaggtgcgcgactactacaacttctcggtgcagcaggcactcgccggactcttcgaattgaacagggggcgagcgcgacaacctgaacacgaagcgggcaacttccgcctgcgatccgggcgctgggagatttccggtagcatggatcaggtacgctgggcttcttctcgtctgctaccacaggaactgctcccagccgcctcgctgtctttcgccggcttgcgcaaccagtaccgtcgcgatggtctgggcgccgaactggtggctgtcaccgacaaacgagtggtcagcagtcgcagtgatgcgcaaccctggagcgagacccccttcccggcgctcagcgcggtggcgcgcttccccggcgagaccctggagcaggtgttggtgggcgagcaggtggaaatcttcggctacgatccctaccgccgggacagtgtcgagatggccggtatggagatgccgctggcggccaacttcacttctggctatggcctctggctggcccgttccgggttcgccaggcagtcgctattgaccttggtcgggcgcggtgaggtgttggagaaaccgcacctgtacctgttgcagccttacgatcccgagcggcgcatcgtcatcatgctgcatggcctggccagtagcccggaggcctggatcaatgtggccaacgaagtgctcggtgacgaggtgctgcgccgtaattaccagatctggcagatatactaccccaccaacctgcccatcgccttcaacaatctggagattcgccaggccatcgagcagacgctgaaacacttcgatccacagggtgaggccgtggccagccgcgatatcgtgctggtgggccacagcatgggaggggtgctgtcacgtctgttggtgtcatcgtccggcgagcggatgtggacttcgctccaggggcgcttcaaagtggacggcaaacgtcagcgccaggcacgcacggctctggcaccctacctggagttcgagcccttgccgcaggtcggacgggcgatcttcgccgccgcaccgcacggcggcacgcctttcgccgagaatcgcctgtcgcgctgggcggccggcctggtcaagctgccggtatcggtactcggtcggctcaaggaggtcacccaggtgctgatcgaccccaactcggcggcgcctgtagccctggatcgaggtttcaacagtatcgacaacctcagcgatcaggatcctttcatcagggccgcggcacaactgccgatctcgccacgggtgcattatcacagcatcatcggcaggcatacggaggcgccgtcgttgctcgataccagcgatggcgtggtgccgtatcgcagtgcccatctacctggcgccacctcggagctggtggtgccctcctggcacagcgtgcaggaaaccccggaggccatcgtcgagatccgtcgcgtgctccatgagcatcttgacgaactgcagggggatgatgggcgatga

SEQ ID NO: 352733 - DNA, 1038 bp, Pseudomonas aeruginosa
atgatccgccatgtctcacgtctgttgctgcgactagcactcactccgctggcgctgctggccattgcctggggtgccctcacgctggtctatcgcttggactggccagcgccgttcggcatcgtcctggccatcggctggtgcctgctcggcgccgccttgctggtgctgctgtggcgccggccgccgttgtggggctgtgctggcctcctgttggctttcgccatacacctggcctggtggaacaccctgcagccttccctccagcgtgactgggccgacgatgtggcgcataccctcaccggccggatggaggggggacggttgttactcgagaacgtgcgcaacttccactggcgttccgacgaggactatgacgtcgcctgggagcatcgtgcctacgacctggatcgcctggcgtcggtggatctggtcacctcctactgggggatgccggcgatcgcccacgtcatcgtctccttcggcttcgatgacggccgctttctcgccttttccgtggagatccgcaaggaacgaggtgaggcctattccgagatcggcggtttcttcaagcagttcgaactgagcatcgtggctgctgacgagcgcgatgtcctgcgcgtgcgcagcaatgtgcgtgacgaggatctctacctgtatcgcctgaacatgtcgcgcccggcgatgcgggcgttgctgctgtcctatgtcgagcaggccaatatcctggccggtcggccacgcttctaccataccctgaccgccaactgcacgaccgtggtgttcgacatggcacgacacatagccggcggcctgccgagggatcatcgcctgctgctgaccggctacctgccgggctacctccaggatatcggtgccctgcagcccggctacacgtctgcgcacctgcgcgagcggggtcggatcaccgggccggcgcgggcggccgatggcgtagaggatttttcccggcagcttcgcctggccattcccggctgggaggagatgcaggacatcgagaagaaggaggggcaatga

SEQ ID NO: 352734 - DNA, 165 bp, Pseudomonas aeruginosa
atgaaggaactgaacatcatgctgctggtgctggtcacggcgtttctgctgctgggcatcggcttcagcaggcgcgacaaggagtggggggtggtgcttatcgccatgggagtgatttgtgtactggcgaccatcggttacagaattcggattgccttgggctag

SEQ ID NO: 352735 - DNA, 861 bp, Pseudomonas aeruginosa
atgatcattaccggcagcatcgaagagttacgcgccatcctccatggcattcggaagcagaaccgctcaataggcctggttccgaccatgggcaacctgcatcagggccacctctcgcttctggaaacggcccgcagggaaagtcacttcgtagtcaccagcatcttcgtcaatccgctacagttcggcccgaaggaggatctgcaagcctatccgagaacaccgcaagaggatcgggataccctggctcgggcggggtgtgatctgctattcgccccgaataccgaagagatgtacccgaacgggctatctagtcactgcagcgtgtcagttcccggagtatccgaaggcctgtgcggtgaaagccgacctggacacttcgaaggcgtggcgaccgtggtcagcaaactgttcaatatcgtacaacccgatatcgcagtatttggccagaaggactaccagcaactggccgtaatccgggccatggttcaggatttgaacgttcccatccgcgtcctcggcgcaccaacagtccgggcacccgacggccttgcgctctcctcacgcaatggctacctcagcccgtccgaacgcagtatcgcccacctcctgtacgaaaacctcaagaggatggtagaaactatcgagagaggcgggcaagatttctccgccttgatccaaagcgccggcgcagcactggagcaggccgggtttaaccttgactacctggatatccgctcagctcgaacgctgcaagcagccactgccacagaccaggagttggtgattctggtcgcagccttccttggcaggacacgcctgattgataaccaggaatgtcgtcgacctctctccgcataa

SEQ ID NO: 352736 - DNA, 324 bp, Pseudomonas aeruginosa
atggagttcataacccgccattacccaggcacagcccccctcgacctctaccatacgctggtgtcctccttgcatactgcccactccatcggtggcaacgtcgcggaaaatactggcggcgtgcatcgactgaaatgcggactgaccgtgcataccctgctcaagatcgacatcttcatcaccgaaagcaagtccatggcccctctgcaggttcttacttggccactgccgccaaccgtccccgagtacggaggcacttgtcctgacagaccgctggacagatgcctcagccgaccaagtctgtccatgcttccccgcgattag

SEQ ID NO: 352737 - DNA, 1827 bp, Pseudomonas aeruginosa
atgctctcgctgttccagcacaaaaggggttcaccgaccaccggcgagccgtctactccagccatcgaacccaccccgggcctgacgcagccgcagtcggcgtcctcactgctggccacaccccgccgacaacgtctgctggaacacatctggcagcggacctcgctctcgcaccagcagttcaccgcactgtacctcgcgccgctgaagcgctacgccgagttggtccagctgttccccgcctccgagagccaccaccatgcctaccccggcggcatgctggaccacggccttgagatcgtggcgtatgcgctcaagctgcggcagtcgtatctgctgcccaccggcaccacacccgaggaccaggtagtgcaggcggaagcctggaccgccgccatggcatacgccgcactgctgcatgacatcggtaaagtcgccgtcgatctacatgtcgaacataccgacggcagcgtttggcacccctggcacggcccgctgacccgcacctaccgattccgctaccgagcggatcgcgagtaccgtctgcacagcgcagcgacgggcctgctgtaccggcaggtactcgatgccgagctgctcgactggctcagcacctttcccccgctctggtccgcactactgtacgtgctggctggccagtacgaacacgccggcgtcctcggcgagctggtgattcaggccgaccgtgcctcggttgcccaagcactcggcggcgatcccgcacgcgctatggcagccccgaagcatgcgctgcagcgcaagctgctcgatggcctgcgctacctgctgaaagaagaactgaaaataaaccagccccaggcctcggacggctggctgacgcaggattctctgtggctcgtcagcaagacggtttcggacaaactgcgcgcgcatctgttggcacagggcatcgacggcatccccgcgaacaacactgccgtgttcaacgtgttgcaagaccatggcatgctccagcccaccactgacggcaaggcgatctggcgggcgacggtcaccagcaaggccggctggtcgcacacattcaccctgctacggctggccccggccctgatctgggaaggagacgatcgaccagaaccgttctccggcaccgtcgtgatagaggtggagcccagcgacgcccccgcagaaccatccaacgatagcggtgacacctcacaggcggcgaacgccgcacctgcgccgtctgctgcgcccgctgccgatagcgtcgacgccctgctggcactgctcggcacccctgataccgaacggcccccacaggggccggaggctgcgccgccagttgcaacctgcatcgatgaaccacctgcaccttctcaggagagcgattcaacgtcaccaccaccccttgttcttccttccgccgcgggcgtcgaaaacctgcgggaaccaccctccggcgaacacttcatggcctggctgcggcagcgcatccaaggccgcaagctcatcatcaatgacgcaaaggccctggtgcatacggtgtctggcacagcctttctggtcagcccgggggtgttccaacgctacgcacaagaacaccctcacactgcagcactcgccaagcaggatcagatggcagattggcagtgggtgcaaaaacgcttcgagaggctgcagctgcaccacaagcacgacaacggccagaacatctggacatgcgacgtgacggggccgcgcaagtcgcggcggctgcatggctacctgctgaaagagccccggcagctgttcgaggaggtgcctaccaacaacccctatctgatcctgttagcaccacagtaa

SEQ ID NO: 352738 - DNA, 387 bp, Pseudomonas aeruginosa
atgctcagccagattgacgaggtaaggaaattgccttaccttgtgggcattgctaccgggagagctacgatgcctgagatccatgaagttgccacgctgacctccaagggccagattacgctgcccaagcccatccggcaggtgctgggtgtggacaccggcgccaaagtggcctttgatctgcgtggaggtgaagtcatcgtgacccgcgccgatgcagaacacgaagacccggcgatcggagccttcttggggctgttggaagcggacatccgggccggccggcatgtccaagcgctgccggaggatcttgcgcgggctatgctggcgaacgcgggccgggtggtgaatctggatgaggacatcgaaggcgacgtggcgctgtga

SEQ ID NO: 352739 - DNA, 378 bp, Pseudomonas aeruginosa
atggacacgaaagcccgcatcagcaacgcagaacgtttcggtcgtcggatcggggggatgtggcggggcttcgtccgtcgtgagcatcaggtcgccggctggctggtagcgcgcggcctgtccgcaggcgcggcgacggtgttgttgtggggcatgaagctggctcttctgggcgtgctgctttacgccatgttctggctggcgctgttattggtaatcatcataattgccgcctgggctgcgcaacgtggtgctcaggatgaagagttcgaatggccgttcacggatctggatgagctcaggaagacgccaggatacgatccggtgctctacaacgacgttgcgcaccccgactaccgggatgagaaagacgactga

SEQ ID NO: 352740 - DNA, 1515 bp, Pseudomonas aeruginosa
atgacgctctacaccaccgattacctggagtactacctgaccctggtgagctgggtcgttcataacggtatctgggccgtgctgatcaccagcggcgccttcgccatcccgttcctggctatcgtcctccaggagtggctcaaggcccgcgccgaaggggccgacgaaggcaacaaaggcgcgctgtcggccgtgcgcatcgagaaccgtatcttcgtcgccatcgtggtcatcctcttcgcgggcatgccgcttatcgacgtcagcttcaataccctgcagttcgatcgcacccgctcggtgcaatgccagatcaacgtgccgctgccctcggccaccggctggtcgcaatccttcagcaccctcaacgaccaatcggccaaggtgccggtgtggtgggccttcatgcacaccgcctcgcgcgcgctcaccggcgcggcggtggcggcgatcccctgcggtaccgacctgcggcagatgcgcatggcggtcgacgatacgcgcatcgccgacccggtgctggctcaggaggtgagcgatttcacccatgactgctacggaccggcacgggccaagctcttcatgaatcgcccggcgctgaacgaagaacagatgcacgacgtgacctggatcggttcgcgcttctttctcgacacggcgggctactacgacacctaccgcgccaagacacctcgcgagggttggccttacgacagcaaccgcgatgcgggcctcgcgcaggtgcccagcggcgcgggttatccgacctgccggcaatggtggtctgatagcaacggcttgcgcgcccgcctgttgcaacaggtagaccccggcctgctgagccgcatcggtggctgggccagcttcctgtcgcaggagcaggtcgacgactcggtgattcgcgccatcgcctcgcccaggcagcagaaactcaaccaaggcacggtctacagcgactacggcggccagatcgagatgagcgttcccaatgtcgccacccgtgcggtcagtgacgtcggcctgaccatcggctccatggccttcttcccggcgatggatgcgatgcggcaggccctgccgatggtgctggccctgctgaagatggcactggtgatctgcatcccgctggtgctgctgatcggcacctacgacctcaagaccgtggtcacgatcagcatcgtgcagttcgcgctgttcttcgtcgacttctggttccagctcgcgcgctggatcgactccacgatcctggatgccctgtacggatggggctggggatcgaatcgcccgcatgcgaacttcgatccgctgatcgggctcaacaacaccttcggggacatgatcgtcaactttgtgatggcgacgatgttcttggcacttccagcattctggatcggcgcccttggttgggtcggcgtgcatgccggaatcatggcgaacaatctgtcggatggcgcaaagggcgcggcaaatgtgggtgggaaaggacctggggcagtatcgggtaaactcaggtaa

SEQ ID NO: 352741 - DNA, 330 bp, Pseudomonas aeruginosa
atgaatgggctgcggctgcgccgcgcgggcctggcgctgctgagcgccctcctcgtcctgctggccgccgttgccgccaatgtcatcggcatccacctggccggcggcatcgacgattggcaggcctggctgaccgcgcacagcacgtatttcctgacctggcgcctattgctctatgccggcacggcttatggctggatctggatgcgtcgcagggtactggcacgcgagccggacgccggcactcggcggcgcctgctgcgggccgagctggccgctgtcgtcgcagtggccgcactggaactcagtccttatctgcaggcgggatga

SEQ ID NO: 352742 - DNA, 936 bp, Pseudomonas aeruginosa
atgacgcgttcttcccgcctgcgcgccggcatcgccaccatcttgctgaccacgggcgcaccgtcgttcgcgctcaccacggcgaccatcgctgcctcgacgctctcgccgaactgcctggaataccgcgtggtcggcatctgtttctggctgcgctgcaccagttccggttgctcagtgaagacctcggtcaaggtgcgccacttcgtgccggatgcggtggtgtccagctacgccaacaccggcgccaatccctggctggaggcgcggccgatgagtccgcccaacgccacggcacaggccggcggcgacggcacgaccaaccaacaccacgaaaacaacctggccaagttcaacaacgccgacgtgatcggccatcccggcggccatgtgttcagccagttcgcctccggtttcggctacagctgcgaaggcgccggcaccgccttcatgccctacctgctgagcgccctcgacaccctcgcatggcgctacaacatccccgagatgctctaccccgaggcgctgacgcccggcaagcgcgagattggcagccgcaccggcggcaacctctggggcaacctctacccacgcggaggttttctgcatcagagcgacgactacctggcaggtgccgtagtggcccagcgcgccggcgatatcgtcacccgccgcggccaactccacgtctaccagccgctgctcgcgaacgccaaggacggctactggccagccggggcgctgctcgaaagcgacgcgcagacgggcaaatggcaggagctgacgccgacgctttcgcgcacctgcgcggtgttcccgcaccgcgacgcccgcatacaggcgcagcagggcgattacgcctgggcgctgtggcgcccctaccgctgctgcaaacgcgaaggccaggtgtttctgggcagcgtcgatttcaactga

SEQ ID NO: 352743 - DNA, 438 bp, Pseudomonas aeruginosa
atgccagccaaatgccccagccggctcccattgcgcccgtacctctgtgccgcagcgctgtgcgccgcgttgctcgcgccactgacgcaggccactgaggtcctggtcgtcaccgacagccagcacccagtgcaagccaccggcggtgcccggctgatcgagctggatcaaccggcccgtatcgaggccgagctgggcgcccatgtgccggccgatccctcgcgcggcgccgccctggtgcaacagcgcttgtacagcggcggtgtcgagctgcagcaacgcctcggcgcggcctatcagggagtggtcgatgcctggagcctcggggtgacaacgattccggcggtgatcgtcgatcaccgttatgtggtttatggcgagccggacgtcgccaaggcggtcgcactgatcgaagtgcaccggaggacgcaaccatga

SEQ ID NO: 352744 - DNA, 501 bp, Pseudomonas aeruginosa
atgctcacatccctagcccgtctcgacgccccagcagaacccggctctacatcggttctcgcgtatgagaaccgcatcatcacgcaagccattgccatactggagcgccgactattcgtcgacggcccgcagatgtcggacccacaggtcaccagcgactatctgcgcctgaaactgatgccggaacccagcgaagtgttcgtcgccgtatttatgaattccaagcatcaggtcatcgcctgtgaaacgctgttcagaggcaccatcgatgccgctcaggtccacccccgcgtcgttgttcagcgagcgctattccataacgctgcggccctaatcgcggctcatcaacatccgtcgggttgctcggaaccctcatccgcggatgagcgcctgacccagcgcctgaaaagtgcactggagtgcgtggacgtgcgcctgctggatcacttcatcatcggcaaaggccagccgtactcgttcgcggagcatgcccagctgtaa

SEQ ID NO: 352745 - DNA, 372 bp, Pseudomonas aeruginosa
atgaccaccatgctgcacgccgccttcattgaacggttccgcgagcccaataccccgtacctgtcgccggagaaggttggcgatgtattgggttatcaggtgtatgagctggccgagcgtgcacacgtgcatcgcagtatcccgagcacccgaccacaggctgtgcaattgcagcagtaccttcatgaaatggtgaccgtcctgagcgtggccaccgcgatgagcggcgaccttgggcgtgcggcctttctggtgcgtaatgagccgctgcgggtctttggctacaagactgccattgacctgattgaggaagggcgggccgatgcgctgatggcctatctggactcccttgccggtggtgccgccggatga

SEQ ID NO: 352746 - DNA, 600 bp, Pseudomonas aeruginosa
gtgagcgcagcccaagccattcgagcacgcatcgcggcgcagcctgtcggtgagccttttaccccagccctgttcgccggggtgggctcgcgcgcggccatcgaccagaccctgatgcgcctgactaaggctggccatatcgagcgtattggccatggcctgtatagcgtgcccaaggtgggacggttcggcatcaaggccatgccggcaccggagcaggtggcgcaagcgctggcagcgagcgagggtgcaatcatcgaggtgcatggcgccgaggccgcgcggcggttcgggctgtcgacgcaggtgccagcgcagccggtgttctataccacgggctcgtcgcgcacggtgcgcttgggcaagatggtcgtgcgcctgcagcacgtggctccgcgcaagctggtgctggcggggcgcgctgccgggcaggcgctgtccgcgctgtggtacctggggcggcatcaggtgacgtccgccacctttcagcgtatcgccgagcggctgccgagcagcgagttcgaggcgctgcgccaggcgaaggcggtgatgccggcctggatggtggcggcgctgagcagttatgaacagggcgagtga

SEQ ID NO: 352747 - DNA, 1332 bp, Pseudomonas aeruginosa
atgtctgacataagtttttcgattgactggttgtcttcgggtgaagagcctccgatttttcgagatacatcgggtcatctggcgatccatttggatgcgttttgtctaactcgcaatgaggatgtctggtcaagaactgtgcgtgacaaagttcttgtttcggcatatcccttggcgttatggcttgcgtcgtcctggtggaggttgaactttgaacctttacctcgcatgggagccaggccaccgttggattggcgtatggctcatgaattgggcgcagccaaccacggttatgtatggccaagagtcatttttgcacccgatggcgagatagtgaatgtttggtctgagcagatacgcatggatgggcaatcagttcagtacctctatgggcttgaaactccttgcgctgtaaaacttgataactttcagcgcgaaatcgctggctttattgaaagtgttttaagtcgactggatgctctagggcatcgtcagactgacttggctgagctctggtcctttgtccgggaggatagggaaaacaccgaggtgatgcggcttcggattttggaggctcaaatggggtacgacccggaggagtgtccgcaggatattatttccaaggctttgagccttcagaaggagactggactgggggccatgtcggagctggctccggtctttgggcgtagagataggggcgatactgggcttgagggagttatttctcttgcctcgcaaagtggagttctggggcggccacaggtgtcagctgaagatatccaattggcttcgctctcgggtgctccatggcagcgcggcgttgatgccgcaaggaaactccgtgcgaagctgggtaacacggacgagcctataaagaatgcagtgatttttgatcttctaggtattactgaggggcaggttgttagttgggagcctccaggtagaagtatcgtagccgtcgccaagcctgtaaaaactggtgagcttaactacctgccccgcaagaaacatccactttcgagacgttttgagtttgctcgtatgattggagaggttttggatcagcctagggggggcgatgaatggttggtttctactgacatcgcaaccgctaagcagaagcgtcaacgcgcttttgctgcagagtttttgtgtccgattaattcgctggcggattacttgaatggtgattattcggagtcatctttggaagatgcggccgaacactttaatgtgagtgacaagatagtcgagtccttgcttgccaataacggttatctggatatttcatctgctgagccgaaagtaccatatcgatcagttgcataa

SEQ ID NO: 352748 - DNA, 372 bp, Pseudomonas aeruginosa
atgaacagacaccccatctctggcagaatcgaccacttctccgaaagccacctcgtccatatgccgctgccctacgacatcctgcgtctgttcacctcgccgcagggctatctcgtcgagatccaacaggccgcgccggcagccgcgcgggaatggctgtgggtcacggattgctccgtcaccagcctgcgtgccctgaatacggaaagcgatacgccgcaggtgcggcatttccgcgaggcgcagctgcagctcgacggcatacgcgcgcaactggtgtggcccaacggcgactgccaggcgctcatggcctgctcgatgccggcgctgcccgccgcgcagcaccagctcatccacaaccatttgagttga

SEQ ID NO: 352749 - DNA, 2859 bp, Pseudomonas aeruginosa
atggcctggccgtggtttatgcgtcggccgccggccgaggagcctgcgccagctgctgacgctttggcgcgccacgtcgccgagttgcgcgcccacggccttgccgagcccggcactgcgcacagggcgcagcgtccggccacccagtccgacgagcaggcgctctacaacgtggcgccctccttcgccgatcagctgccgtgggccgagtacctgcccgagtcgcagtgcatgctgctggatgacggcatctcggtcgccgccttctacgaactgctgccggtcggcaccgagggacgcgaaccggcctggctgctgcaggtgcgcgacaccctggaaaacctgctgcaggatgccttcgacgaactggaggtcaacccctgggtcgtacagttctacgcccaggatgaccccagttgggaccgctacctcgacgcgctgcgcgcctacatccagccgcgcgcccagggcagcgccttcaccgcgttctaccttcgcttcttcagtcatcacctgcaggccatcgccaagccgggtgggctgttcgaggaccacaccgtcacccgcctgccctggcgcgggcagacccggcgcacgcggctggtcgtctaccgccgggtcggcccggcaccgcagcgccgcgggcaatcgcccgagcaggcactgaaccgggtgtgcgagcgccttatcggcggcctggcccacgccggcgtgcgcgcccgccggctgggcgcggcggacatccacgcctggctgttgcgctggttcaacccgcatccgacccagctcggcgacaccgccgcagaccgcgaacgcttctatgccctgacccgctacccggacgaacaagagcccggcgaggtcgaactggccagcggcaccgacttcgcccagcgcctgttcttcagccagccgcgctcggcggtcgagccaggcctgtggtatttcgacgggatgccgcaccgcgccatcgccgtcgaccgcctgcgcagcccgccgagcaccggccatgtcaccggcgaaacgcgcaagggcgaggcgatcaacgcgctgttcgaccaactgccggaagacaccattcagtgcctgacgctggtgatcaccccgcaggacgtgctcgaagcgcacctcaaccacctgggccgcaaggccgtgggcgacaccctcgcctcggagcaggcccgcgccgatgtgctgcaggcccgcagcctgatcggcagcgcccacaagctgtaccgcggcgccctgaccttttacctgcgcggccgcgaccaggcggagctggacgcccgcggcctgcaactgggcaacgtgctgctcggcgccggcctgcagccggtgcgcgaagaggatgaagtggcgccgctcaacacctacctgcgcgggttgccctgcgtctacgacccgacaaaagaccggcagcagtggtacacccagctgatgttcgcccagcatgcggcgaacctggcgccgctgtggggccgcagccaaggcaccggccaccccggcatcaccctgttcaaccgcggcggcgggccgatcaccttcgacccgctcaatcgcctcgaccggcagatgaacgcccacctgtttctcgccggcccgaccggctcgggtaagtcggccacgctgaacaacctgctcaaccaggtcaccgccatctaccgaccgcggctgtttatcgtcgaggcgggcaactccttcggtctgtacggcgacttcgccggacggctggggctcagcgtgcaccgggtcaagctcgcgccgggggccggtgtcagtctggcgcccttcgccgacgcccagcgcctggtggaaacgcccagccaggtgcaaacgctcgatgccgatgccctggacgacgagcatgcggcggccgaaggtgacgagcagcgcgatgtgctcggcgagttggagatcaccgcacggctgatgatcaccggtggcgaggacaaggaagaggcgcgcatgacccgcgcggatcgcagcctgatccgccagtgcatcctcgacgccgcacggcggtgcgtggaggcgcagcgcacggtgctgacccgcgacgtgcgcgacgcgctgcgcgagcgcagccgcgacaccggcctgcccgagctgcgccgggcccggctgctggagatggccgatgccatggacatgttcacccagggcagcgacggcgagatgttcgaccgccccggcacgccctggccggaagccgacatcaccatcgtcgacttggccacctatgcccgcgagggctacaacgcgcagctctccatcgcctacatctcgctgatcaacacggtcaacaacctcgccgaacgcgaccagttcctcggccggcccatcatcaacgtcaccgacgaggggcacatcattaccaagaacccgctgctcgcgccctacatcgtcaagatcaccaagatgtggcgaaaactgggcgcctggttctggctggcgacgcagaacctcgacgacctgcccaaggccgccgagccgatgctcaacatgatggagtggtggctgtgcctgggcatgccgccggacgaggtggagaagatcgccaggttccgcgaactcaccccggcgcagaaggccctgatgctctcggctcgcaaggaggccggcaagttctcggagggggtaattttgtcgcgcagcatggagctgctgtttcgtgcggtgccgcccagcctctatctcgccctcgcgcaaaccgaaccggaagaaaaagccgagcgttaccagctcatgcagcaacacggcatcagcgaactcgacgccgcgctcaaaatcgccgagcacatcgaccaggcgcgtggcatcacctcactgccgcaggactggagccgtccgcggtag

SEQ ID NO: 352750 - DNA, 420 bp, Pseudomonas aeruginosa
atgcacaagacctggactgacggcctggccctgctggccatggcgctgctgctcggtggctgcgccaccagcaaggaagccctgctgccacacgacaaccgcagcatgctcgacatctggaacgtcgagaccggcggcggcagcgcccggcaactgctcgatgcgcgccaggccctgcgccggccgctgagcgaggccaatgtgcaggccgcgccggcggtgcaggcccgctatacgcgcacggcagccaacgagatctaccggcagttccaccgcctgcccaatcccgatctgctgatgtacgtgtttccccacctggccggcagcgacccggtgccggtgcccggctacaccacgctgtttcccctgtaccagcgggtgcagtacgccctgcccggcgaacggctggaggattactga

SEQ ID NO: 352751 - DNA, 1416 bp, Pseudomonas aeruginosa
atgcacagtaatggcctgctcaagtggctgatgatccccctggcgctgctgctggtgttcgtcgccgtcaagctgttttccggcggcaacgacgcgccccgcccagcggacgatgccacccggctcacgcccgatgaagccaaggcgctcggcatcgagggcgacaccccgcgcgacaccgtggcaacgctggtcgcccaggtccgccagctgcgcaccgagttgcagacggcgctcagcgacaacaaggtgcagcgcgacgagaaccagcgcttgcgccagcgcgaaggggccatcgaccagcgcatccagagcgcactcgacagcgagcgcaaccagttgcatcaggaccgccagcagctcagcagcgaacgccagcaaacccagggcctgctgcagcaactgcagcagcggctcgatgccatcggccaggagggccacgccgatcttccggtcggcctgggtcttgagccgagcgacggcctgccgggcgacaccctgcgctggatcgagccggaagaccggcgcgacgaccagccgggcaccaccggcactgccggcagctttagctttcccacccgcttcgggccggcgcagaagacgctggaaaccaccgccagctcggccgtcgacgccggccgccgcgccgctggggtgccggagacgacggcggtgtacaccgtgccgaccaactcgaccctgatgggttcgatcgccatgacggcgctgatcggacgcgtcccaatcgatggcacggtcaacgacccctaccccttcaaagtcctgatcgggcgggacaacctcacggcaaacggcatcgacataccggacgtggccggcgccgtggtcagcggaacggcctctggggactggaccctctcctgcgtgcgtgggcagatccgctcggtcaccttcgtcttcgaggacggcaccatccgcactctacccaacgacgacgcgcgcggcggcaaccgccagaccagcagcactgacacccaggacggactgggctggatcagcgacccgtatggcatcccctgcgtctccggcgagcggcgcagcaacgcccagcagtacctgggctcgcaggccctgatcactgcagccggtgccggcgtcgcctcgctgatcgacgaaggcagcggccaggtctcctacatgagccgcgacggctcggtcggcaccctgggcatccgcgccaacgaggccatgggccgcatcctcgccagcggcgtgcaggacatgtccgcctgggtcaaccagctctacggccaggcgttcgcggcggtctacgtcaggcccggcgcccaggtggccgtgcatctcgaacaacccctgaccctcgactacggccccgccggtcgccgcgtcaatcaccgccttggaggactgctccatgcacaagacctggactga

SEQ ID NO: 352752 - DNA, 867 bp, Pseudomonas aeruginosa
atgaaccgcttcttgcccctgaccctcgcggcgttcgcgctggcatctcatagcgccgcccaggccaccgaacttctgcgttgggaacgcctgcccctggccttgccactggtggtcgatcaggaacgcgtcgtcttcgtcgagcgcaatgtccgcgtcggcgtgccggcctcgctcggcaatcgcctgcgcgtgcaaagcgccgccggtgcgatctacctgctggccaacgagccgattgagccgacccgactgcaactgcaggacgccgacaccggcacggtgatactgctcgacatcgccgccgaaccggcccaggacggccagccgcccctggagccggtgcgcatcattgaggctgcatccaccgcggctgcctccgcgatcgatgatgacagtgccgcaacgtcccccgtgcgggccacaccgcagcccgtgatcctgacccgctttgcggcgcagaacctctacgccccgctgcgcaccgtcgaacccgtgccgggcgttgcgcgcgtcaccctgcgccgcgacctgccgctcgacaccctgctgcccaccctgccggtgcaggcgcacgcgctggcggcctggcgcctggacaacctgtgggtcagcgccgtgcgcctgcacaaccgcagcgcgcattggctcgagctggatccgcgtgcgctgcaagggcacttcctcaccgcgaccttccagcattcgacgctgggaccgagcggcacgccggaggacaccaccgtcgtctacctcgttacccgcgggcatggcctggcgcaggccctgctgccggcccttgcgcccatcgacgccgcccttaacctgcccgtgccgccacacagcggaggccgcgatgcacagtaa

SEQ ID NO: 352753 - DNA, 396 bp, Pseudomonas aeruginosa
atgaccgaagacatccgcacggacgggacggtgctgtttctgccccaccgcctcaaccgtcacccggtggtggtgcgcgggctgacggcgaatgagctttgggtctgcgcaggcgtgtcgggcctgattggacttgcgagtggcatggcgctggccattttgcttacgacgattgccatcgtccccacggccatcctactggcggtcagcgcagggattttcatcggcggtggtgcgctgcgccgactcaagcgcggccgccccgagacctggctgtaccggcaattgcagtggtggatcgcgctcaacctgccaccactcgccaccttcaccgacggccagcggctggtgacccgttccggttactggagcacgcgcaggagcacggcgccatga

SEQ ID NO: 352754 - DNA, 363 bp, Pseudomonas aeruginosa
atgaagccgctcgcccgctcccttctctcccgtccattcgctggcctggcggcgctgccgctgtacggcgtgctgtcaccgtcggcccaggccgccctgcccaccttggagaacccgtcgcgcggggtcggttccggcattctgcaaacgctgcagaactacggctacgacatcgtgatgctgatcgccctgctggtggtcgcctcgatgttcgtcggcgtctgctaccacgcctatacccgctacgcggagatccacattggccgctcgacctggggccagttcggcctgaccgtggcggtgggtgcgatgttgctggtggtgggcatctggctgctgaccgaagccatcggcgtgctctga

SEQ ID NO: 352755 - DNA, 1599 bp, Pseudomonas aeruginosa
atgggcaggttgggtctgctgtggtgcttggggagtatcgtttttaccgctggctgccagacacaccttgatgtaaagcccgatgggaacggggactacatcaataagggaggtaaggcacggataggcgtggagtacggcctgcccatggtccagttcaacctttccgtcacccgcacgctggtgaggtgtcaggatgagaacaatcggaccgatatccgatttgcaacgcaggtagctgctgaaccccactacgtggtgggcgagcgctttgtggttgattacgagtccttgtccaactggagcaagatcactgggcttgacttgcagacctacgacaacggtacgctcaagagcatcaatgcgtcggcggaagatcaatcggctgccatcatcggcgatgtggtgaaggtggggataggcgtggccagcctggtatcgggtgtgccgtttggcgccgaggcgttggcacaggaaccgggtgaatggcgctgttccgaacagaccatacgtaagctggatgcaatcaccatcgccaaggatgccttggaagaaaccactaaagagttggttcaggtaacagataccatcacgcgacttgagagcctagcaatactgaatgcgttgtcggagggcgataagacgatgctggtgcaggctaaggcgaagcaaagcaagctgaccaagcaagtctccaccgtagacaaggcattggcccgcctgctggcgtatgtgtcggtgaaagaggagcgaatttggcccgagaaagtcggtagtacacagctgaacgccgatcctctacctgaaaatgctaagttcttgaaggatctcttcgagaagacgccctcgaataccacaagtcaggtcgaaggagcaggcacgacaacgacgcaagcgtctccaaacaacaaatccggtcagcctgaacagggtggaagtaagaaggatgtgtttctggagaagctgatggcgtcgtttcagcttcgtggcgagttgataccgttgctcaagcctagtgagcagagtccagggtcaacgtcttaccctgatcctaaaaatgacaagagaacaggcctctactatcgaaccccgattcccgctcaattgctgatctgccgggtcgtttcgagccaagggtgcattgtggatgacgattcgccaaaggctttccgtgtgaacgtgatggccccccagttggctccgctacgtgtgttgccgttgaccaatggcatgttccagaacaacgccctcagcgctacgttccgcgagaatggcagcctggcgaccttcaagtatgaggacaaggcggcgcgtgggaaggtactttcggagacggtagcggccagcatggacaacgtgctggcctacagggatgcgcggcaggcctacaagtccagcgagaaggccgcgaagcagcaggcgggactcgacgcattggatgcagacatcgctcggctggagaagcagaagaagatcgcggcgctcaactcggagcttgaaggatccgctcaggataccgctgtcgagaccgctcgcttgaatgctcgaatcgccttgctggaggctcagcggaaattgcgcgagctggaggatgagtag

SEQ ID NO: 352756 - DNA, 528 bp, Pseudomonas aeruginosa
atgaacgccctgcccgtcctcgccgcctacctcgctctgccctggctgccgatgctcgcccaggccaacaccctgatcatcgtcgacgatcgtggcggcatctcggccctgccgtactacgaggccctgaacctgcagccacgcgccggactcagcgcgccacggattgagatgccgcgtccgcccgctggggtggttaacgaagccagcatgctcccggtgcgctccatgcggctgtcgcctggcgttgtggcgcgtcgcgtgatcgaggcgcctgggctgccgccgctttttcttgtcggtgatgaccagcgctcacacgcctggctgcagcaatgggcgccgcgcctgcgtgaactcggcgccgtgggcctggtcgtcaatatcagctcggccgagtctttggatgcgctgcgggcgctggcgccggagctaccgctttcgccggtggccggcgacgacctcgccgagcgcctcggcttgcggcactacccggtgctgatcacggccaccggcctcgaacagtga

SEQ ID NO: 352757 - DNA, 564 bp, Pseudomonas aeruginosa
atgttgtgccgcaccgtgctcgcgctgctggtctgtgcgctggccggcgccgtccgggcaggggaaaatccgccgccggcctatcaggtagctgcgcagcgcgccggcattccctccaccgtcttgtacgccgtggcactgcaggagagcggcacccgcgtgggtggccgcctggtgccctggccgtggacgctcaacgtcgccggcacatcgcagcgctatgccacccgcgccgaggcctgcaccgggctgcgcgaggcacttaggcgcacaccggccacccgcatcgacgcggggctcggccagatcaatctcggctaccacccgcagcgttacgcccagccctgcgacctgctcgacccctaccgcaacctggccatcgccgctgagatcctgcgcgagcagcacgtcgaaggcgaggactggctgctcgccatcggtcgttaccaccgccctgctggcggtgcgccggctgcgcgctaccgccacagcgtcggccaacacttggcccgcgtactgggcgaaccccgactggaaatcagctcccggagaaatctgccatga

SEQ ID NO: 352758 - DNA, 726 bp, Pseudomonas aeruginosa
atgacgccgcggcgtatcgcccccgccctgctcctcctgttggccagcagcctggcccagggcgcgccaaccctcagcagcgaccaccggcccagccgcgagcgaccggtggccatcgaacgtgccgacgagcagcatgcccgcgattggggtctgaaactcgaggaatggacgcgctaccgcgatctgatgctggggccgctgggggtctattcgccgcacatcgacccgctcacggcactgggcatcgaagcgcgtaccgaccaggagcggcagcgctacgcgcagctgcaggtcgcggccgaagcgcagcgcgtggagaagttgctcgcctaccaacgggcttacgacgacgcctggcaacgactccacaccgatatgccgcgcgtcatcctgcccgacaccggcccggcgttctcgccggtggtgccagcgacgagcggacggctcgccctgttcgtcgaggacgcctgcccggcctgcgatcaaacagctctgaagctgcaggccgccggcagggcgttcgatatctacgtcgtcgacagcggtgccgacgacgtgcgcatccgcgcctgggcgcagcgcattggcattgagccggccaaggtgcgcaacggccaggtcacgctcaatcacgacgcgggccgctgggtgtcgctgggactgtcaggcgacctgccggcggtcgtgcgtcaggtcggcggccaatggcagcggcagccgtaa

SEQ ID NO: 352759 - DNA, 654 bp, Pseudomonas aeruginosa
atgacgacgatgcccggcagtgaacctcgccggcacggccccctgatgcgcgtcgccgtagtcacctggctgctgctgatcagcggcgccgtcgcgatcaaccacgtcgcgcagtcgggtctggcggcacaggttgaaacccatgcaccaggcctgcaggtcgcggtgctggaaaatcgcctggccgaactgacccagcaggtcgagcacacccagcagcaaccggacgccctgccccaggcgcgctacgaggctgagcgcctggcgatggagcagcgtctcagtgcgatcgagacgtcactcggcaaccagccggcagcggacaacctgctgccgctgcaagcccgccttgatcaactggaaatgcgcctcagcgcgccccctcctgccctaccgactccgccccgcccacgcgccgccgcacccgccaaacccaaggccatcgagccgccattccgggtgatcggcacggagctgcgcgccgacgagcagttcctctcgatattgcctgctgcatcggacgcgctcacgcaggttcgcctgctacgccccggcgagaccgaggccggctggcacctcgaggccatcgaaaccaataccgccgtgttccggtacggcgccgacagccgtcgtctgccgattccggcgcggtag

SEQ ID NO: 352760 - DNA, 528 bp, Pseudomonas aeruginosa
atgcacgccatccgttcctaccacagttgcctgctgctggccgcactggcggccggctgcgcaacgccacccgcgccctctcccgcagagatcgcggtaccggatccagggccggagtacgtcccggtcgttcgctacggccgctacaccctggtcgaactgaccccgacgaccgaccagcaggatctgctgttgcaggtggtcgacgtgtctatccccggcacgctgcacgccagcgtcggagatgcgctgcggcatgtattgcaacgctccggctaccaactctgcagcggaggcgacaccgatgcgctgggcagcctcccactaccagcggcgcactatcacctcggcccgctgcaactgcgcgatgccctgctgaccctggccgggccagcacgaacgctgcacgttgaccacgccacacgcagcgtctgcttcagccagtctcacgcaacgcctgccgaattggcaccggccatagccgagagcgttccccggcaaggtgcaaccgtggagccgcagccatga

SEQ ID NO: 352761 - DNA, 2496 bp, Pseudomonas aeruginosa
atggcacggaagcgaagaaacaaatctgaaatttccggggtggcgattctgggagtcctgttcctgggagcgattgcctccatccctaaagaagcctggattgctcttgctggagtcggggttatcggcttcggtgtatggttgatcgtaaaggccaacagcgactcgtccagaaccgctccccctgtgatgcatccacagcatcgccctccatcttcgagaaatcggccgagagcggcagaggctgatccgaatcgtggcctagtgttctctctggacgaggtcgagatcgaagatcaggcccatacaggcagtactcgggaactggcacctgctgcggaggagaaagtcaggcggcgagcggattcagaatttttcacggtcaccctcgaggtctcgaagccatcctcatatcgcctgccgagtgcgcctgcaacgctgacggatgaaaaggttcgctggattccggccggtgagttcgttgaagtggctggagaaaacattcccggcggcatgatctatgtggggggcgggcgaactgatcgttgcgctgcacccgagccatctttgatcaaccccaagctcaaggttgcgcgtggtgttgtcgacatcgccgagcggctgactggctactgggccagttacgactcgatttcccccgaggcacgtcgcgcctacttgcaatggctgtccagtgggcggaaagcacctcatgccaatatcggctacgtattcttgttcttctacggtcttgagcggcgagtattcgttgatgcgaagagcgatcccaatgccgctgccgaaatcgccggcatcgtgtcggaagtcgagcgacttcttgtcatctatgaggggaacgggtcattcagcaactacgcctgtcggtttctcgcgtttctgcgcatgggtgagaccccgccgagacgttatttagcaccgcctccggacaaccaggcctacggttatgaaatgcccatagagttgcgtattggcctggggcaactagctaccgacaagcagcgtctgcccgccgcatgggccttggcctgggcgctggcggatcacagtattggcaaacggacgcctgtgagccgttgccaggatgccttcgccacgttgttcaagatcaagtatgagcagcttcatggcgaagggatggttctgccgcagaacaagaccaggttgaagttgcagtacaacaccgcctcggttgccttgccggttcaaacgctcgaggggttgggtgatatccccgacgtaacagcaacttcagcgccccgcaaaaagctgcagcagatagtcgacgaatgcacggcggagctggagccctacagccgatatctcggtcgtaatcccgatacccccgaggccttggaaggcttgctgcagcttcccatcatgctgtggccggcggttgcgcgtgccgagttggatgcgctgaagcagcgcataggcgacggcatggtggtcatgagtttcggcgaattggcggggcgactgaaaagtgccggagccctttcgcgggacaaggtgatcgcgctggcgcgcgcgttggaatcattgcatataggcattgagccggatgtattagccggcagcaaaacacctaaggcggaagataccgtagcgctatttgccacccaaatcgaagacggggatctacgagcatctcccgcttacaatgccgcctcggtcaccttggatctagcctgtgccgttgctgcggcggatggcgatacatctccagaagagatcatgctgctgtcccgtcatgtcgattcctggaaccacttgagtggggcacatcgcaagcgactgaaggcccatctccgtctacagctcaatcagccgccgaccttgcaaagcctgaagaaaaagctggagccgttggccagttcggcgaagagaaccgtggcggcgttccttgcccacttagctcaagtggatggcgaggtgagccctgcggaagtgaaattgcttgagcgtgtctacaaggttctgcaactggattcccagctcttatacagtgacctccatgcggcagctagtagtgcgtcgacgagcactgctccaacggttgcgtcggtgccaccttcctcggtatcaccagcgtcggtgactggcttcgcgttggatcatgatcggattatccaactgcaacgtgaaaccgagcaggtgtcggcgctgctggcccaagttttcgtggatgagcaaatcgtcgagcctgaggagtccgatatcagtggcgcttccgatgacaccagcagcatctgtgggctggatgctgatcactcggccttccttcgcttgcttgtctctcggatggaatggtcacgagaggagttggaagcggtggccagcgatatggatctcatgctcgatggcgcgcttgagcacatcaacgatatggccttcgagcatttcgatatgcctattgccgaaggtgaagatccactcgagatcaatcctgacatcatgggaaaactaccgttatga

SEQ ID NO: 352762 - DNA, 963 bp, Pseudomonas aeruginosa
atgtcaacgcgtaccaagcctgatggcggagccttgcagggcattgtcgaaaggttcatatcccaagccaagagtgaggccaaggcgtctggtaaggacagcgaggctgtgatacgcgaacaactgggccaattgaccgagatggtcaacggctatgatttcgctgatgtgatcgcggcctattgcaagggcttcgaggagggcaacgaacagctcaaggccgatgctatccgctggctgcgaggagagttcaccacaagaaccgacgcgcgcgctgccttgggtgtacgcacaatcatcgacgatgcttccgtctatgatcagcttaagctcctggctcggtttgtccgcttggcgggctttgaggggttgatggtttgcctggatgagctggtcaatctctacaagctagccaatacccaggcgcgtaacgccaactacgaacagatcctgcgcatcctcaacgactccttgcagggttctgccgaaggtcttggattcgtgctcggaggcacccccgaattcctgatggatacccgccgcggcttgtacagctatccggctttgcagtcgcgtctggcggaaaacagtttcgccaagtctgggttggtggatctgtcaggaccagtcatccgcctagcgagcctgacacccgaggacttctatgtgcttcttcagaagctgcgccatgtctacgcctcgggtgacagcgcacgctacctccttcctgacgaggcgttgcctttgttcatggcacattgcaaccaacggttgggggatgcctatttccgtacaccccgcaccacgatcacagcattcatcaacttgctggccgtgctggagcagaacccgggcgcggactggagacatttgttgggggctgtggagctgagcccggatagaggtggtgaagccgacactcaagtagatgccgacgatgagctcgcaaccttccagctctga

SEQ ID NO: 352763 - DNA, 2163 bp, Pseudomonas aeruginosa
atggaaggctggacctctctacgagatgcccaagagcgggccatccccgcgctgctcaatgctgatcaggatgtcatcgtcgccgcggcgacggcggcggggaaaaccgaggccgcgttcctgcccattctgacgaacctgctgaagcagcaggaaccgcctgggtcagtgctttacatcagcccgctcaaggcactgatcaatgaccagtgggagcgattgagcaagctatgcgacgaactcgagattcccgtcgttgcctggcacggtgatatctcgtcaagccgcaagcaccgctttctaaaatcccctgaaggcgtgcttttgatcaccccggagtctcttgaagcgctgttcgtgaaccgggggacgagtctgcccgggattttcgcgaacctgcgctaccttgtgattgatgagctgcatgcctttatcggcagtgagcggggcaagcaactgcagtccttgatgcatcgggtcgagcaggtgatcggacgtcctctcccgcgagtaggtttgtcagcgacactgggcgacatgatgctggctgctaccttcttgcgcccagcttccccgagcaaggtgacggtgatcgaatcgaaaggttcgggacaaattctgaaagttcagatcagaggctttcaggaaccagagaaagacacaccccaacagcccgaagataaggagagcctagaagacaactcagcctccgatcacgtaatttctgagcacctcttccaagtgctgcgtggaagcaacaacttggtgttccctaacagcaggactcaggtcgaatggtttgccgatcagctacggcgtcgctgcgagcaagacggcgtacctaatgagttctggccacatcatggcagcttgtcgaaagatattagggaagataccgaacgggcccttaaagcgggggaccggccggcgactgcgatctgtaccacgacgctggagctgggcatcgacatcggcagcatcaagacggttgtgcagatcgggccgccgccttcggttgccagtctgcgccagcgtcttggccgttctgggcgtcgcccaggagaggcagccattctccgcggatactgcaaggagcgtcgattgacggatgactctccaatatcggatcgcttgcgccaaggattggtacaaagtatcgcgatgatccgactactgatgaggggatggtttgaaccgccaagagcgcaggggctgcatttgtcgaccctggtgcaacaatgcctctcggtgattgcgcagcaaggtggtaccactgcggctgagttgtgggggacgctggtacgcaacggccctttcttggctgtcgagcagggcagctttctgaacctcctgcgtgctttgggtgagcgggatctgatcattcaggaaccgactgggcttctgctgccaggtgagttgggtgagcgcttgatcaaccactacgacttctacagtgcattcacaagtaatgaagagttccgagttgtttgcgatggaagaccccttggggccctgcctgtctcgcgaccactgtgtgctgaacagcgcattatcttcgccgggcgtcgttggcaggtgattaacgttgatacggacggcaaggtgattgtcgtcaagccctccccaggaggagctcccccggcttttgacggactggctgctcgagttcacgacaatgttcggcaagagatgaaagccgtactgcagggagaggaggtttatccctacctcgatccagtggcccagaatctactgggggaggcgcggcaaagctttgctgatcttaagttgagccatcagagctttattgagagcggaggaagaacctgtcttttcacctggcagggcgattgggccaacgatgccttggccgttcttctcgagtacgtcggcttgcccactgagaactcaggactggtcattgaggtgcagggcggacgagcgttgcttgaaagcaagcttcgagaggttgcggctttgaaggagcttaaggcgagcactgtccttcacaacgttcagaatatgatcagggagaaatgggactgggcgctgccttctgagcttcttatggagtcgttcgccacgatgtatctcgatctggagaaagcacagcaaaccgcagctcatctgattggacttgagacaccagcttttctttcctga

SEQ ID NO: 352764 - DNA, 2784 bp, Pseudomonas aeruginosa
atgagcaacttcgccgaactgggcatcaaggtcgattcgagcccggccgccaaggcggccgaggacctcgacaagctggtcgactccgccgaccaggccgaacaggccatcgacaacctgtccgacgccagcaagggcctcgagcaggccaccaagggagtatcgcgcgcggaggaggacgctgcccgcagtgtcgacaaggcggccggtgcgcgtgaacgccaggctgctgccagccggaaggtatacgacagtgccgctggcgagatatccatcatcagccagttggaacgggcgctctccggcaacgtcgccaacatcgatgatctgattcgcgccgagagcttgctcgagcgggcgcgcaaggccggcctgaccacgctgcaggacgaggcgcaatatcaggatcgcctgggtgcggcctatgaccggttgcagaaggcggaaaccaaggaggccgccgagaagcagcgcctggttgcggcgcagaagcgtcagatcgaagcgatgcaacacacggtcaacagcatcgatccggtgaccgctgcgttggccaggcttgagaagcaggaggccgcgttgcgtgggctgcgcgccgccggcgggctggatgacgccggattggccgccggcctggagaagatcgcggcgaagcggcgggacatcgaagggaccggcggcgcgatcaacaagctcgggctgaccagcaaggaagcgcgcgagaacgtgctgcagttgggtaacgccctctccaccggtaactggcgggtcgccgcccacaacatcgccgagatcggtgtgaacgccggcggcgccgcgcgcggtgttatcggcgtcctggccccgattgggctgctggcagcggcgatcggtggcttgagcgtcgcttatcttgctggaaagcgccaagctgatgatttcaacaaggcgatcatcagcactggcaatgcctctggactgacagctcagcaactgaccgacatgctcggccgacttggcaaaagcggaaacttctcagaggcatctgaggctcttctggcgctggttcggtcagggcggcaagtaggaggcgctttcgaggatgtcgcgcgcgcggctacggagatgtctgccgtaaccgggcggagcgctggggacatcgcaactgaactggcgggtgccaagggtaaggttgcggacttggcggctgaatacaaccgccagtaccacttcatgaacgtcgacaccttcgctcaaatcgaagctctggagcggcagggacgttcaatggatgccctgaagctgcttgcagggacgctggcctcggagatgagcgctcgaaaccgagagattgaggcgtcgacccgcggaatcgtaaaagcctgggacgatgcgacgaaagctgtaaaacggtattggcaggaacttaaaagccggaccgctgcagaccctgagacattcaagcttcaggttttgcagggccaactggaggactcacggaagctcccggattccacgctgaaccggaagaacattgagttcctcgaaaaagagattgccttgcttcagaagcggatcagcgtccgtgaggaggggcgacgggctcaggcagaaggtcaagaggaccaagatagcttcatccaggccagcaaggacctgaatgctcagcttgataacgtatcgcctgcgaagaagcgggcagcagccattcgcgagctcaatgcgcagtttcttgagctgctgaaatcatcggaacggcttggtaagaggagccctctgctcgagggggttcagtacgatgggcgttctttctctggcggtgcgtacgaccaactgcgcaaggggattgaggagcgcctgaaggaccagaagggctccgccggttcggtggacctacgcgcggccaacgccgcgaagaacagcttggccgagatcaccgcgacctaccgtaacgcgcaaaaggaattggaggcatcccaacgcgcaggcgtgatcagcgcggaaagctacgcgcagcagcgcatctcgatcatccagcaggagcgggatgaggtcatcctgtctgccgtgcagaagcatgccgcggcagagtatccgcgcgagtgctgcggactgatcatccgttctggccggagccagcgatacgttccctacgaaaacacctctgccgacgccggcgaggagttccgcatcgcgccggaggcgtatgcagaggcagaggatcagggagagatcgtcgccgtggtgcatagccaccccgatgccaccagccgaccgagtgccgcagatgtcgcgatgtgcaacgcctcgggcctgacttggcacatcctgagctggccggagggcgacctgcgtaccatcgagcccgtcgatcaggtgccgctgctcgggcgcgcgttcgtgcatggggtgcaggactgctggcaggtctgcgccgactggtaccagagggagtggggcatcgagttcccgcacttcgagcgtgccgatggctggtgggagcgggcagacggtccaagcctctacgaacagcggttcgagggggccggcttcatccgggtggaccggccgcagcgcggcgacatgatcgtgatggcggtggggcgcaccgcgcacccgaaccacgctgggatctacctggcggacgacccatcactacctggcgaggatgcgcagcacttcggcgccgggccgttcctgttgcaccacctgtatgggaagccctcagaaatcatcgtgttcggcgggccgtggctcgaccggatgcgcttggtgctgcggcacgtcagtcaaatcaatcactaa

SEQ ID NO: 352765 - DNA, 738 bp, Pseudomonas aeruginosa
atgcacctgacctgggccggtgaagtcttccgggatgaagcacgacgcatactcagcctggtggaagacgcgcaaagtcgtgtccgtgcggcggagaaaggctaccgcggccggctgcgcatcggtttgacagacagccttgctcagccctacctgaccaaactgttggcgcgctgccgagaggaagagcccctcaccgaggtaaaaatcgttgaaatgaccgtcagcgagatggtcaaggcattggtgcacgaccagatcgatgcgggcttcactgtccataccgagctcagtgcagggctggtcaaggaagtcgtctggacagatcgccccatcattgccatcccgcgaaaccaccctcttctctccttggagaaaattcctctccaggaggtggctcggcacaccctgattctgtgccatccggagctgtgctcagggggatacgacgtgattcaccgctggttctacgaagcgaccttgccatttccctcgaacgccgaatatgtctccgggcacgaacccatggtgatgttggtcgctgccggctacggtatcggcattggcctggcctcgcaaatcacgctgtacaatcacccagatgtgatcatccgccctgtcacggacgatgtaccgagcacagcgacgttcatcacgctactcgatcagccacggcctgaggccctcagccgcttcatcgaccgcgcccggcaaattggtgaggtgaccatcggctga

SEQ ID NO: 352766 - DNA, 864 bp, Pseudomonas aeruginosa
atgcacgtgatcgccatcatttcgaccaaaggcggggtcggcaaaacgaccgttgccgccaacctgggcggctttatcgccgacgccggtcggcgggtcctgctgatcgacctcgacgtccagccgacgctatcgtcctactacgcgctcacccggcgcgccgccggcggtatctacgaactactggcattcaatgagcagtcgctgccgcagttggtctcccagacctccgtgcacaacctggacgtggtgctgtccaacgaccagcaccaacagttgggcaccctgctgctgcatgcggccgatgggcgcttgcggctacgcaacctgttgccgctgttccagccgcattacgacctggtgctgatcgacacgcagggcgcgcgcagcatcatgctggagatggccctgctcgctgcagacctggccgtctcgccgatcaccccggagattctggcagcgcgggaactgcagcgtggcacgctgcagcttatcgatgccatcgccccctaccgctatctgggcatccagccgccacccctgcatctgctgctcaatcgcgtgcccgccgtctcgtcgaacgccaagttggtgcagcagacgctgcgactgatctttcgtgagcacagcgaggtgcggatactcggcaacgaactgcccgcgatcgaagccttcccgcgggcggcaaccgcgagccaacccgtgcaccgggtcgagtaccgacgcccgagcgggcgccaggcagcggcggcgctggagatcatgcgcgccctggccagtgagctgctgccccagtggcaagagcagtttgccagcgtgaccggacgcgtcggcaggaggccgtcacatgtcgagcacctctga

SEQ ID NO: 352767 - DNA, 186 bp, Pseudomonas aeruginosa
atgtcgagcacctctgagcgctgccgtgatcatccacggttcctggcgctgatcgagttcgccgtgcgtgaaggctggcacgtccgccgcacaccggcaggacagctaaagctggtgaagccaggcctgccgccgatcttcaagcgctcactggtgagcgacgaccaggcaagccagagcacgtag

SEQ ID NO: 352768 - DNA, 1671 bp, Pseudomonas aeruginosa
atggcgactgtcacgcctgaggaaatggccggccaattgctggccgaggggttttcccgctccggccctgccgcacaggtgttgagcgacccgctgaccgacacgccgatggtggtcacgctcgatgacctgcgcccctacgagctggatccacgcctgacgcgcaacccgctctacgacgaaatcaaaacctccatccgtgagcggggcctggatgccccgccaccgattacccgacgcccgggtaccgagcacttcatcattcgcaacggcggcaacacccgcctggcgatcctgcgcgagctgtggtcggagaccaaggccgaacgcttcttccgcattccctgcctgttccggccatggccggagcgcggcgagatcatcgccctgaccgggcacttggcggagaacgagctgcacggcagcctgacgttcatcgagcgggcgctcggcgttgagaaagcccgcgagctctacgagctggaaagcggcaaggcgctgtcgcagtcggagctcgcccgccgcctcagcgccgacggttatcccatccagcagtcgcacatcagccgcatgcaagacaccgtgcactacctgctgcccaccatccccaacgtgctgtacaacggcttgggcaggcatcaagtcgaacgcttggcggtgttgcgcaaagcctgcgagctcacctgggaaaagtatgcgggcggcaaggcgttggccgtcgatttcgagacgttctttcacgacgtcctcgccctttttgatgttcagcccgactgctttgccattggccgcgtccaagacgaactgatcggccagatgtcgcatctgctcgatatcgactacaacgtgctggagctggatgtcgacagcaccgagcaccgccagcgggcggtaaccagcccaccccagctgccggttgaaaccgcaaccgtcgttcaacctggacgtgcagccactccatcgccagatgccactcagagcaatggcactgcagcaggcgcttccggagccgtaccgaacaacgacaccgccccgccgccagccccagcgccgacaccagtgtcaggcgcttcctccggtgaaggtgatcccgacgcgcgcctgcagggccatattgtctcccccgccgacaacaccgagcgcctgcaaaccatccaacacatgctcgccgagcacaccggcgagccgctgccgaccttcgcggacagggtactgcaggccattccggtgcaagtcggcggactgttcccaatcaacgacgtctggtacatcgaaccgggactggatgcgcctgatcgcctgcgcatccacatcgcccaattcgcccaggagatcgccgagcaagccgagttgatcgactgcatcgaagcgaccgagacccgcataggcttcacctgcagtgcccccctggtggacgtgtcaccaccggccttcggccaggtggtgttggcgttgttacgcgccttgagtctccctcacagcgcggcgtccgatcagggcgatctgcgcctggacgacaacctgggggcactgttgctgggaggcggcgtcaacgacacggacgcccttccccgtctcagcgataacggtttggtcaagttgttccgtctgatccggctggcacgccggctgttggatctggaggccaatccagatgaggccaacccctga

SEQ ID NO: 352769 - DNA, 1152 bp, Pseudomonas aeruginosa
atggtcgcgcaggcaggtcccgccgcgctttcaacgctgttcgacgacgccctgcggcagctgcctgccgaccgggagcacacacctgcaagcgatggatttctctacagcggcaatcgtcatgaaagcgtgccccgggcgctgtttctcgacacgcggctgacgccgctggagcgcaatgcctggcaaatcatccggcttatgctcaacgccgatggcgtcacggcgttccccacctacgatcagttgcgtccctacctggcctcgacgccctgcgcgcagcaggcgtcgtacgagaccgtggcgcgggcgctgaccctgctgcgcctgacacgctggctgagcctcgtgcgccgccggcgcgatcccaggaccgggcgcatcaagggcaatctgtacgtcttgcacgacgagcccctcacccctttcgaggccatgcaactcgaccccgagtacctggggctggtgagccatgcgctggagcatgccagcaaggcggtgcagcgggtgggctaccgcaccctccaggacatcagcgaagacccgttgctcagcggccgcgtgttgccgacgcggctgcaggtgctggtgcaacgcatggcccagggcggcgtcagccctggggaaagttatccacaggcgcggcccagccacgaatccgaagagggtgaaaacgcccttcttcggaatggcgagccgccgtcttcggatgccgaagcaggcacgaaacccagcaaaaccgcccctcttcggaatccgaagcgggaccgtactagtactcgtatagataaatccgtacgtacggtaccgcgtgcgcgagaacacccacacctgcgcctgcctgagcacttcctggcactgcgcgatgaacagcaggccggcgcgttggtggccctgcagcaagtgcaggctgaacagcgacaagccgtgctcgatgaatgggccgcgcgctgtcgcagcaacgaggtgcgcaaaccggccggctacctgttcggcatcatccaggcggccattcgcggtgagttcaacgcctgggcgggacaggacaagagcaaggccgccgccgatcctccgcccgctgcccgaacggcaaaccccgaggtggtgcacacgcacctcgcccaactgcatgccctgctacaaccaaagtga

SEQ ID NO: 352770 - DNA, 792 bp, Pseudomonas aeruginosa
atggccaccgacacctccttgcaactgaatctcggatcgctgcgcagtgccatgtcgctgacgctgcacacccatcacgcctcgcgcatctggcacggccgcgcggccagcgagggcaaacccggcatcgtcggcttgaacggtttcatcgccatcgccaacaagatcaagcgcggcgccgagcaggacgacccctactcggactggtggatgctgaggctcgaggaaaagctgacgcagaccaaggacagcctgcaggccttgcgtgagcaggtcgaccaggccctggccgacgtgccgccggcgctgtcgctgggcgagaacatgaacgtgcagccggtgaagctgccgctgttcgtcaacgcgcaactcggtttcctcgccgtgtacctgctggccgactacgacgacctggcgcgcaagctgatcctcgcccaccacaccgcgctgatcgaccgcagcacgctcgagcgctggctcaacgaaggggcgcacgccctgcgcagcctgttctcgctggcgcagcagtaccgctactcgggctgcacccgggatgacttcgcggccaagaatgccgccgccagggcggccctggagaagctcggggaactgccgcaggaggtgctcgagggcacgctgcgctcgcgctacgcaccgccgatcatccggcgatcggcgctggccgccgcggcaccgcaggctgccgcggatgccagtgacgacgatgccctgcctgagagcgcggatatcatcctggccgccgccagcgataacgaggaggcctccgcatga

SEQ ID NO: 352771 - DNA, 552 bp, Pseudomonas aeruginosa
atgacctcgacactgagtactgcggcagtccgccgcttttaccccctggaacaggccgacttcctcaagctggaacaggccgcctctctaaaaggccttttacagccttttaaaggtaagggggcacttacccagtgggccagccagtgccacaggcttcgcgacgagttgatcgagctggcgcagcgacgcgtcctggcgcaggcgaatgcctaccccttccgcctgctgccggtagagctggcccagcagaccacgggcgccggcacgacctttctgcgctggcgcaaaccggatcgctcggccatgggcgtggcgctgtggcaggcgctgatcgccagcgccgccacgcccgacaccctgctcgatgacctctacgccatggagcagcagcgcatcgtgttgaacatgcagatcagcctgctgcacacgctgggccgccaagctcacgagtgcgccagcaagctagcccaggccgaatcgctttacctgcagcgcgtccccggaggcgctgcgtccatccgcaccacctgttccaaggagtcactatga

SEQ ID NO: 352772 - DNA, 2019 bp, Pseudomonas aeruginosa
atgcgcctgttcctctgcgagaagccatcccagggcaaggacatcgcccgtgtactgggggctggccagcgcggtagcggctgctacagcggcgcgggaactatcgtgacctggtgcattggccatctgatcgaagcggcgccaccggaagcctacgacgagcactacaagcgttggtcgcttgagcagctgccgatcattcccgagcgctggcgggtcgagccgaaagcggcaaccgctgcgcaattgaaaatcgtcaaacagctggtcggccaggccagcgagctggtgatcgccaccgacgccgaccgcgaaggcgagatgatcgcccgcgagatcatcgagttgtgcggctatcgcgggccgattcaacggctgtggctgtcggcgctcaacgacgcgagcattcgcaaggcgctgggtgcgctgaagccgtcgaacgagacgttgccgctgtacgctgcggcgctcgcgcgctcccgcgccgactggctggtcggcatgaacctgagtcgcctgttcaccctgctggggcgtcaggccggctacgacggcgtgctctcggtcggccgggtgcagacgccgacgctggccctggtggtcacgcgcgaccgcgagatcgcgggcttcgtctcggtgccgttctggaacatcgaggtcaggctatcgacaggcgggcaacgcttccttgccagttgggtcgcccctgacgactgcagcgatgatgccgggcgctgcctgcagcaggcagtggccctgcatgcggccgatcgcctgggcgcggctggcagcgctcaggcggtctccgtcgcaacggagcgcgtgcgtgaggcgccccccctgcccttcgacctgggcacgctgcaggaggtgtgctcgcggcaactcgccctggacgtgcaggagacgctggacattgcccagtcgctgtacgagacgcacaaggcgacgacctatccgcgttcggattcgggttacctgcccgagagcatgttcgccgaggtgccggccgtactcgcagccatgctcgccactgaccccagcctgcgcccgctgctgaagcagctagaccgaacgcagcgctcacgggcctggaacgacagcaaggtgtcggcccaccacggcatcatcccgacgctggagccgaccaacctggcggccatgagcgacaaggagctggcggtctacaggctgatccgcgcgcactacctcgcgcagtttctgccgcatcacgagttcgaccgcacgacggcgcagttgctgtgcggcgggcagaccctgcaggccgttggcaagcaggtgatcatccccggctggcaccaggtgctgaccgtcccagaagcggacaacgccgacggcgaagcggccccgcgcagccaggtgttgccggcgctgcacgaagggctgcactgccaggtcgaccatgtcgatctgaaagccctcaagacccaaccgccaaaaccctatacccaaggcgatctgatcaaggccatgaaaggcgtcgccaagctggtcaccgacccgcgcttgaagcagaagctgaaagagaccaccggcattggcaccgaagccacccgtgccagcatcatcaaaggcctgctcgaccgtgcttacctgctcaagaagggtcgcgccgtgcgggcctccgatgcggcgggcacgctgatcgatgccgtgcccgcggccatcagcgatcccggtacgaccgccgtctgggagcaggcgctggacatgatcgaagccggtgagatgacgctggagaccttcgtcgccaagcaatccacctggatcacccagctggtgcagcagtaccgcgaggccaccctggccatcaaactccccgagggccccgcctgtccgctatgcggcaacgccacccgccaacgcaccggcaagactggcccgttctggtcctgctgtcgctatcccgattgcaaaggcaccctgccctttcagaatggccggcaggccagcaccaagcgcagcacttcacgcaagccgcggcagatgccgaaatag

SEQ ID NO: 352773 - DNA, 249 bp, Pseudomonas aeruginosa
atgtcccataaccctcccgcgtcgcccagtcccatccaggcccaagccaaatccatcggctacctggccctgacctacgtgagtcaacgcctgcccttgcaggtacgccaaagcgccgccggctacttcatcggcactgccgacgacaacgggccggtctcgcgcgagtccgtcgagtacttccgctcatacgaagctgcagagcaggccctgagcacagggcgttggcagcagcgtctccatccctga

SEQ ID NO: 352774 - DNA, 393 bp, Pseudomonas aeruginosa
atgaatcagtccctacccccagacgtccttgatcagatcgcgcgggaaatgctgcatttcgacaaggcccctgcggcttttttgcaggcatggaaacgcggtgtccaaatcgccggtgccgagtggttcggcgatggcactcgcgccgggctgcagcaggccacgagcaagtgggcgctgcggccgaatgtgcagcgactcaatgaggccctgaacgtgttgagcagcggccaacagctgttccttgccgcgatggtcagcttttacaacgccagtgaaggcggcgcgatgctcaaacgctgccagttcgaggggcttgccgatcttggcggtctcgacttggaacgccgcaaggtcatcgccgagctggtactccattacgacggctggtga

SEQ ID NO: 352775 - DNA, 1119 bp, Pseudomonas aeruginosa
atgcgagaagccaagatcccctttggtgagcgcgacggcgttctgttgcgggccttcgaggttgcgaacgggctcgcgtgtgactgcgtttgtccggggtgccggaagccgttgaacgccgccaaccggggccaaaaggtcatcccccatttccggcatgcccaggccgaggactgtgttcgcgggtacaaggacggggtgcgtcgcgcggcggtcgccctgattgtcgctcagcagcgcctgacgctcccagccttctcccgccaaatcagcgccacgaccatctctgggcacaccctgctgcgcgacgtcaccttccaaccggcggccatcaccgccgacgcggtggagcggttcgtggatctcggtgaggtaatggcgcacgcggttattaccgcaggtgggcgccagctaatcgtgcgaatcaaggtatctccccgggctgagcatgagcggtaccagcgcctcgctcacatcgccgcttcctcgatagaaatagacctcagtggtctcagccttgagcagatcaacgacccggcaacattcgagcgagcggttctgtccgacccaagcaccaagtcctggattcgttctctgcgcggggaaatgttggcacagcgcgctgccaaggatctggcgactgatgtcgtcgcctgcaacggccagtgggagcaagaacggggtcgcctgcaggcgatcgaggacgcgcgccgagtagaacaggaggccaaggtcaccacacatgctaacgcgctcgcggcgcacagggaggttcagttggcggctgccgcggcccagcgtgacgctgacatacccgccaaggatggccggagcgctcgccagcggcgcgaggatctcattgtggaccagacgctccgcgcggcccaagagtggggcgggcaggccgtcgaatgctcggcgtgctgcctcctgagccagccgggcgcgcagttctgcctgtactgtgccagcgagagcagcacaatgtcccgcatcctggtgccggccgatgtcgcagccaccatccacctacgtatgcgctgctcagccaagccggagcgatcgcttcgactagcaccaaccctgctggttcagcccgccccattcacgagggactga

SEQ ID NO: 352776 - DNA, 363 bp, Pseudomonas aeruginosa
atgtccaagctcgcagaattcaaagcccttgaagcccagctcgccgcccaactcaagcaactcgacgctctgaagaacgatggcgaattgaagcgcgaaatcgaattcgagcaaaagcttcgcgctttgatggaggattacggtgtaaacctgcgtggcatcattgctgttctggatccgcaagtaaatcgtacttctacccccgctccggctgtgcgtggccagcgccgcgagcgacaggtcaaggtctataagaacccagataccggtgaggttgttgagaccaaaggcggcaaccacaaagtgctgaaagcctggaaagagcagtatggagctcagacggtagacgggtggctgcaataa

SEQ ID NO: 352777 - DNA, 1686 bp, Pseudomonas aeruginosa
atggaacacgcacaggaagaagagcaaatcaacgcccaagtaatcgcagtattccccgacaaagtacgcattgtcgtggatgacctagaggattttaagatagcggaagagtcgctgaaggtcggttcatacgtgaagatcgcggacaatgagaacgcgatcctcatagcaattatcgaaaacttccagattgccgtcagcgcggacgggaggcgggatcacatcatcgaagccttcccactcggcatactgagggacggcaaattcgagcgcggtggcgattcgcttgcgatcccgccgaaggaagttcagcccgcgaccatcgccgacatcaagaaaatttacgacgactcggcccctgaagtggcgagattcctcttttcgacgctggcttccagcaagaacatccccgtgcccgtcgacgggaacaagttcttcaacaagcacattgccgtggtcggctccaccggctccggcaaatcacacaccctggctactatcatccagaaggcagtagcgggaaaagatggcgacttctctctcaacaactcgcacgtgatcgttttcgacatccactcggagtacaaatcggcgttcccttccgcaaaccacatcaatatctcgaacttggtcctaccatactggatgctgaatagtgaagagctggaagaatttttcctcgataccgaagccaacgatcacaaccagaggaatatcttcaaggaagcgatcatcacagaccgccgcgcaaaattcagtggctccgaagccgaaaagcaaaagattcacctcgacacgcctatcttattcgacatcaaagaggtacttgcgtacgcaatcgcaaagaacgaagagatggtcgataccggagaagtctacgcggctagcaacaaggaaaaggccggacagcccaaatacacgcagggtagtctttacgggaagctgactaacttcgtgaaccgactcgagaacaaggtgaacgacagtaggctcgacttcttcttaggtgacaaatctaaaaacatcacgttcgaagaaacgctccaaaagctgctcggatatacctcgcaaaccaagtcaaatgtgaccgtcattgatctaagtggggttccattcgaggtgttgagcataacagtctcgctcatctcgcgcctcgttttcgagtacgggtacatctacaaacgcatacgctgcgccaaggatcctaacgagaaggtcaacaacgacgtgccaattctgcttgtctatgaggaagcgcacaagtatgttccgaatagcgaactttccaaatatcgctcatctaaagtctccattgaacggattgccaaggaaggacgcaagtatggcgtcaccttgttgctcgcgagccagcgcccatccgagatatccgaaacgatcttctcccaatgtagcaacttcattgcaatgcgcctcactaatccagcggaccaagggtacgtgaagaagctacttccggactcgctcggctcgttgatcgacaagatgacgtcgttccggcaaggcgaagctttactggtgggtgagtccatcattcttccgtcaatcgtcaagatcgaaccgtgcgctgacgccccatcctccaacgacatcccgtactggcagctttggaaagaggaatggaaggacatggacttcgaggcaatcaaggcggagtggtacaagtaa

SEQ ID NO: 352778 - DNA, 1212 bp, Pseudomonas aeruginosa
atgaccgacagaagcgccgttgacactatacgagggtatttttaccagttcgacctgtccatactcagtgtcttgcggctggcttcgctggatgattctgtcgagatcgaatgtatcgaggacatcgatatccggactgcgaccgacgtcacagccacgcaatgcaagtattatgcgaagaccgaatacaatcactccgtcatcaaagacgcagtaaagcacatggtgtcccacttcaaggaaagcttagcgggaacgaaaccgaaggtcttgtactccatcaaaggtcactacgcctccggacaggaaaagctggatgacggaatagacgtcgaattcctgaagaagcacttccttacctacacgaaggagaaagttacctattgccatcatatagagctaggtctctccgatgccgaacttgaggagttcctcaagcgcttaagtatcgacgttagggcgaaggaatttgacgaacagtttcgtgaggtggttgaaaccctccaagctatctttggaggatcgtcgttctccgccgaatattttttctataacaatgcgctagcggttatccgcgagatgtcggtcaatgccgcaccggcggaccggtcaattacgaagagggagtttctggcaagggtcaacacctcctccgtccttttcaacgagtggttcgtcgagaagaagggcaagaaagcccacttggcggcgcttcgcaaggagtacttcactgagcttaatgtgtccccgttcgagcgcttcttcttggtagaggtggaaacggactcgtacattcgaggcgacctcaaggatttattcctcgagctttccaagaagtgggcaaagctgtccgcgagagagccttccccattctgcccgtacatctatgtccacggcgtaccagacagtgagcttctcgcactgaagagggagctcagcgcggaaggatttaagctcatagacggtcacgacttccagggggcggacttcagctgccactcgatcatgcagagagccacgcatggtaacgggataaagatcaagatcctaaatacgctttccaacgtcgagcaaaccataagctccgttaccaagacacgacgcatctaccagttccacctgggcaactgctactttgaatacgataatccggcggttcgacacgtcaagattcaggtagaacggctttcggacgttaaatccatcatctaa

SEQ ID NO: 352779 - DNA, 1746 bp, Pseudomonas aeruginosa
atggaaaagctgtattttcaagtcgactcgcgcttggcgaccctactgagccaggagtactcctcaaccgagaaggcgcttaaagagttggtcgacaacgcctgggacgccgacgccgagcaggtgtctatcaccctacccgaacccatgagcgatgaaccgatcattatcatggatgacggaaccggcatgacagctcaagagctcagcagtcagtacctgaaaatcgcatcggatcgccgggtaagacgaggagaacgaactgccggcaaacatcgtctcatcaaggggcgcaagggcgttggcaaattcgcaggtctgatggcggcatcagtgatgactctggcgacccgagcacgcggcagcgaagtcagcttcaccctcagcctgactgaattggagcaggtggcggatatcgaacatctgcgtctcagcccaaaggtcgatgcgtgcctccctgaacagcacggcaccacgataaccctgtccaacttgcatcaggggctcgtgtatccagacgccaatcggcttcgccaacttctgattcaggagtacggacgccaaaaggatttcaccattgttatcgatggtaagcccttggctattgatgatctggaaggcacttacaccgaggacgccatttgcctgccagacacaggcgacgtagcgctacgtttctcgatcagcagtggcaagaccggcctgcgcgaaccgggcataaccttgatggtggatggcaaagctgtcggaaaacccagcttctttgggctcgatcaatgcgatgatttcccacccaaacttcttagaaaaatgtacggcgagatcgaagccgatggtttgagtgagcatgtcacggcgggttgggactcagtggtagagaacagtgagcggtttcaaagagtcgcggagtatgttcaggacaagctgcgtgcagccttcactgaaacccatggggcagaaatccgcatggcccatgctcgcttacagaaagcagttcatgaacgcctggctgcaatgcctgggttcaagcgggattatgcggatcgggccatcaagaaggtattggaaaagtactacgacgagccatccagcaaggtcgagtcgatcgtgttcgtcgtgctggaagcgctagaacgctccgactaccggaccgttgtggagcatctggccgacgcccaacggcgtgacgtggctatcctggccgactctctaaatgacttcggcttagcggacatggctttcctagtcgaacaagcctcagcccgttccacttttcttgatcatttagagcgattggccaacaccgccgataccctcgaagcaaccatgcataaggccatcgaacacaatctctggattttcggttcagagtattccttgttcagctcgaaccagaccttgcagcgccaagttgaggactaccttgatcggacatatcggggcgaattcgcgaacaagcgccccgaccttctgctcaacgagaatctcaatggagagtacctattgatcgagttcaaacgcccattgcatgcgctgaatttcgctgactaccagcaggctactggttaccgacacgactttctcaagcacgtcagtaaaccgatcaaggtgctggtcataggcggcaaacgttctggggattatcccgtgcagaatttggagcccaatgtatccaccatgctgttcgccgatattatttccacggcacgacggcagattcaatggcagttacgtaccaaattttag

SEQ ID NO: 352780 - DNA, 885 bp, Pseudomonas aeruginosa
atgaccagcactacttccaacccgaagtcgtacttcgacatccatacctcgggcatcggctacatccaacgcgtgcgtgaagtgccggtgaagggtggccgcaaagccactccctttctcgcatgcaccgtggcagcgcttgtcgggccggcacaaaacccgacccggcgctacttcgacgtgcgggtttccggtgccgaagccaagcaactcgttatgcccttcatcggcatcgatgatccccagcaacggccgctggtgcgctttcgtctcggcgacctgtggatcgatccatttcgtcgtccctcgggggatccggcggccagcatgaaggctcggctactcaaggccgagttgctggaacgcagtgccctggacgaaatcgagtatcacgagctgctgacccgcggtatcggctacttgaacaaccccaggatgatcccgaacggcggtgatccattcctgtcgtgttccatcgcagccctggccggcccggtcgacgagcccgagtaccgctatatcgagaccaccgtcgccgacgacagcgcccagcacctggtgcagcgctgcattcaggccgtcgaagcgaagaagaaggtgctgctggccttcacgctcaacgacatgaaggccgaggcctacgtccgcagcaaaggcgagcacgccggtgaagtgggcggcagcctgaagtcgaagctgatgcgcatcggcctaatcaaagtcgatggggtacaggtctatccgctggaatccacagcgtccgcatccgaagacgcccccacgtccgaagagacggttaacgccgaggacgaaagcggtggtccacagcccaccgccgccactccggcccctgtcgaggagcccgcgcaggctgcttcgttctaa

SEQ ID NO: 352781 - DNA, 672 bp, Pseudomonas aeruginosa
atggccgcttcagccgcccagcagctacctgcatcctccatcgtcgtgcctggccagctcacgctgcgcaccatccacggtcgcaacgggccgttcaacgtcggccgcctggtcacgcccattggcaagtttgccgtcaaggatgcggagctggagcagtaccccgaaggcaagtacgacggggagttcatcattcgctacatcgactccaaggcctatcccacctgtgatggcatgcgcttcgagatccgcgccagtctggacggcatgacgctctcgggcatcgacaaactgagcaaggccgaggcccatgccttcgccacccaggaagtcgatccgctcgacgaggaactggccgcgcagccgctgacaccggcggcaacgccagcaccagcgtccgttcccgtgcgggcatcgacggacccactgatcgataccaggcccttcggcgtggatgtacccgccgctgcggccgctgcctccaacagtcccgacagcgacgatgctgccttgttcggcctgctgtggccgctgggcgagtcggtgaaactggactcgaccatcgaccgccgcacactgcgtgtacaaatcgcgcgcctgggtgtactgggctacgcgctcgacttcaagtcacagcaatggaaccggcagcctgaccatcaggccgcgtga

SEQ ID NO: 352782 - DNA, 657 bp, Pseudomonas aeruginosa
atgcctttactttcatcgcctgccacgctgcatcgcatcgacgagtgcgccgacctgatggccgacgcctgcatccgtgacgaacagggcaacctgatcttcatctcggtctgggcgcgggataccgcgatccagcagttcctggcccggctgaccctgagccgcgacgaggatgggctggaacagttccatctcatcaccgaacaagggggcagcgtccacgtcttcatcggtacggccgagcgattggaaaagcgcctgacccgcacctatcgccgcacgctgttcggctcgatgatcaacctctggctgttcgaccggcactgcatacggcccgacaagagcacggccagcgcactggcgctgctgccgcgcgcggtaagcgatccgacgtcacgcctgtggcaactggtcagggacacctgtccgctgccgttgctggagcactggcaagcccctgtgctgacgctgctgcgcgatcacaacatgcttcaggacctgccggtggctctcgggccactgcgcggattacacctgcagttggacgttccagcgctgaccgaagcgctgggcgaactgatccgtcgcggcgtactcaccgcctacccgccacagcagccggcaatcactgagctatcgctgcaggccgtcgcctga

SEQ ID NO: 352783 - DNA, 291 bp, Pseudomonas aeruginosa
atggcacatccaccaccgcccctgctgttcgcaataggcacgttgatcttcagtcccggcattgaccgcctcatgcgggaaggccgtctcgatcccctgccgtacttccagcgccacacccgtggcgattggggcgacgtcagcgatgcgcagtggcaagcgaacaacgccgccctgcaatcggctgatcggctcgaatcgacctacgtggttcaccgtgaactgagcctctgcatcgtcaccgaggcagaccgcagcgcaacccatatcgcgctggcgtccgagcactga

SEQ ID NO: 352784 - DNA, 1200 bp, Pseudomonas aeruginosa
atgcagcgggcatggaagcgcgtgaagtccaacaagggatcggcaggtgtggacgggctggatattgcccagaccgccgaacacctgcgatgggtgtggccggagcttcgccagcaactgctgagcggctcctaccaaccacaacccgttcgtcgggtaggcatcccgaaaccggacggcagtgagcgggaactgggtatccccaccgtcaccgaccgtctgattcaacaggcactgctgcaagtgctgcaacctctgattgatcccaccttcagcgagcacagccacggcttccgcccgggccgccgggcccacgatgcggtgttggctgcgcaacgctatgcccaacagggccgccacatcgtggtggatgtcgacctatcgaagttcttcgaccgggttaaccacgacatcctgatcgaccgcctgaagaagcgcataaacgaccccggagtcatccgactggtgcgtgcgtatctcaacgcgggcatcatggatggcggtgtggtcatggatcggcatgagggcacgccgcaaggcgggccgttgtcgccgttgctggccaacgttctgctggacgaggtggataaagagctggaacgtcgggggcactgcttcgcccgttacgctgatgactgcaacgtctacgttcgcagtcacaaggcgggagaacgggtgatgcgcctgctacgccggtgttacaacaaactgcacttggtgatcaacgaatccaaaagtgcagtcgccagcgtgttcggtcgccagttcctcggctacgccctgtggcaagggaggggtggagacgttcgacgggcggtatccgccaaggcgttacaggcgttcaagctccggatcaggcaactgacccgggggtcaggtggtcgcagcatggcccaggtggtggcgaagctccgtagttatctgctcggttggaaagggtacttcaggctggcacaaacgccacgcatctggcgatcactggatgagtggatacgtcgccgcctgagaatgctccacctccggcactggcgacggggcaagacgatctaccgggagctgacccgcttaggcgcgagttcctgggttgcggaatccgtggcggcgctgagccgtcgctggtggcataacagtcgctctgccatccataatgtgctgaccattgcctacttcgatcggttgggagtgccgagactctcgtga

SEQ ID NO: 352785 - DNA, 4377 bp, Pseudomonas aeruginosa
atgcgtcaaagggacctgaaattcaccttcgtcgtcggcgaagggaaactcgcgttcgatgtcgtcgagttcgaactggaagaagcgctctgcgagcctttccgcctgaacctgaagctggccagcgacaagaacgccatcgatttcaagcaggtactcgaccagccgggcaccttcaccctctggcaggacggccgtccggcccgctacgtccatggcatcatcagccacttcacccagggcagctcgggttttcgccggacccgctacgaactgctgctggaaccgcagttggcgcgcctggagctgtgctgcaactggcggatcttccaggagaagagtgttccggagattctccaggcgctgctcaaggagcaccgggtgctcgactacgaacagcgtatctaccacgagcacctgccacgcgaatactgcgtgcaggccggcgacagcgatcactacctgcacgaccggctggccttcgaggaaggcctggtctactacttccgcttcgacgaacaccgccacaccctggtctgcagcgaccggctctacgtccaggagcgtatcgccggcggcccggtactgttcagcgcccagccggagggcgacaacccgcagccggtgcttcattctttccgctacagcgaaaatgttcgtacggctcgacagacccagcgggactacagcttcaagcgcccgacctacgaccaggagcatcatctcgctggcgaggcgctcgagcatcagggctcgtcctacgagcgctacgactaccccggtcgctacaagcggagcggcgccggccggcctttcaccgaaagccgcctcagagggcaccggcgcgatgcgcgggtggcatcggtcagcggcgacgacccgcggctgatcccgggccacgcctttgccctggaaggtcatccgcgtgccgacttcaacgcctggtggcggccggtgcgggtggtccatcgcggcacccagtatgccggccaggaggaagagtccgccgacgcccctctgggggtgagctacgacctgcgcgccgaactggtacccgaggacgtcgaatggcgtcccgcaccgctgcctcggccacgtatcgatggtccgcagatcgcgacggtagtcggcccggcaggggaagagatccattgcgacgagtggggacgggtgaaagtccagttcccctgggatcgcgagggacgtcacgatgagttcagtacctgctggatacgggtcgcgcagaactgggcgggtgccgactggggacacatggcgatcccgcggattggccaggaggtgatcgtcgattacctggacggcgactgcgaccagccgatcgtcaccgggcgcacctaccgggcgaccaaccgaccgccctacgcgctgcccgaccacaagatcctcagcaccatcaagagcaaggagtacaagggcagtcgggccaacgagctgcgcatcgacgacaccacggcgcagatcagtgcggcgctgatgagcgaccacggtgccagcgcgctgcacctgggctacctgacccatcctcggcccgaaggcggcaagccgcgcggcgagggcttcgaactgcgcaccgacgaacatggcgcggtgcgtgcggccaaggggctgctgctgagcaccgaggagcagctcagggccggcgccggccatctcgaccgaggcgtcgtggtgcaggtgctggaggccgcgctggagctggcccgcgagctgggcgactacgccggggagcaccagggcgtggggcacgacgcggcgccgcagcaaaccctccaggaagccgtgcgcgacctcggccacggcgccaacgacgagtccggcaagcagcagcgctcgttgcaacctatcgccgatggctgggaacgttatagggccttgcaagaacagttgcaggataaacaagcgctcgaaggcatcctcccggtctggttcgccgagcaggggtatcgcctgtggttggctgaaaccaacaggcttgagaaggagcacaaacaggctgaactggatcaggcgcaatgcaggagtcagcttgagatccagaagggcgtggtcgatcaacatcgtcagcgctacctgcgagtagggggcgcagggatagaccaattacgcgggcgcatcgctgattgggtcagggagtgcgataggcggcgcctgaaagccgagcaataccaacgcttggccaaggggcttggactcgcggatgagttatcggccgctgcgctcgaagaaaatcagcagcagatcgcggcacgcctggaaatactggcccagcaaactacaggcgcgcgccagaaagcgttcgacgcaggtctcgtccagcaagagctcaatggctgcctgcagagcttacagcaggagcgtgctgaggttgagaggcggccaggctcgaacctgcccgggaattttcatgcttttcgaagcgatctggcacaggcgcttggtgtcgatgagtcggccctgcctttcgttgccgagctggtgcaggtcaagcccgaggagctggcctggcggggtgccatcgaacgggcaatcggtagccaccggctgcgtatcctagtgccgcagagttcatcccaggccgcactgcgttgggtgaaccaacggcacaaccgcttgcatgtgcgcttgttggaggtcaaggagccgtcgtcgcgccctgtgttcttcgacgatggttttacccgcaaactgaccttcaaggagcatccgtaccgagaagctgtgaaggctctactggcggataatgaccgccactgcgtcgaaagcccggagcaattgcgtcataccccttacgccatgacagctcaggggctgatgtcgggcaaagaacgcttcttcgacaagcaggatcagaagcgcctggatgaagactggctgaccggcttcgacaaccgcgatcgtctggccttcctgactgagcagattcgcgaggtcaatgaacagctcgtgcccgccaaactggccctggatgctgcccagggcgatgtcggtcagttggagagtcaagcttcgctgctgcaacgcgtcgaagaactgcagttcgaggagattgatcggccgggcgccgagcgccagctggcgtcactgcgtgctcagatggacaccttgacgcgccccgattctgaccttgccatgatcaaggccgagctggatgaagctgaggacctgcaggagtcgctggatcaacagctgcaacaacggatcaagcagtgcgttcagttgaaaactcagtttgatcaggccgcatccgctacccgtagggcctatcacggtgccgagaaggggctgagcgacacgcagcgtgaactggcgcaaatgcatttcccgaccctgacggcagatgacctcgacgatattgtcgagctggaacgcaagcatacgcgtgagcttcaagggcagctcaaaacgctcagcgagaaactgggcgaccagaaaacagagcttgccaaacgtatgtccgacgccctgaaggtagacaccggggcgcttgccgaggtcgggcgagaactggtggatgtacccaggtatctggagcgtctccgtgtgctgaccgaggaagccctgcctgagaaactcaagcgcttcctggaatacctcaatcgctcctcggatgacggcgtcacccagctgctcagctatatcgaccatgaggtctcgatgatcgaggagcgcctggatgacctgaacagtacgatgcagcgtgtcgactttcagcccggacgctatctgcgcctggtggcgaaaaaggtcatccatgaaagcctgcgcaccttgcaacaggctcagcgccaactgaactcggcgcgcttcatcgatgatgaaggcgagagccattacaaggcattgcaggagctcgttgggctgcttaaagacgcctgcgaacacagcagaaatcagggagccaaggcacttctggatccgcgcttccgcctggagttcgcggtatcggtgattgatcgcgaaagcaggaatgtcatcgagacccgaacaggttctcagggcggtagtggtggcgagaaggagatcatcgcctcctatgtgctgaccgcgtccctcagctatgcgctctgtcccgacggcagcagccggccgttattcggcaccatcgtgctcgacgaggcgttttcgcgcagctcccatgcggttgccggtcggatcatagcggcgctgagggagttcggcctgcacgctgtcttcatcacgcccaacaaggaaatgcgcctgttgcgccatcatacgcgttcggcagtcgtcgttcatcggcgcggcgtggaatccagtctggtttccctgagctgggaggcgttggatgagcatcatcaacagcgcatcaaggccatgtatgaagtcgcccactga

SEQ ID NO: 352786 - DNA, 612 bp, Pseudomonas aeruginosa; identical to SEQ ID NO: 326467

SEQ ID NO: 352787 - DNA, 924 bp, Pseudomonas aeruginosa; identical to SEQ ID NO: 339199

SEQ ID NO: 352788 - DNA, 618 bp, Pseudomonas aeruginosa
atgcgctatgtcgtcctccagcgggtaggtccaggtcgtgccggtcaagccggtgtacgacttcttcaggctggaaccgctgtagatgctcagcgtgtatgtcgtgccagcttccagcgatatgctgctcgcagacgagtcaaccagttgatcggcctgcagcagccggttgcggtgcgcccacgacacggtcagcacaccgtaggtcttcgtcggatacgccacaccacacaccagcacccggccaggcgcataaggccgcgcctggcgctggttcattcgcagcgagtcgaccggcgcgaggctctctgcgagcgtcgccgagctggtgcggctcagcagcttcacgttcactgtctcgccggtcacgtactcacgcgtgtcctctgttgcccaatcctcgtagaaccagatcagcgcgccggcctcatgcggcgctggcaccgtatcgacgcatccccgcgcgagcaccgcggtgccggccgcggcgttgatcgcgtcgacgcggaagatctcgtcatcgatcatcgcggccgagcccacctcgacgaggtcaagatcaaccccttggacaagcgtgacgctgacgctggtcaggccccggccgatatctgctga

SEQ ID NO: 352789 - DNA, 246 bp, Pseudomonas aeruginosa
atgcaaacaactcgctcattcagcatcggccagaaggtcgtcatcactcgcaaagctaccgccgataaaagccaatacagctttgccccggtagaagagatgtttggcgaaagcggctatctgctggatctcaaaggccatgactttactcttgcagacgtactgttggagaccactggcagtatagaaacggtggatgcttacttcttggacgctgtgcctgagccgcataacgcagccgcctaa

SEQ ID NO: 352790 - DNA, 564 bp, Pseudomonas aeruginosa
atgagcaagcaactgatcacccgcgagtacaacggcaacgtcttcaccttccgcgaggacggctacttcaacatgaccgacgctgcgaagaagttcggcaaagacctgagcaacttcactcgctctcccgagacggtggagtatctcgacgctctggctaattccgtgaaatccacggatttaatcgagtctcaacgtggccgtaacggtggcacttgggcacacccgaagctggccgtcttcttcgcccgctggctggacgtgaagttcgcagtcttctgcgacatggtcatcgacgacatcctcaacaagaaggccgagctgaccatcacccagcccgccgagtcgatggcaatgaaggtgccccagtcgttccccgaggcgctgcgtctggctgccgagctggcagagaagaacgagcgtctggccctggagtgcaaggagatggcaccgaaggctgtcgtcttcgacaactgcatggcgctgcgtcaggaatccctggccaccttcgtgcgtaccttgaaagcgattaccacacagtattggagccccagatgctgctga

SEQ ID NO: 352791 - DNA, 201 bp, Pseudomonas aeruginosa
atgatccagctcaacaagatcctcaagtccttccagaagaccatcgaccagctcgaacaactgaccgccaccaacaacaacgaggtcagccgcaacaccgagcagatcgaccgtctgcaggagaagaatctgatcctgatcgcagaagcccaggctgccaaggagaccgccgagaacctgaaagccctggtcggcaagtaa

SEQ ID NO: 352792 - DNA, 147 bp, Pseudomonas aeruginosa
atgatcggtaatcaatttggcttcagcgtctctattggcaaggcacgcttttgcttattcatcggtgacgtgtatatccgagtgccgaggtgctttgagttggcttggaatagcactggtttctatttcggcaaggatggagcgtga

SEQ ID NO: 352793 - DNA, 402 bp, Pseudomonas aeruginosa
atggagcccccattcagcaagcacgccctggtctatgaccggtatgcacttgtccagcttttcaaagcgattgaggagttccgtggcgttgatccagagataccagcacaaggcatcgcgttgttcctctactcggcgatctacccaggctgcacgatgacggatctgcagaagaaccttgggatcacccaatcgtcctgttcaaggaacgtctcggccttgtcggagtggcatcgtcttgaaaagccaggactcggactgatagtggcaacgccagatccgatggagcgccgcaggaagatcgtgcagttgaccgagaaggggcagcaactggctgtctccctgaccgaggcggtgatgaacccggttcgactgtcgtcgttctcgaagacggcacggtaa

SEQ ID NO: 352794 - DNA, 321 bp, Pseudomonas aeruginosa
atggacaccttcaaaacgatgctcagcaactgggaaaacaaagctcacgaaacctcgaagcttgttgaaatcaccctgaccattcgccaacaagacctagtgaaaatcaaggcgtttgcggaagcctatggactagatcaaagcatcatcacggaaggtctgattcactctgctataaaagaagcggaaacagccatgccctacgtcaaagggactgaggtgatccgagtggaggaaggtgaagagatttttgccgacgctggtaagacacctgcctacgtcgaagctgaacaagcaatttcaaagaccctacggggatag

SEQ ID NO: 352795 - DNA, 1284 bp, Pseudomonas aeruginosa
atgacgccgcagcagctcaccgaagagtacatcttcgcgcacgatctccgggaagccagcgcgaagatctaccgcgccgcgaccaaggcgctgctgaagcacttcggccctacggcaaccgtacaggaggtggaccacaggtctgtgctgggatggcggcgcaaggtcctggaacaaggcctgtcgaagcggagctggaacacgtattcgaatcatctgcgaacgatctgggggtatgccatcgagcacgagctggtgacgcactcccaagtcaacccgttcagaaagaccaccgtcatcccccccaggcgagcaagcaaaaccgtcgcagccgaagccatcctgcgcgcccgcaattggctcaacatgcaggtcggcgccgagcgctgcaccggcgatcgcgcacgcatcactcccgcctggttctggctttgcacgtttgaggtcttctactacaccggcatccggttgaacgcgctgctgtgcatccgcaagcgcgacatcgactgggataatcaactgatcctcatccgcggcgagacagagaaaactcataaagagttcgtagtgccaataacggaggggcttgtgcctcacctatcgcggctcctgcaggaggccgatagagccggattcgccgatgacgaccagttgttcaacgtcaaccggttctcaccgcactacaagagcaaggtgatgaactccgaccaggtcgaagccatgtaccggaagttgaccgagaaggttggggtgcggatgaccccgcaccgtttccggcacaccctggccaccgacttgatgaaggcacccgagcggaacatccacctcacgaagtgcctgctcaaccactcgaatatccagaccaccatgagctacatcgaggccgactacgaccacatgcgtgccgtgctgcatgccagaagcctggcccaaggcgcactagagaacgtcaggaaggtggattacagcggctccccgcaagcctctgccaaaccgaagccatgcgggcaacctctcgctcgaatgggtgaagtaccgccaccggaggccaggacagaacctgcagaaccaagggagcacataccagggacaggcattcagggaggtccaaccgcgtgggaagcagaagcgctaccacagccacctgacaccttcgaccaaagcgtgctgttcactctgatggctcaacacttatcgaaccgtgccgcctcggcatccgcggctcccgctgcaacaagcggatctggtggatggggatctactgcccgaagcagtctcgcctag

SEQ ID NO: 352796 - DNA, 162 bp, Pseudomonas aeruginosa
atgggtgaacacacgtgggtcttggatttgttgcggttattggtggaatacggcgactcatggaaggtctgggttgggctcgccatcgtttctttatcgattgtgatctggagggcgaagcactttcgctttctgattgaggtgagtaagggagatgactga

SEQ ID NO: 352797 - DNA, 1674 bp, Pseudomonas aeruginosa
atggcaccacggaagaacaaagcaccaaaggttgttgaagaaggggccagcgtgagcacccgtgacgacttctctgaaacgacaaagattgagttgcttgtgagggccgcgaacctttgttcccgttgtcgtgtcttcacgattggctcaacggatgcgggtgacaggaaaaatagcattggtgtagctgcacatatttgtgctgctgcgagcgggccgggtgccaaacggtatgacccaaatcaaacgaaagcccaaagacgacatttcgataacggtatttggatgtgctattcgtgctccaagctgatcgacaacgaagagacgtttcacactgtcgctcatttgaaagaaatgaaggctcaacatcaggtctacgtgtctaggctggtcggtgtagttcctatggcaccattcgaagctaaagctgaaattcgtgcggggattcttgaagcaaccatctccctgattacgaaggcaggtagcccggctaatttcgatatttcggcggtcgttgaaggctatgagcaatcaataaatagtatcgatccaaactttaaggttgtcgtcactgctacaagcggttctgtcgttcatgagctgataccgatcactgatcctgcaccagaaattcagatagtttttaatgatgatgaagccaatgcttctgctgatcaggcatggcaaaacatgactgaagtggggcagccgattcacatacctacaaatgacttcaaattcgtaggatctaaactatttgaacacctaaatgaaatgattgctgggggaacactaacgctaactcctagtaaacgacgccttgaaacatgtatctatttcgtaagtgatgaagcggaatttgagctggctacaactgattcattcatggggaaggggtcaaaacaattcgatattgaaggttctgcattggacggattcttcacttatcgttattttattcatgaccgctacaagatagacgcaacctacacatttgatgtggctggatggctggggcagccaatcaataatctcagacattatcataggattaaaaaagcctatgatttcgttatgaggtatccgaagtctaaagtctctatcgaggtagtgctgaatggaaaccctatgcgtctatgggatggggtatacagtgactttactgagctattcgctcggttgaaaaagattgtcgaggttgctgagtgctccaaagccattgcttcgagaatttcaaatagaattatattaaagaccttggatttgacattgcaggatgagcgatacattgagctatatgcacatcttttcaaaggtgacgttattcgaaagcttgattatggtgaaaatattttcactgctcgtgttgatcctatagaaagtaaggctatcaaaacgttttgctccgaaaacgagcctgaagtcaccatagccaagtcaccaacaatagacttctttggcaatagggttaaaatgcctagcatgtcaaaaaaagtatcgtgttttgatttggttttcttctcaagcattaaagaagatgacttccaatctctgtggtgtattggaagagcaaatcattttagtggttcggtcatttcaattgctcccgatgaaattccgctgctttgcgatgatgggttagtagttaatgaatcaggtcaaggagtgggttaa

SEQ ID NO: 352798 - DNA, 168 bp, Pseudomonas aeruginosa
atgaaacgcgtgcgccactggtccaagaggctcatccagccggtgtgccagatatacttcagataccacctcgctgttacgcccgaggtccgcaatgccgaggcgcaccagtcgccccgcatccagatcctcctggacttgccatgccggcaggcgcccccagcctag

SEQ ID NO: 352799 - DNA, 534 bp, Pseudomonas aeruginosa
atgcagcagctggtagttatttccggatgctccggcggcggcaagtccgccttgcttgaggagttgcgccgacgtggacatgcctcggtcgacgaacccggccggaggatcatcaccgagcaaatgcgacagggcggcgacgccctaccttgggctgacatgggtgccttcctgcacgaggcattgcaggtcgccaggttggacatcgaacgcgtggcattggccaccgggccggtattcttcgatcgagggctggtggacgcagcggccgcccttcagcgactgtttggggtaccgatgtcgcaaaccctgggcgacttccgtccttatggtttgctcgtgttcctcgcgccgccctggcctgagatctatcgctccgacgagcagagacggcatggcctcgaagaggccgtggccgaatacacgcacctggaaaccacctacaacgacctcggctacgacgtcatgctgcttccgaaagccagcgtcgtcgaccgggctgactttgttctggaaacgctcgatcgaggctaa

SEQ ID NO: 352800 - DNA, 252 bp, Pseudomonas aeruginosa
atgtcaggcaaatccgccgcacgcctgggcgatcccacctcctgccccgtccccggccatcgcacaccgacagttctgttctgcaaccgccccgctgcccgcctgggagacactgccggctgcggccaggccatatccggcaccttctcctccaccgtatatatcaacggcaaggatgcctcgatgctgggcagcacgctgagccatggcggaaccgtcatcggcggatcgggtgatatgctgattggctga

SEQ ID NO: 352801 - DNA, 837 bp, Pseudomonas aeruginosa
atgaattcaagttcagaaacctatccgattcttctcaacgaagggcctgcaagcgtgcgtgacctggcgccgctcgcgttctcagggttcgcccacttcaccgctttgcaggtgcgggggcgtcggatcaaggctctagatctgcacatggcacgcttgaggaatgcctcgatcgacctgttcggtcgggcgccatcctacgataccgttgcgcgcagcatccgacgggcgatcgaggatggcccgccggatcagtcgctcaccgtaacggcgtactcaccggagggcgaattctccgcggggagcagcgacaccgagccgagcttattggttcgtactggaccgccgtcaaatggacccaaggggccgcttcggttgagcgtggtcgagcatgagcgatacttgccgaccatcaagcacgttggggaaggtgcaaaaacccaatatctacgacaagcggtggcgcagggcttcgacgatgcggcttttgtagaccgtcatggtcgcttgggcgaggcgaccatctggaatcttgccttctgggatggccactccgtggtctggccgcgagcgcaagtactggtcggaacgatgatgggaatgatccagcgccaactgagcgtgctcggcatcgcgcaacggcatgaggatatcttcgtccgcgacgtggcgaacttcgctggcgcggtcgttatgaattcctggacgccgggtgtcgctgtcaccgccttcggctcggtcggcgttccgcaatcgccagcctttcttgaggctttgcgggccgccttcgagtccgaatgtgctttggaagttacggagtacggcgacgtacgctga

SEQ ID NO: 352802 - DNA, 303 bp, Pseudomonas aeruginosa
atgctgcggtactacgaagaggaaggactcctcaagccgcaacgcacccagaacggttttcgggtgtatgggcctcgcgaagagcaaacggtcgagcgaatcaaactgctcggctccgcaggcatgacactcgcgacgatcaagcagtttctgccgtgcattcgaggcgaaggtcatctgttggagccgtgcgacgagctccgctccacgttggccgagcagatcgcgctgatcgatcagaaaaccgaaacgctcatgcgaagtcgcaaggtgctggagaggtttctgctggaagtgcagtaa

SEQ ID NO: 352803 - DNA, 249 bp, Pseudomonas aeruginosa
atgcgtaacaaccagatcctcgaacacgggcctttgctcatgcagcctggaaagcaactcacctgcagaaaggccaacatggtcatcatcaaaatcgtcgtcatccacaagtccggcatccatccgggcctgcgcgcggtggatccggagctctacccggtggtcgaatggacatgtgaacggatcgagcgcgtggagcatgcgaacgacgtcagccatgatcgttactttcctttcagggtcgagtga

SEQ ID NO: 352804 - DNA, 1575 bp, Pseudomonas aeruginosa
atgagtatttccctggaatccagatctcctggaacgcgaaccgttttatccacggccgcaggcggcaaacgagccggacctcgcgcctgggccgggctggcattgctatcgctgcctacgattatgctgggtctggacctgacgctgttgcatctggcactgcccgcgcttgcgcttgacctcaatccgaccagcgtgcaggcactctggatcatggatgcgtacggcttcttcatcgcgggcttcctgatcacgatgggaacgctgggtgatcgtatcggacggcgcaagatgctgttgatcggtgcggtagccttcgccatggcttcagtggttgccgcgttttcaaccagcgccaccatgctgatcgtggcgcgcgctgcccttggggtggctggggcaacgctgatgccttcaacgcttgcgctgatcagcaatctatttgcagatccgcgtcagcgggcgcttggcataggcatctgggcaacgatgtggggcgttgggtcagcattgggaccggtagtcggcgggcttatgcttgagtggttctggtggggggctgccttcctgctggtggtacctgccgtgtttctgctggtgctgctcgggccgttcgtcttgcctgaatatcgttcgctcgatgccgaacgagtggatcttgtgagcgtcctgctgtccctggctgcgacgttacccttcgtctacggcgtcaagcagattgccaaggaaggccttgttctggacgccagctcggcaatcatcgtcgggttactgtttgcgtggctcttcgtgcgacgtcagcggctactctcagaccctctgcttgatctgtctctgttttccaatcgggcgttctccgctgcgctcgctgtgttgctgttcggtctcgtcgcagttggcggcaccatgctgcttgttgcccagtttctgcagcttgtcgtcggatactcgccctcggatgccggcttgtggatgggactggctgcgctggcgatgatcatcggtggcatcggcgctccgctcctggccagggtgatacgtcccggcttcgtcgttgctggagccttggcgttgtcggcggtgggttatctcctgctcgcgcaggtgacggacacgagcatgggcgttctgttggctgttgtttcgcttgcgttggcctacttgggaaatggaactatcgcggcgctgggcacggatctggcggttggcaccgcaccggcagggaaagcggggtcggcctcggcgatgaccgagatggtgcaggacctcgggatatcgttcggcatcgcattgcttggaagtatcgctggggccatttatcaacgaaccatcacccctttgctcgccggcgatctgccggcaggtgcgcgggacgcggtggcagacagcctatgggctgcttcggcgagcgccgtagagttgcctgctgacctggttgctcatgcgcaagctgctttcgtggccggtcttcaaggcgcagccttgttcagcgccgcgagcgtcggcgtgctggcggtgatttcagcaatcgcgctgcggcacgtgcgctcaaacggcgtagataccgggcattag

SEQ ID NO: 352805 - DNA, 825 bp, Pseudomonas aeruginosa
atgtctgatcgaagcctcaggcgcacacgcaaggagctatctgggtttctgctgcaccatcgacagaagctgaccccggcggacgtcggactaccctctaccggacgccgccgaacgccagggctgcggcgggaagaagtcgcggcgctcgcaggcgtcggtctgtcttggtatacgtggtttgaacaggggcgtgatatccaggtatcggagaagtttcttctgggcatcgcctatgcactcaaactggacgacgccgagtgcaatcatttgttccttcttgcacaccgcagaccaccatcacccgaagcgcgccagcccgcatcagtttcggcggggatacagcaggtgctggacgaactgcccaggccggcctatgtgcagaaccttcgatgggacgtcatcgcgtggaacgcggcagcagatgacctttttcagttcggttccagagaattgcgggatcgcaacctgttgtatctggcgtttgccgcccccgacatgcgtcgacgattgccagcatgggagattgacaccccggggctcgtggcccagttcaagtatgacgtagccactgcccccgaagatccagcgatgctcgaaatcatcgaaacgcttcaatcgctttcgccgagctttcgccgcgcatggatagaacccgggggagcggtcgcgcagcgtggcgtgagttccgttgtggacgtagggggcgctctgcacaggtttcatcacgaaaccctgaccgtggatgaatatcggcacctcaggatggttgtgtaccttccagctcaagcgcccgatattgtgatgccaagtgctacgggataa

SEQ ID NO: 352806 - DNA, 237 bp, Pseudomonas aeruginosa
atgctacgcgcggcgttcgctatcaaccgccgcgtcagcaccacggtgatcggccgtgaagcgcgcggcgccctggccgaccaacctctaccgacactgcagaccgaagtacgccagcgcatcgtcttcgccgagagcgtggcagccggtcgtctggcacgtgaactggcgccggacagtgccgccgcgcgggaggtcagcagcctggtggacgagttgctgaggtggtcgccatga

SEQ ID NO: 352807 - DNA, 312 bp, Pseudomonas aeruginosa
atgagtagtcactacaatctccagcacaccagcaaagtgctcaacttcgaaagcaccaaggagctatcggcaaagaccgctctagcggtcaaactgaatacgttgatagagcaacgcggcctgagtcagacagaagtagcaacgattactggcatgacacagcccaaggtatctcaagtacgtcactacaagcttaaaaacatctcgttagagcgaataatgcaggcgctagtgtctctggaccaaaacattgagatcgtggttcagcctgcaagcagcgctcatgcagcaaatatcacagtagccgtgtga

SEQ ID NO: 352808 - DNA, 735 bp, Pseudomonas aeruginosa
atgactcaggaagagttaaacctactacaagagatggtaagtcgagcgctaaatgacgctgacagtttcaataaaatatggatagcaggcgccgcaattatactttcagcgctgacagcagtcgcaggattcatcgttcaaatagtaataatcagaaagcaaatcagcagccagaaaattatagccgaacaacaatcggccgcagccttacaggcttctgaaagccaactatatatgcaagagctatcctccagaaggatcgctgcagccaatatcaccgacaagcgtcaagtctggataaacgagctccgtgatgacatagcaaagtacttgtcaatttggcaagaaatctcttggcgttgggatgcaatcatagccaagtgctctagaacgaccatcaccgacgagcgcctagaagaattcaagaagccgatagcagagatgcgcatgcaagcgcatgaagtagaaattagaattttccttcgccttaaccctacggaagaaaagcataaatccttaatggagttaatgataaaactccagaaaacgaccatgctctttaaaagaaacatcagcagacgctcagccgacagcattcaagagcagttcatttcagaactagaactagcaacccaaaagacacaagaagttctcaaagaagaatgggacaaacttaaaagagaagcatatacagatccatatatagagcttctcacaatgactccaagaatctaa

SEQ ID NO: 352809 - DNA, 204 bp, Pseudomonas aeruginosa
atgagcctagagggactgatcaatgtcgttgctctcgtgttgatgacttacctcctcgacggcggcgcccagctcattcaacccgaaatccctgcctgctggttcagtccggctcagctggagtgctggacgtcgccgcgcccaccggcaggtagcgtaaggcacgagcgccccgccggctgggcgcggcagacgtccctgtaa

SEQ ID NO: 352810 - DNA, 1791 bp, Pseudomonas aeruginosa
atgcagctaattgaagaaattgagatctcttacttcagatccttctacaaggaaacactgacaggctgccagcataccaatattatatttggcaaaaatgactctggaaaaagcaacactctaagagcacttaacctattctttaatggatttacaagccctggccagcttttcaattttgaacgcgacctaaatcactctcgacgcgccgaagcggaagttgatgatggcgttgaacgtcgaaaatttatctacgtgaaaattcattttagaaccccagacggctggaataaatcgctaggaaaaaagttctgggttaagaaacagtggagtgtatctttcgaagacgagccacagctttccacgtcaatttccggcaataaaatatatctcaagaaattcctgaagaaaatcaaacttcattatatcccagcaatcaaggacagaacgatctttgagcgactccaggctgaaatttacaaatccatcgcgagcagcggcgagttccataactcgctcgaaaaattctctgacgatctaagaggcagaacagaggaactcagcaaaaaaatactatccgacacaagcattatgagcgcgttgaatgcaccgaaagacctaaccgatctatttagatcgctagactttgagacgcaatcagatataggagactcatatagcttgacgctccagagaggcgatgggattcaggttagacatatccctcctattctgtctttcttggccgacaatagcaaagaagacttccatatatgggcgtttgaagaaccagaaaactctctggaactagcgaatgctataaatgaagccgaacaattcagaggctacggaaaaagcaacaataagcaagtttttttaactagccatagcccggcatttttctctttggaacatgatgacgtaagtcggtactttgtatcgaggagaaataaaattgcagacagatatcactccaatatagagaaaattgaaaactcccccaaaacccttcctggagagctcatgggggaaaccccacaccttccagtaatcagctcttatcttcgcgaggcacacgaaaaaattcttcaacaagaactaacctctcatgaactaaagcgacagattgatcaagccaagacctcaatgctcttcgtcgagggaatttgcgataaaaagatatttaaaaaagcttgggaggttttgattggaggagagccgccatttgaaataatttccagcggcggtacaaccaagatggagagcctctccagtgatggcaaaatcctttctcacttagcacctgaccgaaaaatttttgctcttgttgacaacgacaaggaagggaggtctcttcataagggcgagcctgacaaacctcaacaatggcaacttcataagagcaatggagtctattggtgcaaattacctcttggcaatgacttctctcgcatcatgaaagaactgaaaatagataaaacgcattggccaggaaatatagagaacttttttaatcttgatataaagcgaaaggcagctcaagaaggcgctcttgttctagacagaatggtggatgcctccctatacatagccgagcttcggaaaaaagttacgccactggttaattcaacgaatgacgaagacggacactattatatatttagcaccaacgaagactataaagagaaattcgcgaactggatcgtaaaacaggcagataaatcaccagaaattttctctccactcaaggacatttttgaagggctggcgaaattgctcgcggaaaaatag

SEQ ID NO: 352811 - DNA, 960 bp, Pseudomonas aeruginosa
atggatccgcgcctttcctgcttgattcacgagtatctggatagtgtaaagtcaattgtcgcgcttatgtgtaggtccggtatccctctgccttacagtctggactcttgggtgttcgcaaaaatccctagcactggtgagcttgatggaggagtagcttatcaaaaacatggcgctggctgtagagtgtcttttaatgggagtgttgttgacttcgattttggggaagacggagaaatagatgaagtagagtgttctcggcttcagcgctttgctagtagtaatatgaagagattttgctttgaaagttctgaggagatacggaagtgctttgagggtgcagtcgaatctggctctttaactagcgttgatggcttcgccttttatatagccggtgggccacgcctgcgagctacggaggttgactggcggcttgcaggtgacctactcccgcctgacactcaagatgttatattaaaaatctatgcgcacagttttctttctgctgatctcatgcgtagcaactataagaagctcgatgcccgctgggacaggagaggaaagctatccaatacggatgaggtaaatattcgaatatacttgtttacatggttagggtttctgtttgaaacgtgtaagtggttcaagaagaaaaatgttcgaaatctattgaggaatgagcggccaatagagttcagagagctacttgaagaggtgaacttattggtttccctgttcgatagatatgagtctcatcttaagggctttagaaatggtgtattccatctgccagattccagggtgacgagagagtatttttgcagagaagctgggagaattgagtggtcgcacgaattgcacaatagccttgaggtttttttctctcagtatcgaatacgttgcttgtctcactacgcccttaatggacgaaaatgcgaattaaggtcacttgttccttga

SEQ ID NO: 352812 - DNA, 615 bp, Pseudomonas aeruginosa
atggccgtcatggatgattttaatgagtttatgcaggccaaaagcgttgcaatggcgctgcgtgagaaagcaaatagtcctgcaactgggctggtagatgctgagcggtatctcttgtatgaagctattttccttaggctttatagggcctatgagaacttgttagagaatgtgtttctagcctatatttcaggggagaccactggatctggagtggcagtaactacctttgtttcgccagctaataaggaacatgctcgtgcaattataacatcgtctcagccatttttagactggacgagtccctctgtagttatgaagcgagcagaaacatatattgatactggtgagcctgtaaggagtgcggtggcggcctcccagaatcatcttctacaagcaaaaaagatacgcaatcatatcgctcataattcttcggagagtgagaaagagtttatgaaggttgttcaagctattcttttgactttaccgttatcagcaatttctgcaggagagttgcttgctaatacgcctacggcaggtccatgtgctcgcaaagaggtgctgacgtactttctagaaaggctggagagtactgcgctgggcctcatcgcttag

SEQ ID NO: 352813 - DNA, 1263 bp, Pseudomonas aeruginosa
atggaagtgaggccgggctataagcagacggaggttggcgttattccagaggactgggcggtttggtcgctgggagaaatcggagaaagccttattggtctgacttatcatccttctgatgttcgctcttatggaacattagtgctgcgctcttctaacgttcaagaaaataagcttcgatttgatgacaacgttttcgtcgatacggatattcctgaccgaattatggtcaggcctggagacattcttgtatgcgttagaaatggaagtcgtgatctgattggaaagtctgccctgattgatgatcgcgctattggaatgacctttggtgcgttcatggctgtatttcgaagtgagcagggggagctgctgcaccagatgtttcagtctgaaattatcaagaatcagattaatgagcatctgggcgcaacaattaatcaaattacaaataaaagtctgaattcgttcagggttcctttgccacctactaatgatgaacggcgcgctattgcttccgcgttgagcgatatggatgcgttgctggttgcgttggagcagcttgtcgtcaagaagcgcgccctcaaacaggctgctatgcagcaactcctcaccggccaaagccgcctctcaggctttcacggtgagtgggaggtgcgcccattgtcatctgtcattgcaggtttggatgctggtgtcagcgtaaactcggtcgagcacagcatgccgcttcgttcgggggagccttgcattctcaaaacctcggcaatttttgatggatgctttgaccccgaagaatgcaagctcattgaaagacgtgacattaatcgggcaaggctaagtcctaggcgggacaccatcattatcagtcgaatgaataccccaaatcttgtcggggaggtgggttatgtcgctgacgatttcccaacgctcaacctgccagaccggctatggctaactcgattcgatccaaattcggacatctgtgcgcgctggttggcatacgtgatgagtagcgcaaaggtcaaggaacgcattaaaggacttgctacaggcactagcggcagtatgaagaatatcggcaaagacaaactgctcgctttgcagcttgagttcccgacaggcgaagaacaaacagccatcgccaccgtgctgtccgatatggacgccgagctggccgcattggaacaacgcctggccaaaacccgtgccctcaagcaaggcatgatgcaagaactgctcaccggaaggacgcgcctggtatga

SEQ ID NO: 352814 - DNA, 822 bp, Pseudomonas aeruginosa
gtgagttgcgaaaatttctaccgacaacttgaagacgaaattgatcgattagatgatctctttaatgggctgcctgctcgtcatcgggcgcggatcgaagacccacgactggagactccagggctggcgattatagcgtctcgtacgacagctttaaggcgagagtatcttgctggtatagcgattagctccttaggtagtgagtctattgttggggctgcgtcagtgtgccttacggttttagctaatcatagtcccagtatatttttgcgtcagattcttgctcaagttagtcggttgaaatttgaggttctagatcatggtcagcttgacgatgctgactggccctgcgtaagcagcggcgtcttgaggttggaggaaatggtcggggtaagggtaggcgacgagtctgctaattcagctgcgtcgcgtctgagatgggaaactacgatcttatccattgctgatctattgtcaataatagctggatcgccaagggagtccgcagttattgttgagaactatcacttaataagcggtgttggaagtcatcctgatgctatccgtgacttgcgtaatgctgcagttgctacgggcgtttatctttatattggctgtgggcttacgcactggcatgaagtcagaggtggtgaagctttgtacctttccgacctgactgagagcttagctgagtcggtgcatttagctgatctaattacattgctagctccctctcagttagggatgtccgcggtggtatacgacccgagatatagtgtgccttggcgaggcagtctgagcggctttgagggtgactattag

SEQ ID NO: 352815 - DNA, 408 bp, Pseudomonas aeruginosa
atgctcaccggtctcaatcacctgaccctggcggtcgccgacctgccggccagcatcgccttctaccgcgatcttctcggctttcgcctggaagcacgctgggaccagggcgcctatctcgaactgggttcactgtggctgtgcctgtcccgggagccgcagtacggcgggccggccgcggactacacgcactatgccttcggcatcgccgccgcggatttcgcccgcttcgccgcgcagctgcgcgcgcatggcgtgcgcgaatggaagcagaaccgcagcgagggcgattcgttctacttcctcgacccggacggccatcgcctggaggcccacgtcggcgacctgcgcagccggctcgcggcgtgccggcaagcgccctatgcgggaatgcgtttcgctgactag

SEQ ID NO: 352816 - DNA, 723 bp, Pseudomonas aeruginosa
  misc_feature (659)..(668): n is a, c, g, or t
atgcacaacacttacaatatctataaagttaagcacgacaagctggatcagctcctaaccaaactaggtactgtaggtttgacggagcaaaaaacactgcaacccaacaaatactcaatgactttctattactccgaaaatataagaggaaatgagatttggtggtggcaagtctatagagagtttttcaatgatgacataaacgagcccaaaaatatttttcatttcgggatactgctctgcagcaatagcgaaaaaccagaagaaatatacgcagtcagcctgggtaaatcccacttttatctttccaaattcacctattctgatttcggcattcaactggccgtgcgtatggccgatgaaaatactatccttctgaagaaaagccggtatttcgccggaaccaaaagacaggacgtatcgtcttaccagcgctttcagctcggtagctacgaacctggcgagtctgtagatcatctgaaactgaaggcttccaacaaggaagtttggggtgaccgaaatataatatttgctgactccatccaaatggatatagatagaagccccatcgatttagccgtcatctttgaccaaatcgaagccggcattacggagcaggagataattcacctgcccaagcttgagcccatagcggtcgnnnnnnnnnnatcaaaaatatgcaaggcaacgtacaagttgaagagttttatgttcatggcgtag

SEQ ID NO: 352817 - DNA, 2151 bp, Pseudomonas aeruginosa
atgaccctgccgcaatccgagctcgactatttgaggaaacgcggagtatccgcgcagctacagccgagcgcctcgaacatcgtgcacgcgacttcgctgcagacgctggtcgcctcgattcactacgtctcgaatctggtgcaggcgccgccgccgcggacggctgacgaatgggcgcgcgacaagcgcatcatgccgccgagcgcgcccaggcctggcaagttcaacccagacgtgaacccgtacatgcgcccggtctcctgggcgttcgcgcagccgtgcttcgaccgggtgaccttcatcacggccacccagatgggcaagtcggtgacgatggagaacatcatcggccatcggctcgatgaagatccgacgccgatcatgtacatcgcgcccacggcgccgctgctgaaagacgccgttgtgccgaagttcgacgacatgatcgccgaatgtgagtcgctgacggccaagctcgacgtgaatcgctcgagcatgttcgttaagtggatcgccggcaccaagctgcgcttcgtgtgggcaggctcgccgtctggcctgtcggccgactcggccggcctaatcatggtcgacgaggtcgatcgcatcgttaataccggcgaaggctcgaccgtaagcctggtcgagcgccgcggcgacgcctacgacggctcgaaaatcggctacaccgccacgccgacccatggccgcgtgagcaagtacaagcacgagaagtcggggctgcagcattgggccgtcgcgccgaccaaggcggtgcggtctgccgtctggaggctgtggcagtccggcacccgccacgaatgggccgtgccttgccccgagtgcggcgagtacttcatcccctggtctggcctgctgtggtggcctggcaagggctcagagaatgaatgcacgcccgacgaggcgcagaagtcggcccggctgacctgcccctcgcacggctgcatgatcgagagcaagtggcgcccgagcatgaacgcccgcggcgtcgcggtggcccccgggcagtcggtcaacaaggccggcgaagtgatcggcgtcgctgacaccgagggctcgacgcacttcacgttcatggcctccggtctctgctcgttttcctcgaagaagacctacggcgccctggccaaggatctgctcgccgcgcagttgtcgaacgatccggcggatctgcaggcggtctacaacaccggattcggcgagtgttatgcccaggccggcgacgtgccgacctgggaggaggttcgggcgcagtgtttcggctatcaggccggcgcgctgctgctcgagccgctgcggatcttctgcaccatcgacgtgcagaaaaaccgcctcgtctacgtgatccgcgcctggtacgccggcctcggctcgatgctcctcgagcacggcgagctctggggcgagaccgaccaggacgccgtctgggagcagctaagcgagctgatcgacaccgactacgacgggcacccgatcacccagaccggcatcgacatcggctaccgcgacgaccaggtctaccgcttcatcaacgaacacaagggcagggccatggctctgcgcggtcgcgaccgcctcgacaagccgttccgcaaggaaatggtcgaggtcgaccgcaagggcaagacccgcaagcgcggcgacgcgcgctgggccttcgactcgcccctggccaagcgctgggtgcatagccgtttcggtcgccctgacacccgcccgggctggtggctgctgcatcagcaggtcaccgacgactactgcaagcagctggtcggcgaggagtggcgcgaaggggagggcaagttccaccaggtcggcgagaaccactacctggactgcgaggctatgcaatacatcatggccatgcacgccaagctgcaccgccgcaaggtgggccagctgaccaaggcgcagctgcgcgaggcgatcaaggccggcccgctggccgatcgcctgccagacgagcccgcaccggtcgctgacgctgaccaggaggagccagccgaggatctgcaggaagccgaggaggtcgccaagccagtggccaagcccgcggcggcccgcaaggcagacgccccgaaggccaaggccaagtcccgattcaacatcatcaggaagccccggcggtga

SEQ ID NO: 352818 - DNA, 426 bp, Pseudomonas aeruginosa
atgtctaccacacaagcccgcaccgccctggtggtgctgctgacggatctcaccgtgcacggtgacgtgatccctgaaaacaccacgctcgaggtcgagcgcgccatccgcaacgactggttcggctcgaagctgtgccgcgacgcgactccggaggagatcgccgagtatcgcgcccaggagggcggcgcggatgccttcgacgcccagctgcaggctgaccaggcgcagctgatcgccgacgtcgatcgcctgcaggagcgcaagaccgagctggccggcgacctcaaggcactggaaagcgacatcgagcagttcggccagcagcgcaccaccctgcaggccgaggtcgacgacctgggcaagcagaagaaggccctggccgatgaagtcgcggccctggagaagaagaaggcggccaagtga

SEQ ID NO: 352819 - DNA, 657 bp, Pseudomonas aeruginosa
atgagcctgctaacccagctcgagacgctgctcgcctcggtcaacaacctgatgggcgtgatcgacggcaagctgcgcaacaaggccaataaggccgacgtatacacccgcggggatatcgacgatccgctgcgcaccctcggcgccaatgctgcgaccgcctcgaagctcaaggtcgcgcgactgctgacgctgggcggtgaggcgaccggcgaggtcggtttcgacggatctggcaacgtcaccctgatggtgaccgtgcccgggctgctggacaaggccgacaaggtcgacaccgtgaccccggcgcagatggaggcgcgcttcgagcagctgatcggcgcggccccggaggcgctcaaccagttgaacgagttcgccgcggcgctgggcaacgacccgaacttcgcggccacgatgcttgcggcgttggactccaaggccgacaaggccgccacctacaccatcacccaggccgatgggaaattcctgctgaaaaccggcaaggcggctgacgcctcgctgctcggcggcaatgccccggcctattacgcctcggcggccagcgtttcaacgctcgaggccagtgtcgccgatggatttaaccgcctggcgacggcgttcaacaacggcgccgcgcagatcaacgcaatatag

SEQ ID NO: 352820 - DNA, 627 bp, Pseudomonas aeruginosa
gtgagcattgaaactcagatcgccgccctggtcacggcggctaacaatctgacggccgctgtcgacagcaaaatcggcgctatcgacacgcggatggatacggccgaagccgagtttgaactttggcgaaatgaaaaagacctagaaggcgatcccggcctcgacggtacgatccgtcgaaacattgcgcagggttatatttcttctactgggggcacgcacccgatgcagggcgcaacggggattttcactgcggtcgatctcggatcgagcgtgagtgtttatatccacattaagctgccgctaaatattaacctgcatgaccggatgttctggataaacatcaagggctatagctacggcagtgcaaagattatcgacgagacgttggttggttattgctatgcgagcggtcatcaacttaccaacaagtcagccttcgggaatatgaccccagatctctatgtcgactccaatgggaatgttgtggctcggttgtttgttccgaatatttatgtgaccacaattcgagttgactgcatgaaagtcggcggcgcctttggcgtcctcttcgacgttggccagttggtcgctaaattgtcactgtcggatacggttgttttctga

SEQ ID NO: 352821 - DNA, 240 bp, Pseudomonas aeruginosa
atggggaaagttgaagttttgccgcgcccgctggtcgagcttttcgagtgggcggcggttcgtgagcggcgcaatcagttgttgtgcgctactgactacacgcaagcgatagacagtccactgagcgaggcgcagcgcgccgaggtggccatctatcgccaggctctgcgcgacgttccagagagcggccctgaccccttcgaggtggtctggccggctaagccggcctgcctgaagtaa

SEQ ID NO: 352822 - DNA, 147 bp, Pseudomonas aeruginosa
atgcttgacgacaatccgttctacgccgactgcccccactgcgaccgcttcgagttcaaagacgaggacgactacttcgaacatgtgtgctggtgccagcacgaccaggagcagaaggaactcgaggagctcggcgaagaagagtag

SEQ ID NO: 352823 - DNA, 603 bp, Pseudomonas aeruginosa
atgcaccaagcaccccacgcaatcgcacgccgctgggtggcgcagaatgtcgccatcctcgacacagaaacgaccggcctcgatggccaggccgagatcgtcgagctcgctgtcgtcgcctgcagcggtgagaccctcctgcagaccctggtcaagccgacacggccgatcccgccaggagcgaccgagatccacggcataaccaatgccatggtcgcagacgccccgagctggcccgaggtacaggcccaactgctgcagattctcgagggccgccaactggtcatctggcacgccgactacgacctacgcctgatcgagcagagcgccgcggcgcacggcatcgaggcgcccgatctgcacgccgagtgcgcgcagtcgctctacaagcacttctggcatgagcccggcgaagatccgggcagcgtgcggcggcagcgcctgaccaaggccgcagcacagcagggcgtcgagatcaccggccaggagcaccgcgccgaggtcgactgcctgaccaccctcggcatcatcctcgcgatggccagcgagcacggcagcaggtggcaggcagccacagcaaccgaggaagctagccatgcttga

SEQ ID NO: 352824 - DNA, 291 bp, Pseudomonas aeruginosa
atgaataccatcctggagaccgcctcgagcaccatcgagccggaagacgtccaccgcgtccgcacaatcgccgcggcgctcctcgagcaccaaggccaccgggcgtgcgagctgctcgacctggtcatcacagatgagaccccggcgagcaccgtcacgcccagccgcgctcgagccgagagcgccgtgcgcctggccgcgaccatcgtcaactacctgcgcggcgagtggggcgtcgagaccatcgaccacgagctcctgcaggcgctgcgccgggagaccggtctatga

SEQ ID NO: 352825 - DNA, 654 bp, Pseudomonas aeruginosa
atggctgcgaaggtgttcgcgatactgaatcagaagggcggcacgtcgaaaacgaccaccgccaccaacgtggccagctgcctggccgtaaagcatggattccgcgtgctgcttgtcgacctcgaccagcagggctcggcaaccgactgggcggcatccagacccgaggccgaggacgatgccggggtgatcccgaccgtctcgatgggcaaggcgctggcgcgcgacctgccgcgtgtagcgggcggatatgactacgtcgtggtcgacggcgtgccccagatcagcgagctgaccgccgctgctatccgggccgctgatgccgtgctgattcccgtacagccgagccagtacgacatctgggcatgcggcgacctggtgcaactggtgaaagaccgccaggagatcgccgacgggcggccggtggcagcgatgatgatcgcccgcgctatcccgggcacggtgctcgagcgcgacgtgcgcagcaccctcgaggcctaccagctgcccatcctgcgcagccagacctgccagcgacagtcctacgtcgccggcatcgagcagggcctcagcgtcatggatctgcccgaggacaacaaagcccgcctcgagatcgaagcggtaaccgccgaactgctggagctgacccaatga

SEQ ID NO: 352826 - DNA, 312 bp, Pseudomonas aeruginosa
atgaccaccatcagcaaacccaccaccgccaggccgagccgagccagccagctggcagaggagcacgtcgagaaggcccgccgcgccgtggtgaccgacgagggcgagaagcagctcaaggtgctggccgcgcccaagtaccacaagggtatggccgagctgaaaaacatgacgaccgagggcgtgccggtgaagcacctgctgctcgaggcgatcgaggatctgttcgagaagtacgggcggggagacggccggttcaaggtcgacgacgtgcccgagctgcgtcgacgccttgaggcgctgatgaagtga

SEQ ID NO: 352827 - DNA, 291 bp, Pseudomonas aeruginosa; identical to SEQ ID NO: 352824

SEQ ID NO: 352828 - DNA, 924 bp, Pseudomonas aeruginosa
atgacgaccgccgttgacctgttcgccggcatgggaggctggtctaccggcgcccgcatggctggcgtcgacgtgctatgggcggccaaccactggcaggccgccgtcgaatggcacagcgcaaaccacccggacacgctccacgtctgccaggatctccaccaggccgactggtcgcgcgtccccgcccatgacctgctgcttgcgtcgccgtgctgccaggggcacagcaaggctcgcgggaagctgtccggcaatccgcagcacgacgcctccaggtctaccgcctgggcggtggtctcggccctcgagttccatcgcccagagggcgccctggtcgagaacgtgcgcgagttcttaagctgggccctgtacccggcttgggcaatggccatcgaggcgctcgggtactccatcgcaccccacctagtcgactgcgccgacctgggcgtgccgcagaatcgcgagcgccttttcctggtcctgaccaagagcagggcgccgctgctcctgcaactcccgcgcctcgagcacacgcccgcctcgagctttatcgacttcgaggccggcacctggtcgcagatccacaagcccggccggtcgccagccaccctgcagcgcgtagcgaacggtcgcctggcgttcggcgagcgcttcgtcatgccctactacggaaagggctctggcactaccggccggagcctggcccgcccgatcggcaccctgaccacccgcgaccgctgggcagtcgtcgacggcgaccgcatgcgcatgctgacggccgacgaggtgctgcttgggcagtcattccccgccggcaccaagcgcccgccacagcacgccctgaccgtccacctggccggcaatgcggtgccgccgaaagccggcaaagagatcatcgacgccttccaggctgctgcctga

SEQ ID NO: 352829 - DNA, 603 bp, Pseudomonas aeruginosa; identical to SEQ ID NO: 352823

SEQ ID NO: 352830 - DNA, 147 bp, Pseudomonas aeruginosa; identical to SEQ ID NO: 352822

SEQ ID NO: 352831 - DNA, 288 bp, Pseudomonas aeruginosa
atgtctatgtttaaccccccgcacccgggcgagactctgctcgaggacgtgctgccggcgctgaatatgaagattgccgagtttgcgcgccgccttggctatggccgcgagcacctgtcgcgtgttgtgcacggtcgagcgccgatcagcccggacctcgcggtacgcctcgagcgggccggcatcggcagcgcgcggacctggctggcggtgcaggccgactatgatctatggcaggctgagcaccgtgagcagccgccgattgagcgcttcgccaagatcgcctga

SEQ ID NO: 352832 - DNA, 213 bp, Pseudomonas aeruginosa
atgcgacgggttagaaccatcgccggagactcggcaaacgtgctgctttaccgggagctgggacgctctgacgacgaggccgaggaggccttctggctggtcaacccggggctggccgagcacggcgcggccctgccgtccggcctgtgggtcaacctgcccgagctggccagcaagccggcccaggcggcgccgatcactgcctgggactga

SEQ ID NO: 352833 - DNA, 129 bp, Pseudomonas aeruginosa
gtgatcctcgatgtcgtgcccctcgtttaccacgtgagcgaggcggagattctggagtgggatgccggcaaagggctgcgccgctacgagctggccatggcgcgcctgggcgtgaagcaaaaggggtag

SEQ ID NO: 352834 - DNA, 507 bp, Pseudomonas aeruginosa
atgcttaccaaccgagtgcggcagatcatcaccgcaaccctgcaaggcctgccgcttaacgcgaccatcgacgactacgatcccccggtgatcgagttcgacatggaggagatgcgcggcgggcgctacatccccgaggagatggccaccggcatgaaggccctgaccggcaagctgacgctgcagggcgtcggcctgccgatcatggcggccctgggcgtcagcggcggcgacgaggtgctgctgaccgtgcaggaggccggcgaagaccaggacggcaacgagtggttcacctaccacgtgcagggcggcaagctgaaaaagctcgaggagaagaccctcaagatgggcgacaagccggtcaccgtgctggaaattgccctgcgcacctacacccgcctggagatgggcgtgccggtgatcgacatcgacacccgcacccagaaggtggtggtcaacggcgtggatctgctcaagggcgcccgccgcctggccctgatggtgtaa

SEQ ID NO: 352835 - DNA, 678 bp, Pseudomonas aeruginosa
atgtcgatcgcaatccctgcgccggccgctggctggcgtgcctggcttttgccgcttcacctggtgctgttcgtgctgcagctggcggtgctcctgccgctgcgcgtggctttcatcctggccggcttcgtcgtggtgccgctggccctgccgttccgcacccgccacgccgacaccgccgagcgtttcagccaggccgccggcacctggtgcctggtgacgctgccgcgttgggcctggccctggagcaatgaccgcgacggcgctttgggcgatcgccgcggctggtggcacaccaacgccccgttcggcctcggcgcctaccactggttttcgatgctggtatggctcgccttccgcaacccggccaacaacctgcgcttcacgcgcctgttcggctgcccggtgacgcgcaccgcctgtacatggtggggtcgcgaggaggtggaagatgacccgggcaagggtggcgtgcgcttcctgatggcccgcgctggcctgctgtggcgcttctacggcctgtattgggtctggcagtggagtgccagccgcgccctggtggtgcagctgggcttcaagcctgagccgtccgactggcttgaggactaccaggccgacccgactcgcgagtggaagggcttcacgttcgagatcaaccccatcaaggcgatcggctga

SEQ ID NO: 352836 - DNA, 240 bp, Pseudomonas aeruginosa; identical to SEQ ID NO: 352821

SEQ ID NO: 352837 - DNA, 627 bp, Pseudomonas aeruginosa; identical to SEQ ID NO: 352820

SEQ ID NO: 352838 - DNA, 657 bp, Pseudomonas aeruginosa; identical to SEQ ID NO: 352819

SEQ ID NO: 352839 - DNA, 312 bp, Pseudomonas aeruginosa
atgagtggcgccgcgccgcgcgtcgtggttacccgcggcgtcgagcgggtggtcactgtgcgccaggcgggcagggtggtggaggttcgccagctgctctcgccgcgggtgacggtggtcagcgcgggcgtgcaggggccggtcggcgccctggccgagaacgtgctgcagcgcaccctgcaggccgaggcggacgcccgccaggccctggccctggccagtgacgccaacgccaccctgggcgccctgctcgaggatctgcagggcgctttcgattaccacgcgggggctatctccgcacaagggggctag

SEQ ID NO: 352840 - DNA, 348 bp, Pseudomonas aeruginosa
atgaacgggccgactctggaactgatcgagggcgccaccttcggcttcgaggcgacctggtcggacagcacgggctcgccgattgacgtcaccggctgtgcggcgcgtttcgtgatctgcccggcggacagcgtccggccgctggtggcgtgcagcaccgaggacggcggcatcagcctgggcggcgctgcgggcaccgtggcagtcagcctggccccggccaagacggccggcaagcacagcaagcagtggcagggcgcgcgctatgagctgcgtgtcgagtaccccagcggcgacgtttacagcctgctgcgcggattcgtggcgctgtcgccggggctgttatga

SEQ ID NO: 352841 - DNA, 645 bp, Pseudomonas aeruginosa
atgagtgatgacagcgccccgcgcctgagcctgctaccggccaaccgctcgccactcgaggcgggcctcgacctggttttcgccaagttgctcgagcgcatcgagccgccattccccgagctgatggatccggcggccaccccggtctcgttcctgccgtatctggccgccgatcgcggcgtgagcgattgggatccggcggcgccggaaagcgagctgcgcctgaccacggggctggcctgggcgatcaagcgccaggccggcacgcgccgcgccctggtgcatgcggtcgagtccatggagctgggcgcccaggtcaccagctggcacgagaagccggccggcgtgccgtacaccttcacggtcgaggctacggtcgagcggccctggctgccgggcgacttcccgcggctgtggcggcggctgaacgatgccaagagcgagcgcgacaacctcgacctgattctggtgcatgaaaccagcggcggcctgcgcgccgctgctgcagccggcacgccgctggctgtcggcgacctggatctggccggcgcgctgcccgagctggatctgcgcggcgacctgggcagcgctggagccgcgcagcactacaccatcaacgactacgacctggaggcgcagacatga

SEQ ID NO: 352842 - DNA, 990 bp, Pseudomonas aeruginosa
atgcttatcccggggctcaaccaactggccgagcccgagatcgtcaaggtcgagcagttcgaacccctgctggccgagttcaaggccgaggtgctggcctacgtggctgcgcgggatcctgagaaggccgcgcgcctcgaggagaccctggccaacgacagcgagctgctgacgatggcgctcgaggccttcaccgtgcgtctgcagacgcatgaacgtaaatacaacgcccgcatcaagcagatgctggcctggtgggccgagggctcgaacctcgacgcccgcctggccgatatgggcctggagcggcggacgatcgccgagggcgatccgaacgccttcccgccgatcccggccgagctcgaggccgatgacgacgcgcggatccgctactacctcgccccgcacgccccggccgctggctcgcgcctgcagtaccggcgcgaggccatgaccctgggcgagcgcgccgcggtcagcgtggaatcgcccgaggcgggcaaggtggtggtggcctacaccttcgccgcggacgccaacgcggccaaggtgaaggacgccaacggccggcagacggccctcggcgaggtgacggtcaccctgctatcgcgcgagggcgacggcacgccgagcgcggcgctgctggcggccacccgggcgcacttcgcgcgcgacgacgtgcggcccgagaccgacagggtaatcgtgcaggcggccgagatcctgccgtaccggatccgcgcggtggtctacatcaacaccggcccggacacccagctgaccaaggcccacgccgagcaggccctggcggtctacgccgccgagcgccatcgcctcgagggctacgtcgacccgagccggatcgactacgtgctgcacgctgccggcgccgagcgcctgcagctgctcgagccgctcgcgcccatcgagtgcgcggccgaccaggcgccctactgcacggcgatcgacgtcgaggtgcgcacgctatga

SEQ ID NO: 352843 - DNA, 333 bp, Pseudomonas aeruginosa
atgatcggaatagaccgcgacaccggggccgccgtcgacgactggccccaattcgtgcagcgcgcgacccgcgcgctgacaaccccactaggcacccgccagaagcgcccgctgtacggctgcaggctgccgactcgccttgcccgcaacctgggcgatcagctgctgatcctcgcccaggccgacgccgtcgacgccttctacaacgaagccaacggcatcggcgacttcacgcccgaggtggtggtcgccagccgtgaaggcgccggcctgcgcctgcgcctggcgggcacctggaaaaaccgcaagatgactttcgaggtggtcacgtga

SEQ ID NO: 352844 - DNA, 531 bp, Pseudomonas aeruginosa
atgtcctacaggccgcttaaccaggtctccgacctgttcttcgccattggcgacgccatccatgccgcgggcctgggcgtcgacgtggccaactacgacgagtgggacggcaaggtgcgccatgcctcggtgctgatcgagctcgagcgcaccaccccagctgtcaggcaaaacgacgggcgctacacgcacgccgtcaccgtcaccctgcacgccgttgtcgggcggtggcgcaagcactcggcgctcgaggcggtcaacctggccacctgcctggagcgcctggccgatcgcaaccgctggggcttccatgggcgcaactgcgagcagccctgcgagatgcgcagcggcccctcgatgttccagcgcggcgccgacggctacgacgcctggggcgccacgttcaaacaggtggtgacacctggcgagccgacgcccgagatcctgctaaaagccgcccccttggttgcgtacagctggcaggtcgacgacctggacaacccggagaactaccaccagctggagacctga

SEQ ID NO: 352845 - DNA, 381 bp, Pseudomonas aeruginosa
gtgatcggcgccgaggatctcggcgacttcttcgacccagacgagttcggtaccactgtgcagctgctcgagcccgggcagcctgcgcgcaccgtgcgcgccctcgagggggcgccggacggatccggccggctgtatcggtcgggcgtggatccgaacgcctctagcctgcgcgtcaggcccgaccaggtgaagctgcagctggcccggggtgacgccccaggcgactggaagctgaccaaggcggtgctcgctgggtcggagtactcgatcgccaacgtggaaccgctgggccggctgcgcgcgctgctgaccctgatcccctacggtgaccgctcggccccggccggggagcgtggaaagtggcaggcttccaactga

SEQ ID NO: 352846 - DNA, 426 bp, Pseudomonas aeruginosa; identical to SEQ ID NO: 352818

SEQ ID NO: 352847 - DNA, 1875 bp, Pseudomonas aeruginosa
atgccgaagagctcgactccgacgagtagcgcgccgctgcctgtcattcgccagatcgaagggcagcagctgcagcgctcgcttgccgtggacatcggcaccctggacaccgaacagcgcaccgtcgaggtcgcggtatccagtgaataccccgtgcggcgctggttcggcatggaagtgctcgaccactcgcccgactcgatcgacctcactcgcctgcatgccggcgcgccgctgctcgaccagcactggcggcagatcggcgtcgtcgagaaggcctggctagacggcgaccgcaagctgcgcgccctggtgcgtttctcccgggggcagtacgccgaggagatctggcaggacgtcgccgacgggatccgccgcaacatcagctgcggctacctggtgcatgaaatggtgctcgagcgttcggagaacggcctcgatcactaccgcgttacccgctgggagccctacgaggtttccagcgtttccgtgcctgcagacccgaccgtcggggtggggcgctccaacgatgcaacaaccaacaccatcaccattcgaggtattgcaatgccgaagccgaacgaaccccaagacgacggtcagacccgcgagcagccggccgttaccaccgacccggtgctgatcgagcgtcagcgcatcgccgacatcaacatcctgggcgagcgctacaaccagcgcgacctggccgccagcgctgtgagctctggccagtcgctcgaccagttccgcgccgtgctgctcgagcgcgccctgcctggccagccgaagccgctcgcgccgcgtaccccgaaggaaaatgagcgcgacctgccgggcttcgtgcgcgacgtttccgcggccggcctgggcatgaccgaaaaggagatggatcgcttctcgctcatgcgcgcgatgaacgcctacgccgagaaggactggtcgaaggccggcctcgagcgcgaggtcagcctggccctggccgacaccctcaagaaagaggcgcgcggcttcttcgtgccgcatgacctgctcgtgcgcggtatgtcgaagggcgaagcgggcaagggcggcgagctggtggccaccgagctgcgcgtcgaccagttcatcgacatcctgcgcaacaagaccatgatggccaagctgggcatgcgcatgctcggcggcctggtcggcgacctggatctgccgaagaaggtcaacggctccaacttctactggctgggcgagggcgacaacgtaccgccgagcgacttcgacctgaccaccatcgcgctgtcgccgaagaccatcgcgggtgcgatcccggtcacccgtaagctgcgcaagcaggcggcgaagtcggtcgaggcgctcatcatcagcgacctggtcgaaggcctgggcgttgccatcgacctggccatgctgcgcggtaccggccaggacaaccagccgctgggcctgctgaaccaagtcggcctgccgtcggtgacctacccgattggcggcatcgactgggattccgtcgtcgagatggagaccaaggcggccaccttcaacgtcgagggcagcggcctggcctacctgaccagcccggtgcagcgcggcgcggcgaagaagacccaggtcttcgcgaataccggcgagcggatctggcaaggcggcgaggtcaacggctacgccgcccacgccaccaaccagatgccggccaacgactggctctacggcgacttctcgcagctggtgtgcggcctgtggggcgtgctggatctcaagcccgacccgtatgccctggctggcagcgacggcctgatgctgcgcgtcttccaagacgtcgacgccgccgtgcgccgcaaggaagccttctgcgtcggcaagaaagctgccgcctaa

SEQ ID NO: 352848 - DNA, 516 bp, Pseudomonas aeruginosa
atggaaccgacacaactgcacgcgggcgactccgtcgcctgggagcgcgacgtgccggagtatccggcatcggccggctggtcgctgcgctatgtgctgagcgggccagaccggcacgtgatcgaggcccaggcgggcgccccgtaccgggtcgagatcgccgccgagaccaccgccagctgggcgccagggctgtatcgctgggtggccctggccatcaaggcgggccagcgtctgacggtcgacagcggcaggctggagatcggcgccaacctcgagacggccgaaccatcggacgcgcgcagccatgcccagcgcatgctcgcgctgatcgaggccgcgctcgagaagcggatcccgaaagaccagcagagctacgagatcgacggcatgcggctcgaccggatcccgatcgagcgcctcgatgcactgcgcagcaagtaccggcgcgagctgcagcgcgagaagaaccgccgctggccgaccggccgggtggtcaaattgtccatggggtag

SEQ ID NO: 352849 - DNA, 2151 bp, Pseudomonas aeruginosa; identical to SEQ ID NO: 352817

SEQ ID NO: 352850 - DNA, 573 bp, Pseudomonas aeruginosa
atgaccccaagcgaacaagacaaggccctcgaggcgcagatcctggccaaaggcctgaccgccccgcgcgtgctgcccgagcagatcgacgacctggtcaaccagctgagcttccacacctatgtgatccccggcaccaccgtgacggtggcggcggccatcgccccgggcaacatcgtggtggccctgggcaagtctggcgctgcaagcgctgcgaacttcgacgagatggtcgggcgcaatcgcgcgatctcccgtgctaaggatgcggcccgcggtcagctgtgggagctcgagggctaccgcttgaagcgcaacctgctggatctgcaggagctcggcggcctcgaccaggtgctcgaggtggcagccaacatgccgcccgagctggccgacgtatgggccgcctcggccgttccgttcgtggcgattcatcagaccgcgccctgcgcagaatgccaggggcagtgccagcccggcgccgtcgtcgtgctcgatccgaccgattcggtctgtccgtgctcgcgctgcaaagccccgaaggctgaaatcgaggctgcgccaggggtttag

SEQ ID NO: 352851 - DNA, 507 bp, Pseudomonas aeruginosa
atgaagtcgagaatcgccgccctcgcgggcctgctggtcattgccgggctgatctacctcctgggctggactcgaggcgcaagccacgagcaggcccaggcgaaggccctcgagcacgagcagctgcgccaggccttcgagcaaggccgacagctgggcacggtgcgcgaccgcgtcgtcaccgagtacgtcgaccgcgttcaagtcatcgagaagcgcggccagaccatcatcaaagaggtgcccatctatgtctccgaagctgccgaccgcgcttgccctgtccctgctggttttgtccggctgcacgacgcagtcgcggcaggattgccagcccctggatctgccggcgctgctgatgaagccgcctcgggagttgcgctctctgccgtcgccggcaccgtcgccgaaaactacaccgcctgccacgcaaacgccgagcagctgagcaagctgcaggagtacctgcgcgagcaccaggcgatcaccagcaaacagccacaatag

SEQ ID NO: 352852 - DNA, 552 bp, Pseudomonas aeruginosa
atgaagggcctgattaagcgcatggtcgccgcggtgaccctgacgcttgccgcggccggcttcacggtgaacgaaacgggcctgccggcgccggtcgagcgcgcggccatcgtcgccgccctgctggtgatgacgccggaaatggagggcacggtctacgaggcctaccccgactccggcggcgtctggacgatctgcaccggccacacgaaaggcgtcaggcgcggcgacgtggccacgcctgagcagtgcgaggcctacctgcaggccgaccttggccaggcggtggactacgtcatgcgcgcggcgccagacgccccgctgttcgccaagatcgccatggccgactttgcctacaacgtgggcataggcgcgctggcccgctcgacgctgctgcagctggccaaggccggcatgcacgaacgcgcggccgagcagttcatgcgctggatgttcgtcgccggtctcgattgccgggatccgaaaaacaattgccgcggcattccggtgcgccgggagctgcagcgctctgtctacctggtgcgcctatga

SEQ ID NO: 352853 - DNA, 243 bp, Pseudomonas aeruginosa
atggctgctgctgacgacgtcgcgctcgctggggcgctcaagatcgaggccgccaaggcggcgccgttcggcgcgtctctggtgctgtgggggctgaccctgcaggagtggacgctcgttttcggctgcctgtacgcggccggcctgttccttgatctggtggtgcgccgctggttgatcccgctcgtgcgccacatgcgcagccgccgagatccgcccgcctgccgccaggtggagccatga

SEQ ID NO: 352854 - DNA, 252 bp, Pseudomonas aeruginosa
atgaatgcgcgcgcgctgaggatcaccaactgccgcgacccgcacatgtggtacgcggccatggtcggccaggtggtgccgctggttcgcgaggaggccgactgttactggtcgcgagagcctgccggctacgtcaacatcgtgcacaaggctgacgccgagccggtcgaggtcaattgtaccaatggccagaagtgcatttgccaaagcggccttttgcgaaaatgtgcaaatggccccttgcaaaagtaa

SEQ ID NO: 352855 - DNA, 318 bp, Pseudomonas aeruginosa
atggccgccgtgctctgcatccattgccaggtggcgcccgaaaggcgtcagcaggagggtaccgggctggtcatgtggatctgtccggtgtgcaacaaccgcggcgaggcgacgccaagcgagagccgggccatggccagctggaacctggtcaacgacgaggatatgccgctgcatgcctgcataggccagggcgtggcgcgcttcttcatcagcgcaggcaagtggggtagtcgctgcccgtgctgcgacttcgtcgaccatggttatggctcgctcgagggcgccagggccggctgggcgagggctacgcgatga

SEQ ID NO: 352856 - DNA, 390 bp, Pseudomonas aeruginosa
atgtcggctttgcgccttgcgacccaggatggcgccccggtaccgaccggcgcggatctgcacgaccacttccacgcccctgcaggtgagagcaaagaggatcgcgagcgccgcctggcgcgcgaccgaaagcgcgcgcaacgcgcccgcgaggcccaggcgaagctgaaagccgaggccgtgaaggtgccgctcgagctgtatcagggcaccgtcaaggccctgcaggcggtgatcgctgccggcggcttcgaaggcccccaggcggccgaggaggccatcaccctgctgctgcatggtgccgccgctttggcggcgcgtgacagtcacgctttcgcgcagttgatcgcgcccccgtcacaccaggtcgccgccgatgctgacgcatga

SEQ ID NO: 352857 - DNA, 591 bp, Pseudomonas aeruginosa
atgcgaacggaacgcgagatcgttgtcgatcagactagccgctggttcaccaattcggagtggtcgctggaacgcttcgccagcgagcgcctggcgccggccctgtccgccgccgggctgattgaccccgtcggggatcccgaggacgtcgccgagtatctgcgcagccgcaaggcctggggcatgcgcgtcgcgcggatcttccacggcacccagcctttcccgctcgagtggaagtgggtctggctgtcctgcctgcccgaggagtaccagcgcgccgcgcgtcacgagttgctggccatggccggttgcttcgacgtgcgcctgcctgagttcgtcggcggcatggcgttggaggccacccaggcacgcctgggcgaagtaacccgcgagctcggcgacttcatcgccgcggccaccccggcacacaacggacgctacgaccgcaccgacgacccggccgccgtcgaccgcatgctgcgcgaaggcgccgaggcgatcgccgcgatggtcaacgagatgatcgccgtctcgacgggtaccggccgcccgctgccgctgctggtgctcggcaagatcgagggccgctga

SEQ ID NO: 352858 - DNA, 666 bp, Pseudomonas aeruginosa
atgcaacgcgactaccgaataggcgcagccataaggaagcggcggcaagcccttggctggggcctacaacgactgatcgacgcggccgggggcgatatgtccaccggctatctgtcgaccctagaaacgacggacgtcgccccaagcgtctacgtcgccgacaacctggcaaaagccctgggcacgtccgtggatacgctcctggccgaggcccgcgaccctgacagcatcaccccgccgggcgagccggcccagcgggtgccgctgatcgcctgggaaatggccgcagaatgggcgcgtaaccccgacgccaagcgcctgccggcgggcacctgctggatcatgccgagcgagacgccaccggggagggtgttcgccctggtcgtgcgcgacgagctcatgcaggcgccgaccggggtcagcttcccgcgcggctacaccattttcgtcgacccgatgcgcaaggcggcgcctggtgacttcatcatcgggcacctgggggatccggcctcgccggtcttcaagaagctgaccagggacggcgccatgctctacctgcgcgccctgaatccgcagtttccgatgcagcaggttggtgatactttcgaggtcgtcggggtcgtcgtaggagtgcgggcgacgttcgacaaaggagaggttctataa

SEQ ID NO: 352859 - DNA, 3885 bp, Pseudomonas aeruginosa
atgacaaacgtacaacagggcaaggggctaggggccttctacaaagagcgattcaacgccgacccatacgccctcgccgactactgtcacgacgagatcgccgccgccgcggccgacgcctacgtcgactggtcttcaatctgcaacgccatccactacaacggcgagcgactgaagaagtactcgaaggtcaagatcaaggccaccgacgccaagtacaacggcaaggtgatggcctggggcgacctcaagaccgcgcgcggtaacgccgagctcgaggccttcgactaccccttcctgaccttctcgaacaacgccagaaaccccagcacctggtcgggcttcgcggccctggccgagatctacgaacgcgagggcggcaagctcaccgactcccgtcacctcgagtggaaacagcgccaggagcagcgccgcgccgagcgcgaagcgcgcaagctcgaagacgagcgccaggcccgcgagaaggccgaacggatccacgccgagcgccttgcctatgaccgcgcctggctgactggcgagacctgcaccttcctctatgagcacggcgaccagatccgcgagggcacggtcgaagtgatcggggccgaggatggcaccgccccgtacctggtcaagaaacaggtcggcgccatcgcgtcacgcttcaaaatgcagcgtatgcgtgaccgtcacggtgtattcacagcggtgccgatgcacgacatcgacggcaacttcctgggcctgcagcgcctctatgccgacaagaaactgcagggcaccggggtgaagatggacggcgcgcattgcgtcctgggcgacctcgagaacgccaagcgccggtactcggccgagggcttcgcgaccggcgccagcatctacctggccgagctcgaggccggccgcggcgacgaggtcgccgtggtcatcgcgttcaacgtcgacaacctgctcaaggtgctgcgcgcctacgccaagcgctaccccgcctggcgcttccacaacgccgccgacaatgaccagtggaaagacggcaacgccggcctgctggccgcgctcgagatccaccgcgaccttcaccaccagggcatcgtcccgaactttgccgcccacctcgagctgctcgagtgcagcgctcaggcaatcgccgagctcagagcccagaacagggcgcccgtgatcggcttctgcgccgaggagctcgccgccttcaaggccgcgggcaaaggccccaccgactggaacgactaccactgcctgttcggcctcgaggcgactgccaaggccctgcgcgcacgcgacagcgtgttccgtgcggaaaaggactggttcgcctactgcctgcagcgcctgcagtacagcggcaagcgcctgggcgagaagaacgccatggccgcggtggcggccggcatgatgctctccccgatcaagtacagctacgaccaggtcgtgcaggcgatcctcaaggcactgccggcagccgtcgacagcaccagccgcttcaagatccgcagccgcgcccactggctggccaagcaaaagctgcagcaggcgcgccagctgcgcggcttctccaccgcagcgctggccaagccaaacgtgcagcacctcagcatcgagggcgtgcgagccgcgcacggtggcatcgagctgccggcgcacatggccgccctggtcgaatcgctcgagggcgtcatcatcgtgcgcgcgccgatgggctcggggaaaaccgagaagctgatcgcgccgctgatgcaggcctccagccgtgccgcctacgttgcgcaccggatctcgctcctcgatgacgctgccgcccgcctgggcgtcgagcactacaaacaggtctttgcctggcagatgcagcacgtctcgcacctggcctgctgcgtcaacagcctgaccaagcccatgttctacaacgccgaggagcgcagctggtttaccaccctcgagacgctgtgcatcgacgaggccagccaggtgctgcgccacaccaccaccggcccggtcgagggtcgggtcaaggtcatggatgcgctgatcgacgccgtcggcgccgccaagcgcgtgctgctctgcgacgccgacgccaacgacagcctgatcgagttctgcgagctcgcccgcccaggcgagacgatcaccatcctcgaggtcggcggatccgccgagcacatccgcatcgaccacgccgaggacgaggccgtctggcagctggcgatcgacaacgtgaaggccggcaagcgcgtgctggtcgccaacgactcggccgagtcggccaagaaaatggccgccctgatcgaagccatggtcgaggagggcgagatcaagcccgtgcgcatgctcctggtgcatgccgacagcaaggccgaccaggaagtcgaggccttcctctgcaaccccaacgccgaggcgatcaagtacgacgtgctgatctactcgcccgcgatctcctcgggcgtgtcgatgaccaccccgcacttcgacgcccacttcggcctgttcagcggtaacacggtcggcccgtccgacgccgtgcagatgctgcgccgcgaccgcaccgcccgccactacgtgatcggcatcggccacaccagcgcccaacgcgaaaccgaccgggagaagatctggcgcggccacatgaaggccgacgaggttgcctgcgagttcgaggagaccagcgaggagatcatcctgcgccgtcgcaagaccgcgttcgaccacctctacctggccaccgtcaccgccgagaacgcggcccggaacaacttcgccaacaacctgctgctgatgctctacgccgacggctacaacgtgcagcgcctcgacatcgccggcctgggctacgacgaggaggccctcaccaaggaatcgcgcagcaaccgcaaggtggccggcgcgatcgtgttcgacaagcgcatggatctgatcgagagcgtgcagacgcccgacgaggagcagttcctcaagctcagccggcaggaggtgcgcagcgaggccgagagcgcccagctcgaccgctaccacatcgagcaccagctcggcgtcgacgagatcaccgccgacgacgtggccttctacgatgaccgcggcatttccaaggtggtggccatggagctgctgcaggccgacgaggagcaggccaggaactacgacaaggcgcagcgcaaggcgaaggtaaccctcaccctgcaccgctggaaaacgcccgcgcacgcgctcctggggcgcgtcttcgagatcctcggcgtcgatcgcttcacgggcgagggcgagttcacctcagagcaatgccgccaggtgctcgagtacctcaccaccagcgccgaccaggtcgagctctacaacgccctcaagctggggcgctacatccccagcaccagcgcgcgcatgtgcgccactaccctggtcaagtcgattttcgagcgcctcggcctcgctatcacaaagcgcaagacgaacggtgtgcacttgttctcagtaaacccggacaattggcagttcatcatggcctattgccagcgacgcgcagcgaagaacgtccactcgctgaccacccacgagcacgacgcggcccaccagcccaagctcgcgccagagccccaggcagacgcccaggccacgcctggcgcggcttccagcgacagggatactttgcagtgtgatggtgtaagcgagagtggaaagtatcccttgagcgtgcgggagaggatcttcgccgttgcttctcgcttcgccgcacccgccggtatctcgctgacgcgactcgtgggggcgctgacgccggaggtggcgggcagcctggccaagccgggagcggagcagagcagaacgctagggttcacccttgcgtatgcggccaagctgctgcgatcctag

SEQ ID NO: 352860 - DNA, 264 bp, Pseudomonas aeruginosa
ttgcaatgccgtgaaaagatggacagagcgtccgccaaactcagccgcgccaggtcggcgctaacgctggccatgaaggccggccccgaggcaaccaagggcgagctgctggacgcagtcctagccgccctcgagcacattgatgccgccgacgcggccctgggagatgaggaaacgcgagcaggtcggccggggcatatagccccggcgaccgaggcaggtcacccgcggctagtcgtcgccgccacctgcagcgcctcgtaa

SEQ ID NO: 352861 - DNA, 1674 bp, Pseudomonas aeruginosa
atggcgaagaaagcgacaactaagaaggcggtcgatcaggtgacggaatcggccaagggtgaggaagcgatcgaccatcgcgagcgggtcagcttcggcaactacggcggggccacccggcagaaggtcgagctgcagccgttgatcgacaagctgctcgaggacgtgaaggcgatcgacagcgacgacagcctgagccgcggcgacaagaccaagcgcctggcgcgcctggccgatcgcctgaaaaacaagctgtacgaggatcgccgccgcaaggaagcggacaagctcaaggcctcgagctaccgccgctacctgaccaccgtgcgcaaggcgatcaccgcgcagaactggcgccaccactccatcgaggagagcgcccagcgcctggccaagcatcacccgcgctatgccgagcagctgctggccatggccgacctggtcgacatcaccgagctgcgcctggcccatcgcgacctgctggcgcagatccgccaggatcgcgacgacgacgcctacgaggcggtcaagggcatgaagctcgaccacgagatcatgcgccacctgaccctgccggcagcaaccaaggcccagctggccaccgacgcagtcgagacgctcgagcaccgcgccaccaacaccatctcgatcaactaccactggctggtcgagaccatccgcgagctgctggccgcgaccgagatccgcgccgatggcaccgcggtgcccttcttctcctacctggccctggggctggcgctggcgaccgggcggcgcgaggtggagatcctcaagctggcgcgcttcgagaaggtcggcgagttcgagctcgagttctcgggccaggccaagcgccggggcggggtggactacggcgacagctaccggatctacaccctcctgcaggccgacgtcgtgctcgaggccttcgccaagctgcgcgccatgcccgaggtgctcgagctgcagcacctggacaacaccgaggtgaaccgccgggtggccaagaccctaaacacccaggccaagcgcgtattcggcaaccaggagcgggtcttcaaggatagccgcgccatctgggcgcgggtggtcttcgagctgcacttcacccgcgacgcccgctgggcgaaggtcaacgagaccgtgttctggcgcgagatgctgggccacgaggatatggacacccaggagagctacaaggccttcaagatcgactacaccccgccggcgaagccggcggcgccggccagcaaatacggcagccgcctcgaggcgctcgaggccctggacgagcacgagcagatcgccggccgcgaggcgatgcagaagatccaccgctgggtgaaagagaccgtgaaggcggcgcccgaggcgcggatctcgcagaaggcgatcgcgaccaatgtcggcagctaccgcccggtcatcaaggagtatctcgagctggcggccgaggcgcttgccagtccggcgcgacctgtcgaggagatcgccccggctgtaccggctgaggtggtgaaggctaagccgcggatctcggtcagcgaggtatccagcggcaagtgggtggcggtggcccgcgtgaatggcgtcgaggtggcgcgcggtgagggggccgaccgggctgcagcttacgaggcgctgcaggtggcggcgacgactagccgcgggtga

SEQ ID NO: 352862 - DNA, 2829 bp, Pseudomonas aeruginosa
atgagccagacccgctacggcatccgccgcttcgccctgctcaataccgccggctacagcctgggtatcttcccgctggaaaacccgctgtcgatctacggcgccaacaacctgggcaagagcgcctcgatcaacgccctgcagttcccgatccttgcccgcctgtcggacatgagcttcggcaagtacagcatggagcagtcgcggcgcttctacttcgcctcggacaccagctacatcctcctcgaactgatgctgccccacggtccgcacgtgatcggcgtggccgggcgcggcccgggcggcggcttcggccaccagttcttcgcctacgccggcgagctgagcctggaccactaccagaagaacggtacctgcctgcgccagcgcgagctgttcgccaaccttgagcgcgaaggcttcaaggcctacgaggtgaagccggaagagctgcgccgcctgctggtcggcgggcacacgtcgatcccgctcgacctgaccatgatcccgctgcgctccaccagcgagcagagcctgaagaccttccgctcgctgttcatcaacctgctgcacatgcgcgagatcaccgcggccaagctcaagcagctgttcctcgacgccttcgagcacagcctgcgctcgggtaatgtcgactacatcgccgcctgcgaggaggccttccgcgacgtgcggcggatggagcaggactaccaggcgctggtcgccgccggcccgctggtggaagccctggccaacggcgtgacccagcgcgacgtactgcgcggcaagatgcaccgcctttcgccgctgctcgacagcctgctcggcacctggcacgactacgccggggcgcgccgcgaggaactgctgatccagcacgagcaataccgcgccgagcaggacggcctgcagaacgaacagcgcggcggcacccaggagctgatgcgcctggagcgcgaaatcgccggcatccagcgctggctcggcgagctgtcggtactcaagacccgcttcgccctggtcgacgacgccaaggtcctcgaacagcagttgctcgccgccaaggatgcccacgacgaactggccggcgccctggcccattcgcggcagttctccagcgaagacctggaagagcgcctgcgcgacctggaaaaacgcctgaagaacgtccgccagcagctcgaacacgccgacaacaacagctacgcacgcctgcgcgaggagttcagccagcaggacgtggaacgcctgatgcgtctgttcaacggcgcgctgttcagcctgccgctcggcgagaacggggtgaacctggatgacggcgacgtctgggtgaagagcgtcgaagccatcctcgaccacttcaagggcgagcatttcgaagcccctggcctgagcatcgacctgtcgcacatcgaaccgccggcgttgcaggccctggccgaccgcgccgccctgcgcgaccagaaggagcgcctggagaaggagctgaagcagctcaagacccagcagagcgtcgccgccgaccgcgccgcgagcaaggcccaggcagagaagctgtaccaggacgtgctggatgcgcagaaggccctggaagacttccgccgcacccagacgctgaccgccgaggagcccgagaagctcgccgaactggcccagctggaggcgtcccaggacgaactcaagcgctccagcgacgccttcgccgagcgcgtccagcaactctccgcgcgcctgcaactggtggcccggcaactgggcgacctggaggccaaggagcgcaccctggaagatgccctgcgccgccgccagctactgccggccgacctgcccttcggcacgccgttcatggagccggtggacgactcgctggacaacctgctgccgctgctcaacgactaccaggacacctggcaggcgctgcagcgcatcgacgggcagatcgaggcgctgtacgcccaggtgcgcctgaagggcgtcgccaagttcgatagcgaagacgacaccgagcgccgcctgaagctgttgatcaacgcctacgcgcatcgccaggacgaggccctgacgctggccaaggcgcgccgcgcggcggtcaccgacatcgcccggaccctgcgcaacatccgcagcgactacgacaacctggaacaccagttggccctgttcaaccgcgagatcaacaagcgccaggtttccaacctgcagagcttccgcatcgtcctcgcgccgaacaaggatgcgctcaagcacatcgaccagatcatccacagcgccggccagtacgaggaaggcgagaacctctcggtgttcgacctgacccagagcgccgagcaggacgcgaagaacgaggaggccaaggaatacctggcccgcctggtcgccgccaaccacaaccagctgggcctgaaggacctgttcgaactggccttcgagatcaccaaggtcaacggccagccgatcatgcacaccgacatcgacggcgccgcctccaacggcaccaccatgaccatcaaggcgctgaccaacatgtacctgttgctgcacctgatggaccgcgagcaggccgggcgcgtgcgcctgccctactacctggacgaggcggcggacatcgacgagcgcaaccaggccgcgctgctggagaccagcctgcaactgggcttcgtgccgatcctggcgagcgtgaagccgcaggtttccgcacacgtggcgatcgacctggaaggcggtagcggcccgaacggcatctatatcgacgaagccgactggaaatacatccgtctccgggatgccgccgccagcggcgaaacccgcgtagccagcgaaccggcgtga

SEQ ID NO: 352863 - DNA, 414 bp, Pseudomonas aeruginosa
atggaccggatagacatgggcgtgctggtggtactgttcaatcctggcgacgacgacctggaacaccttggcgaactggcggcggcgtttccgcaactgcgcttccttgccgtcgacaactcaccgcacagcgatccgcagcgcaatgcccggctgcgcgggcaaggcatcgccgtgctgcaccacggcaaccggcagggcatcgccggcgccttcaaccaggggctcgacgcgctgttccggcgtggcgtgcagggtgtgctgctgctcgaccaggactcccgtcccggcggcgccttcctcgccgcccagtggcgcaacctgcaggcgcgcaacggtcaggcctgcctgctcggcccacggatcttcgaccggggtgaccggcgcttcctgccggccatccatctcgtgtag

SEQ ID NO: 352864 - DNA, 369 bp, Pseudomonas aeruginosa
gtgatctcgtcccgcgttgtctcggtcgcgctgggctgcctgctgctggtcggcctcggcgtcgccggcggtgtctggctcggcgcccggcactaccgaccgcagctcgatgctgcgctggcggatctgctcgcctgccgtgccgctcgtggaagccttgaggctgcagtagcggagcagggccggcaggtcgccgcgctgcgccatgccggcgagcagcgcgcccaggatgccgtgcaggcggtggagcaagcccggaggcgcgccgacggcgactatgccgctgcacagcgcctgctgagccagcgcaccgctggcgagcagtgctcgaccgctgaggcggtgatcgatcaggagttggggctatga

SEQ ID NO: 352865 - DNA, 384 bp, Pseudomonas aeruginosa
atgagccagaagacccaacaagacagcatgcccatcgccgaggcggtcgaccttccagagatcagcgtggagcactccaccgagtttctgaccggttctgcaccgtgcgccggcgtatcccggccactgcccgccgcctggctcgggcagcgcggcatctaccgctccagactcgaagccgtctgcaacggcgagcagttggtggacccgctgacgctgggggagttgatccagcacgcctggcgctacctctacctgacccgtcgcgccggcctggggctaaagccagctcgacagccgctgaccagcaccaccaagacgccggaagccaccgacgccgcagttgatcagatgattgcagaagaacaaggagcaagggcatga

SEQ ID NO: 352866 - DNA, 405 bp, Pseudomonas aeruginosa
atgaccgcttttcgcgaaatcacgcttgcgcaggccagggcggaggagctggagcgcaccctacaggccaaggtcaaggctgccgaccatggttcatcgcatattaccgtcatgcacgccatcgagaaggcgcacgaaactctcgcaggaaccgccccggtcgcccaggctgggcaggtgcgggatggctacagcctgaacttcatactcagcaaacatcgtcaggtgatcgtcgaggtactgccaggcaactggaaggacatctacgtcgagcaaggatgcatgggcgaggtgaaatacccagctgccactgtgtgtggcgatatcagtacagagaaagtgctggaagtgaagcgtcgcgccatcgacctagctatgcagagaggtgacgccaatggcagttga

SEQ ID NO: 352867 - DNA, 375 bp, Pseudomonas aeruginosa; identical to SEQ ID NO: 342619

SEQ ID NO: 352868 - DNA, 219 bp, Pseudomonas aeruginosa; identical to SEQ ID NO: 337024

SEQ ID NO: 352869 - DNA, 624 bp, Pseudomonas aeruginosa
atggctgaacaagcagtgcatgttcccgccgggtaccgcatggacgccaaggggcgcctggtacctgaagaaatgatcaagcccatcgacctggagcgcgaccgccttgtgcaggagatcgttgccaaggggaaggctctgaacaaggcgttgctggatttcaaactggcgacattcggcgatatcgaggccttcatcactttgtcggccgagcagtaccaagcgaaggtaggaggcaagaagggcaatgcctctctggtcagcttcgacggtcgctacaaggtcattcgggccatggcagacaacatcgccttcgacgagcgcctgcaggccgccaaggcgctgatcgacgagtgcctccatgagtggacggaaggtgctcgcgcggaggtcatcacactgatcaacgatgcgttccgcgtggaccaagctgggaacatccgtaccggcagcgtgcttgccctgcgccgcctgcagatcgatgacgaacgttggcagcgtgcaatgcaggccatcggcgaggctgtccaggtcgtgagcaccaaggcgtacgtgcgtatccaggagcgggtcggggacaccgaccagtaccgctccattcctcttgatatcgcgggggtgtga

SEQ ID NO: 352870 - DNA, 288 bp, Pseudomonas aeruginosa
atggccaaagaaggctcggtagccccaaaggaacgcatcaacgtcaccttcaagcccgccactggcggtgcccaggaagaaatcgaactgccgttgaagctactggcgatcggcgattacacccagcgcacggatgagcgcaaggtggaggaccgcaagccgatcggcatcgacaagatgaccttcgacgaggtcctggccaagcaggagctggggctgacgctgagcgtacccaatcgtctccaggaggagggcggcagggacgagctggcggtggggctgctgtag

SEQ ID NO: 352871 - DNA, 303 bp, Pseudomonas aeruginosa
atgactagcaactactccgatttcatcagccaggaccgccgcctggtgatcctgcgcatccttgcggaaatgccgacctaccaggccaatagctcggtactgcacgccgtcctcagccagtgggggcatgaccccagtcgcgaccaggtgaagggcgagttgcgctggctggaggagcagcaactggtgaagatcgaggacgtcagcaacggcgcagtgctggttgcgaagctgaccgagcgcggcgccgacgtggccgccggccgcgcccgagtggacggcgtgaagcgtccgggagcctga

SEQ ID NO: 352872 - DNA, 321 bp, Pseudomonas aeruginosa; identical to SEQ ID NO: 324255

SEQ ID NO: 352873 - DNA, 624 bp, Pseudomonas aeruginosa
atgggcatccttagtctcctgcgctccaactggttctggaccgcgctgattgcggtgctgtacagcgtagctgtagtgatccacggctccgcaagctacgaccgtgggtacgccaccgctcgtgctgaaggtgacgcagcgctgctcaacctgcaactgcagcattccaacgagctggccaagatcgctgaggacaacctcctgcagttccaacagcaggtcactcgcgcgaatcaggcggaagcgcgattcctgtcagcccaggatcagttcactgccctccagcaacagctatcggagcgtatcgcccatgtctcgactcaataccggccggcaccaggtgcttcccctgtgcctgctcctcgcttcgttgtcacttgcggctggctgcgggactacaaccacgccctcggcgccgatctgccctcgccagcagcctgcagaactgccgccagccctcaagaaacggcctggcccgcctccggcgctgacgccgaactactggaaagcggtgtcagcgcggctgacatcctggcccatgcccgcgattacgggaaatggtctctcaccaacctggcgcaactgaatgcgctgctcgatgtaaacgacaaggaaactcactga

SEQ ID NO: 352874 - DNA, 630 bp, Pseudomonas aeruginosa
atgaagcgcctgctcaccctcggcctgctgggcctgctgagcgcctgccagccggccttcgcgacggatcgcatccccactgccgccgagcaataccggcgcaccctggtgcgcagcgcccatgctgaatggggcctgtcggcaccgatcgccacctttgccgcacaggttcaccaagaaagccgttggcgtgctgatgcccgctcgcctgttggtgcccagggtctggcgcagttcatgcccggaaccgcggagtggatcgccggcctgtatccggccgccctcggcaccaatcagccgttcaatcctggctgggcactgcgcgcgctggtcacctacgaccgttggctctacgaccgaaaccaggcctccagcgagtgtgatcgctgggcattcgtactgtccgcttacaacggcggccaggggtgggtaaatcgcgaccgtaggctggcctcggcatccggcgccgacccgctggcctggttcgattccgtcgagcgcttcaacgccgggcgctcggccgccaacttccgcgagaaccgcaactacccgcgcctcatcctgcttcgctatgagcggatctacctgcagtggggcgacggcgtgtgcggagagaggtacaccctgtga

SEQ ID NO: 352875 - DNA, 159 bp, Pseudomonas aeruginosa
atgggcgccccacaaatcatctggatcgtgctggccgctgtggtcctggttacgtcctatgcgtgcgatggcctcaccaacgtgatcagcttcaagcagcgcgtgttcgacgtgatcgcgatgacggccctggtgtggtggggaggcttcttcggatga

SEQ ID NO: 352876 - DNA, 669 bp, Pseudomonas aeruginosa
gtgctgcccggttccgcagtgccgctgaggctgctgccattgctcaggttgacggtcggcgtggccggcgcgatggcgtccacggtagtgctgccctggccgccggtattgccggccgggtcggtagcggtggcgttgaccacggttccatccgccagcggcgtggacggggtgaagctccagttgccgctgccgtcggcggtgacctgcccgatcggattgccgctgccatcggtcagggtcacggtggcgcccggttcggcggtgccgctgatctccgcgccgttgctcggattgaccaccggcgcggccggcgccaccgagtccacggtggtgctggccggagcgctggtattgccggtcgggtcgctggccgtggcgttgaccacggtgccgttggccagcggcgtgcccggtgtgaagctccagttgccgctgccgtcggcggtgacctggccaatcgggttgccgttgccgtcggtcagggtcacggtagcgcccggctcggcggtgccgctgagcgtagtgccgttgctcgggttgaccaccggagccgccggggcctgcgagtccacggtgacgctggcgcccgggctgctattgccggcggcgtcctgggccaccacgttgaccacggtgccgttggcgatcggcgtggacggggtgtag

SEQ ID NO: 352877 - DNA, 258 bp, Pseudomonas aeruginosa
atgaccagctggacgctggtcaccctcgtcctgctgatcatcctcgccgcgattcgcccggagcagctccaggtcgtcgcctacaaacttgtcctagtgaccctgggcgcggtggccggttactggatcgaccgcagcctgttcccgtacgtggcccgcccgcacgaatgctcggccaacctggtcgtcgtaggtgcctggctgcgccgtgggctgatcgtgctggcctgcatcctcggcctgacgctgggactctga

SEQ ID NO: 352878 - DNA, 327 bp, Pseudomonas aeruginosa
atgagccaaactactctcgcaagcctgcagaccaccgcagttgcagccaaaccgaacgacgcccccatgtcgctgctgaccggcgccggcttcgaccagatccagcgcgtcgccaaggcgctcagcgcgtctaccctggtgccggtgcagtaccgcgccttcgccgaggtgaaagagtacggcaaggtcaccggctacaccccgaacggcgccgggctgccgaactgcatcgtcgctctgaacatggcgcagcgtatgggcgccgatccgctgatggtgatgcagaacctgtacgtgatcgagggccggccgagctggtccagctag

SEQ ID NO: 352879 - DNA, 243 bp, Pseudomonas aeruginosa; identical to SEQ ID NO: 345946

SEQ ID NO: 352880 - DNA, 699 bp, Pseudomonas aeruginosa; identical to SEQ ID NO: 345553

SEQ ID NO: 352881 - DNA, 1704 bp, Pseudomonas aeruginosa; identical to SEQ ID NO: 349718

SEQ ID NO: 352882 - DNA, 201 bp, Pseudomonas aeruginosa; identical to SEQ ID NO: 345933

SEQ ID NO: 352883 - DNA, 690 bp, Pseudomonas aeruginosa; identical to SEQ ID NO: 345935

SEQ ID NO: 352884 - DNA, 630 bp, Pseudomonas aeruginosa; identical to SEQ ID NO: 345937

SEQ ID NO: 352885 - DNA, 450 bp, Pseudomonas aeruginosa; identical to SEQ ID NO: 345938

SEQ ID NO: 352886 - DNA, 171 bp, Pseudomonas aeruginosa; identical to SEQ ID NO: 320798

SEQ ID NO: 352887 - DNA, 1308 bp, Pseudomonas aeruginosa; identical to SEQ ID NO: 345940

SEQ ID NO: 352888 - DNA, 1059 bp, Pseudomonas aeruginosa; identical to SEQ ID NO: 320435

SEQ ID NO: 352889 - DNA, 4254 bp, Pseudomonas aeruginosa; identical to SEQ ID NO: 345941

SEQ ID NO: 352890 - DNA, 1344 bp, Pseudomonas aeruginosa; identical to SEQ ID NO: 326418

SEQ ID NO: 352891 - DNA, 258 bp, Pseudomonas aeruginosa
atgaaggcgtcccagacctatcagtgcatcgtcaagttcgatggtgccggcttctggaccaataccattaagaagcagcgtgcgacctgcacctggagcgacaaggtggcagcctcccgccttgacgaacggctgtttggcgaggacaacgcctacatcacccgtatgccggcacaggcaggcgaccacgaaaagcgcgtcgagagccgctgggagctgtcctgtggcaatcccaaggaggtagcgtgcgatggctga

SEQ ID NO: 352892 - DNA, 477 bp, Pseudomonas aeruginosa
atggggaccatcaaggaatggatcgtcggcgcggtgttggccctgctcgcctcggcgctgctggtcagcatgggctacctcgccgggcgcgcgtccatgctgcgcgagtacggcgagctggcaggccaggtgcgtcagcagcgcgaacaggcggacgccaagctggccgagctgaccgcgcagcgcgacatgaaacaggcagcgctcaataaggctgctgccgaccaagagaggaaggacaacgatgctcaggctgaaatcgctcgccttgctggtgagctgcgcgaccgccctgtgcgcgtgcgcatcgtccccgccgcaggtgggggctgtagtggtggcgccgcctcggcctacgggctactaccggaagaaaattctcgacgctttaacgactccctgagcgaagtcgaaaccctgagcgcggcctacaactcgtgtcgcgcccggttgatcccccaagagccgaccctgtag

SEQ ID NO: 352893 - DNA, 642 bp, Pseudomonas aeruginosa; identical to SEQ ID NO: 324348

SEQ ID NO: 352894 - DNA, 690 bp, Pseudomonas aeruginosa
atgaagggcgcaacgttgcacaggctgatcgatatctacgccgacagtcgccgtaacctgcgcgtccgtttggcggccctccggatgttcgtccgcgcggtgtgcgccgatcgcaacaccagcttcgccgagtatcgccagatgtgtcggaggctcctcaagggcatgccgttcaccgagcaggcgcttgagcgcgagcgagcggcatatctggatcgcaccagagctgcgagacaagccatggaggagagcggtgcctggcttatcggaaactcagccatgatcgagcaggccctgtcgttcgacgacctgtgcgatctcctgggggtgaatcatgcccaccgtgccgaggccgccgaggtctgcgcgggcgacgccggagtcgttggcggcctgctctggattggtggggagttcgaggacagcgcagaccacaagagtggccgctccaaccgagggaacacggggccccttaccgcagcggtccagaacctgtttcagaagttcttgcttgaaaacccgtcggccatccctgacccgttcgccccgggcgggcccttttacggagtcccgcgtcaggaaatggcgccgaacggcactgtgcagattcggcggcccgcactcaccgtccacagccaggacggatcgatccgcacggttgagcgaaagccggaggtgattggtgagtag

SEQ ID NO: 352895 - DNA, 300 bp, Pseudomonas aeruginosa; identical to SEQ ID NO: 340936

SEQ ID NO: 352896 - DNA, 882 bp, Pseudomonas aeruginosa; identical to SEQ ID NO: 338800

SEQ ID NO: 352897 - DNA, 309 bp, Pseudomonas aeruginosa
atgagcgcctcaatcaccatgctccgccagggtattcgggcagagcgcgacctgacctcgcacctctggacgatcctcaacgaaatgcggttgcaaaggcagcttcccgagtgggccgagcgcgccatcgatggcaccacgcagcagtcagacgaaatcagcgcacatcgcaagcaggtcgacagcatcctgttcgagttggtccctgggctccgcgaggatgtcgaaaggactgatcgcgagagctacctcgaatggaaagcccgtgagcgcgaggtgaaggatgcgctgggaggtgatcatgtctga

SEQ ID NO: 352898 - DNA, 1077 bp, Pseudomonas aeruginosa; identical to SEQ ID NO: 328685

SEQ ID NO: 352899 - DNA, 267 bp, Pseudomonas aeruginosa; identical to SEQ ID NO: 340946

SEQ ID NO: 352900 - DNA, 357 bp, Pseudomonas aeruginosa; identical to SEQ ID NO: 338828

SEQ ID NO: 352901 - DNA, 2463 bp, Pseudomonas aeruginosa
gtgccgctccacctcatccgccagatgttgcgcgctccactgtccggcgtcgccgagcaggacccgggctcctgccagcaggggtacgaagagttgttcggcagcggcatcgaaactgatcgaggcgaactgcaattggcagtcgccagggccgacgccgtaggtccgtgctgccgcctggcagtgcgcgacgagcgccgcctggctgaccgccactccttttggctggccggtcgagccggacgtatagatcacgtaggccagcgtctcgccagctacctccggcagcggccgcgtatctgcactcgccggccaggcggcggtctccagcggcagccgctcgacctctgccgggcagggcagccgctccgccagggtttcctggcagatcagccagcgcgcgccgctgtcgcgcaacatgtacgccaggcgctccgcggggtagttcggatccagcggcaggtagccggcaccggccttgaggatacccagcaggccgacgaccaggtcgaaggagcgctcggcagcgatcgccaccagcgcttccgcggccacgccgcgcgcccgcaggccacgcgccagacgctcggcgcgcatatccagttcggcatagctgagatgctcgtcgccacataccagcgcgatcgcctcaggcgccgacgctgcctgatgcgcgaaggccgccgcgacgccgccccgcggcagcgcctcgagcggtgcctgccaatcccgcagcgcctcctggcgttccccggcgtcgagcagggccagctcgcccagcgctgcctggggggtctcggccatccgctgcagcagatgcagcagatgacggtccagttcggcgatgtccgctgcgtcgaaatcgcgccgcgcatagacgtactgcaggctcaggcgctcacccagggtgacacccagcgtcagggggtagttggtctgctcgtggttgcttggcgtggagaactccagatcggcgggagcctggcgcagagcctcggccacggggaagttctcgaacaccaggatgctatcgaacagagcctcgccgccatgcccggcccagcgctggatgtcgtacagaggcgtatgctcgtgttcgcgcagcgccaggttgagcgcctgcatcccctgcaggtagtccgcgacgctctgctgtggctgcggcgcggtgatcaccggcagggtattgataaacagaccgatctgcgcctcgatgcctggcagttccgccggccgtccggccacggtggcgccgaaggctaccgtctcctgcccgcagtgccgctgcaggagcagcgcccaggccgcttgcaccaaggtgttgagcgtgaccttctgaccttgggcgaaggacgccagttggcgggtcgtctgcggatccagttcgcgcagatgctcaccctggccaggctgctccgtcctcgtctggcgcgccaggcgtgtcggcatctccagggaggccagccgatcgcgccagaaggactcggtcgccttcgcatcgcggctctgcaaccaaccgatgtagtcgcggtaacgcccaacgggagcggctacctcctgccccgcatagcgctgcagtacctcggcgagcagttgggcgttgctccagccatccatcaggatgtggtgataggtatagatgaggtgcatccgcccattcgccagcggcaccaacaccaagcgttgcaacggcgccctggccgggtcgaaaccggcttcgcgctcagcctctgcctgccgttgcggatcactgcctggcggggccagccgcagctccagcgtcgcctgctcgaataccacctgcaacggctgaggccagccgtccttccagaggaatccgctgcgcaggatctcatgggcatcgagggtggcctgccaggctgcgcggaagcgatccgggtccaatccgccgatatccatgcgcaactggttgacatagtcgccttccgttccatgaagactgtgaaacagcatgccctgctgcatcggcgacaacggatagatgtcccgcaccgaatcaggatccaaggacaattcatcgagctgcgtctgggaaagcccggccagcgggaagtccgacggcgtcacaccccgatgccgcgggtcgagacaatgctcgatcagcgcgtgcagctcccgcgcgtagtcatcgaccaggcgctggacggtcgcctcggcgaacatttcccggctgaagctccagtgcaggctcagctcgccaccgtagacctggccttcgatgctcaaccagttggccagcggggcgcacggatcctgggcggcgccggcgctttccgtggccggtaccagcagcgccgccccatcgaactgacggtcgaaccggcccaggtaattgaaggtgatccgcggctgcggcagcgcggccaggcgggccgcagcctcctctccagccaggtagcgcagcaggccgtagccgacgcccttgtccggcacgcagcgtag

SEQ ID NO: 352902 - DNA, 606 bp, Pseudomonas aeruginosa
  misc_feature (534)..(543): n is a, c, g, or t
atgcttcgcatggttatctttttcttggttgtcattatctgctcgataaatctgtatgtagaatacaggaattatgtgatttcgtcatctgatggttatctgtccctatattcttttcagggcgaggcttatgccggtggtaagttttttaaaagcctcttctatattgcacttggtttgagctactcattttgtctagagcgtgagaagaaaataataatactctcgttgtttgtcatggggcttttgtctttgctcgcaggacagcgaggagggtttgttatttctctattcatgctgctctgggcatatggaataaaccataaggtcagttggtttggcgtactggctgccttttctttgttttttctcagcctggttttgtttggctctttaagtgcaaggagtttggccgttaatttagatagtggttggttagggtttgtctccaagtttctatatgatcaggggatatccttgatggtctttgatgtttctactaaggtttctgactatcctctggtggctacgatnnnnnnnnnnattttgtccctggtgcgtctaggcttgcatcaatcttctatgacttgcgcatgcaagacgtga

SEQ ID NO: 352903 - DNA, 396 bp, Pseudomonas aeruginosa
gtgcgggcccgcctgcgcgccgtcgaggcgcagtccgacgccgcgctggcgcgctaccagcgctccctgctgctggcccaggaggacgtcggcaacgcgctcaaccaactggccgaacaccagcgtcggctggtcgccctgttccagtccgcgacccatggcgcgaacgccctggagatcgccaacgaacgctaccgcgccggcgccggcagctacctggcggtgctggagaaccagcgcgcgctgtaccagatccgcgaggaactggcgcaggcggagaccgcctcgttcgtcaacgtcatcgccctctacaaggcgctcggctggggcagcggcgacctggcgccgggcgccggccaactggccgccggcgaaaccgccggggccagccgttga

SEQ ID NO: 352904 - DNA, 285 bp, Pseudomonas aeruginosa
atgagcttccctaaatgcaaaagctgcggcaaaaagaccaataagcactatgagccaccactcttgaagcatctcggaaagattgatgaccatttgagtaaaggccggcaactcggcaccaaaatttgcaaatacggactggaactgtgggaccacttttatcagaaggatcgccgataccacaagggccactacaattactgcaatgggataagtcatggcttttttaattttggctttcagggattctgtcttttctttataagttgctacccgatccaataa

SEQ ID NO: 352905 - DNA, 249 bp, Pseudomonas aeruginosa
  misc_feature (214)..(223): n is a, c, g, or t
atggcatatgatttttggattacgggtgtgaacaagggtgataagcacattgactacgtgcgagttcagcgaaaaaaggtaactgccaatctgggccctgcccgcattgtggatcgcgggtttgttgctgatctgattaggggtgggaaagcgacgttttgcacctctgtaaaaaactcagagggaaaatggcaggagggtgcgcgcgtgcatnnnnnnnnnnatctcggcaacctccaagagttttga

SEQ ID NO: 352906 - DNA, 717 bp, Pseudomonas aeruginosa
  misc_feature (641)..(650): n is a, c, g, or t
atgagagtctttcttactggtataacgggctttgttgggcttgctacttcaaagcgtctactgcaagaggggcattgtgtgcgagcggcagtgcgtgatgccaatccagcgcttgcgcaagaagttgagcaggttgtttttgggaatttggtaaagcacgactgggcttcttcgcttgaggggcaagaggtagtgatacactgtgctgctcgtgttcatgtgatgaaggatgcatcccgcgaccctttgagtgagtttcgacgggtcaatgttgagggtaccctaaatctagcgcgccaggcggcgaaagctggcgtcaagaggtttgttttcattagctcaataaaggtcaatggtgaaagtactagactgggtgttccttataccgctgatgatattgccatgccgcttgatccatatggcgtttccaaacttgaggctgaacagaagctgctctctctagccgctcgggttgacatggaagtgagcataatacggccggttttggtatatgggccaggtgtaaaggcgaattttttgagcatgatggaatggctgaaaaaaggaatgccattgcctcttggcgctattgataataagcgtagtctggttgcgttggacaatctggttgatcttattcnnnnnnnnnnatcttattctcacttgtatgaaacatccggctgccgcaaatcagatatttctcgtcagcgacgatga

SEQ ID NO: 352907 - DNA, 798 bp, Pseudomonas aeruginosa
atgacgatgaacggacagcctgcggaactgcaccgcccgattcccaccctcgcccgcctgccacggccggtctacgcgcgcgccgaaagcctgcgcgccggctcctggacctcgcgccaccggcacgcctgggtgcagctttcctacgccatcagcggcgtgctcggcgtgcataccgccgagggcagcttcttcgccccgccgcagcgggcgatctggattccggcgcaactggaacacgaggtggtcacctccacccgcgccgagatgcgcagcctgtacatccgtggcgacgcctgcgcctgggcgccgacgcgttgccgggtgctggaggtgacgccgctggcgcgcgagctgatcaagagtttctgcgagttgccggtggactacccggagggcgacagcgccgaatcgcggctggtacaggtgctgctggaccagttgcggctgctgccggaggtcgccttctccctgccgatgccgcgcgagccgcgcctgctgcggctgtgccaggcactgatcgacgaaccgacccagagcctgaccatgggcgactgggcgcagcgcctgggcacctcggaaaagaccctgtcgcgcctgttccagcgcgagaccgggatgaactaccggctctggcgccaacgccagcgcctgctcgcctcgctcaacgcgctggaagccggcgacagcgtcaccggcgccgccctggacagcggctacgactcgacctcggcctacatcgccgccttcaagggactcttcggcttcactcccggcgaactgttccgccagcgctga

SEQ ID NO: 352908 - DNA, 309 bp, Pseudomonas aeruginosa
atgcccttcgtctatctcggcctgacccgcgacgccggaacttcgaaaaagaccggcaacgcctacgacatcgctgtcgtgcacttcgctgtcgatgccacgcaatcgacccgccccgatcgcaagtttgcccttggcctggagcctcagaatctgccgatcgcgccggaagcggtgagccagttccagcgcgttgaaccgctgtcgtcggtgaacttcgatttcgaacctgatccgcgaaatatgcagcgcaaccgtatttgtggcgtaaaaccgctgccgaaagcggctgctcaggccgcttcctga

SEQ ID NO: 352909 - DNA, 207 bp, Pseudomonas aeruginosa; identical to SEQ ID NO: 329405

SEQ ID NO: 352910 - DNA, 237 bp, Pseudomonas aeruginosa
atgcgcacggtgagtttccagggtgacggcctgtcggccagccaataccggacgatccagcttcgccagcaggtgagggcggcggtgaatcagtccgtgttgcagcagcaggtcgcggccacgctccaggctctggagcagcacaaagagcagggcggcaagcctgagcgcgtctggtccacgatctccaacgaaaagggcacgccgttcctgggcgacgtgttcgggtggtcgtga

SEQ ID NO: 352911 - DNA, 264 bp, Pseudomonas aeruginosa
atggctatcgagatcaaccgccagtcgtacctgtcgctccggtcctccctggagctggagctgctcgatgccggcatcgactcgccggacctactgagccggcttatgcgccacgtgctggccaccgagtcggcgacccgtaccgactcgcaacgcgtgcgccgtgcgttcgtcacggcccgtagaaacccgctgctgggcgcaatccctcagcacagtccagggcgcacaaatcgcccgtatatccgcaagaggaaaccctaa

SEQ ID NO: 352912 - DNA, 2163 bp, Pseudomonas aeruginosa
atgaaaacggagacgaaggtgatcaagggacgccagggcattgcccgcaatcggcacaccccgttgtgcctggggctgctgctggcgctgagtccgctggccgcggccgtggccgacgcgcgcaaggacggcgagacggaactgccggacatggtgatcagcggagaaagcacgtctgccacccagccgccgggggtgactaccctgggcaaggtgccgctcaagccgcgcgagctgccgcagtccgccagcgtcatcgaccatgagcgcctcgaacagcagaatctgttcagcctcgacgaagccatgcagcaggccaccggggtcaccgtgcagccgttccagctgctgaccaccgcctactacgtgcgcggcttcaaggtcgactccttcgagctggacggggtgccggcgctgcttggcaatactgccagttcgccgcaggacatggcgatttacgagcgggtcgagatccttcgcggctccaacggactgctgcatggcaccggcaacccggcggccaccgtcaacctggtgcgcaagcggccgcagcgcgaattcgccgccagcactaccctcagcgccgggcgctgggaccgctaccgcgccgaggtcgacgtcggcggcccgctgagcgccagcggcaacgtgcgcggccgagcggtggccgcctacgaggaccgcgactacttctacgacgtggccgaccagggcacccgcctgctctacggggtgaccgagttcgacctgagccccgacaccctgctcaccgtcggtgcgcaataccagcacatcgactcgatcaccaacatggccggggtaccgatggccaaggatgggtccaatctcgggctgtcccgcgacacctacctcgatgtcgactgggaccgcttcaagtgggacacctaccgcgccttcggctccctcgaacagcaactgggcggcggctggaaaggcaaggtcagcgccgaataccaggaagccgattcgcgcctgcgttacgccggctccttcggcgccatcgacccgcagaccggcgacggtggccagctgacgggcgccgcctacaagttcaagagcatccagcgcagcctcgacgccaacctcaatgggccggtgcgactgttcggcctgacccacgaactgctcggtggggtcacctacgcccagggcgagacccgccaggacaccgcacgcttcctcaacctgccgaacaccccggtcaatgtctaccgctgggacccgcacggcgtgccgcgcccgcagatcggccagtacacttcgccgggcaccaccaccaccacccagaaaggcctctatgccctgggtcggatcaagctcgccgagccgctgaccctggtggtcggcggccgcgaaagctggtgggaccaggacaccccggccacccgcttcaagcccggtcgccagttcacgccctacggcgggctgatctgggacttcgccagggactggtcgtggtatgtcagctacgccgaggtctaccagccgcaggcggatcgccagacctggaacagcgagccgttgagcccggtggaaggcaagacctacgaaaccgggatcaagggcgaactggccgacggccgcctgaacctgtcgctggcggcgttccgcatcgacctggagaacaatccgcaggaagacccggaccatccggggccgcccaacaatccgttctacatcagcggcggcaaggtgcgcagccagggcttcgagctggaaggcaccggctacctgacgccctactggagtctctcggccggctacacctacaccagcaccgagtacctcaaggacagccagaacgactcggggacgcgctactccaccttcaccccgaggcacctgctgcgcctgtggagcaactacgacctgccctggcaggatcggcgctggagcgtcggcggcggactccaggcgcagagcgactacagcgtcgactaccgcggcgtgagcatgcgccagggcggctacgcactggtcaacatgcgcctgggctacaagatcgacgagcactggacggcggcggtcaacgtcaacaacctgttcgaccggacctactaccagagcctgtccaaccccaactggaacaaccgctacggcgaaccgcgcagcttcaacgtcagcctgcggggcgcgttctga

SEQ ID NO: 352913 - DNA, 1569 bp, Pseudomonas aeruginosa
atgagtgagccgcttacaattcggaagttaatcgacagaatctcgtctggagatattcgaatccctgcatttcagcgcaatttcgtatgggagccagaccaagtagcattcttgttagatagcatctacaaaggctttccaatcggaacagttatcctctggaaaacagacactcgtcttaaagctgaaaagaaaatgggttatttcaccctgcccgagccgcaaaaggactacccagtcaactacgtgctggatggccagcagagactaactagccttttcagtgtattccagagcgaccttgaacctgactccaaggagtgggttgatgtgtactttgaccttcttgcaaacgagagcgtgcaagagtcaatgtttatagcgctcgatgagggagaggttgaccctgctcgtcacttcccaattaaaaccttgtttgatacggtcgcatacagaagggcgactagcaattttagcgatgatattgccgagcgacttgatgatctccagtcaagattcaaggagtaccttgttcctaatgaagtcttcgaatcggacgacagaaacaaggtggcaattgtctttgaaagaattaaccgggcaggtacggaactaaacgtattcgagcttctggcagcttggagctggtctgaagagtttgatctagtggagaaattcacagatttagagagcgacatatccgatcatggattcgatgatctcggaaaagatagagatcttcaactgagaatctgcgcaggtataattagcggggagaccacacccaaagtaatccttgagcttaaaggcgaagaaatccgccagcgattctctgaaattgagaatgggatacttggagcactggactttcttagtagggaagcaaatgttagccactacaagatggtgccattccccggcctccttgttccgctaagcgtgttcttcgccacgactaaggcagaaggcttgaattatacacaaaagcaaaaggagcacctcctccgctggttctggcgttctctctttaccagaaggttttcttccgatgtaaacgagaggcaagctctcgacattatcgaaatgaagaatcttgcaaaagatgagaattacgcatttaagcaccctaagagcgagcttcggattgattttgagaaagaccttttctctaccaacaatgccaactcgcgcgttctcatccttctattaagctcgcagaacgcctattcgttccttagcggcgcgaaagttgatatggaaaaagtcttgaagaagggaagcaaacatgagtttcaccacatattccctcaagcttatctacgcgaacttgggcacagcaatagagaaataaacgttcttgcgaacatttgcttcttgactcgagcggacaataatcaaattcgcgcaacctcgccgagtagctacatgtcagccatgaatcctgaaaaaaagacagaatacctaaagtccgcttactgccctgagaactctgaagagctagaatacagcgagttcctgaagcttcgggttgaaatacttacggaacgtgcgcttgagcttatggcctag

SEQ ID NO: 352914 - DNA, 135 bp, Pseudomonas aeruginosa
atgtcgcatagccagttggatctgctcagcgaaatcgctccggtacgctacagccgccggcggaagcacggcaccacccggtactgggggcatgccgagataagggggaaattcattcatttggtctgtaagtag

SEQ ID NO: 352915 - DNA, 309 bp, Pseudomonas aeruginosa
atgttcctgagccgcgttcgtgcgttcggcattggccagtgtctggttagtttgagccaagagctgctgctgggcgcgctgttccttctgctgctgacgaatctcggcgagcaggcgcgcattgtcacgattcaactgtgtcagttcgtcctgcttgatcatcagggtttgctgcaactgccgcagctccatttgcagttgttgtacctgggcctcatgccgacgctgctcctgctcacgctgctccttgctagccacgcgataatgttcaagggcatcgcgggcgtgctgatgtttctcttcaagtga

SEQ ID NO: 352916 - DNA, 1431 bp, Pseudomonas aeruginosa
atggtcgccgatatcgcctacctgcagcagagccagcaggaaatcaaccagctcgaagccctcttcgcccgccagcgcgccgcctacctggcgcagccgatgcccgacgccacgcagcgcgtgcagtggctgaaggccctgcgcgacctgctgttcaaggaacagcaggcactgatcgaggccatcgaccgggacttcagcgcgcgctccgccgacgagaccctgctcgccgagatcatgcccagcctgcacggcatccactacgccgccaagcgcgtgaagaaatggatgaagcccgcgcgccgcgcggtcggcctgcaattccagccggcctcggcccaggtggtgtaccagccgctgggcgtggtcggggtgatcgtgccttggaactatccgctgttcctctccatcggcccgctgaccggggccctcgccgccggcaaccgggtgatgatcaagatgagcgagtcgaccccggccaccgggcgcctgctcaaggacctgctggcgcggatcttccccgaggaccaggtcgccgtggtgctaggcgaggtagacgtcggcgtggccttttccaagctgccgttcgaccacctgctgttcaccggcgccaccagcgtcggcaagcacgtgatgcgcgccgccgccgagaacctgaccccggtcaccctggagctgggcggcaagtcgccggcgatcgtctccgacagcgtgccgatgaaggacgccgccgagcggatcgccttcggcaagagcctcaacgccgggcagacctgcgtcgcgcccgactacgtgctggtaccgagccggcgcgtcgaggaattcgtcagtcagtacaaggaggtggtccagggcttcttcccgcgtctttcggacaaccccgactacaccgcgatcatcaacgagcgccagctcggccgcctccggggctatctcgacgacgcccgcgagaagggcgcgaccctcgtcccgctgttcgccgaaggccagcaacggcgcctgccgcagacgctgctgctgaacgtcagcgacgacatgaaagtgatgcaggaggaaatcttcggcccgctgctgccggtgatcccctacgagcgcctggaagacgccctggcctacgtcaaccagcgcccgcgaccgctggccctgtactacttcggctacgacaaggcgcagcagcagcgcgtgctgcacgagacccactcaggcggtgtgtgtctgaacgacaccctgctgcatgtcgcccaggacgacatcccgttcggtggcgtcggtccctccggcatgggccactaccatggccacgaaggcttcctcaccttcagcaaggccaagggcgtgttcagcaagccgcgcttcaacgccgcgcgaatgatctaccccccctacggcaagtcgatccagaagctcgtctacaagctgttcgtgcgctga

SEQ ID NO: 352917 - DNA, 1200 bp, Pseudomonas aeruginosa; identical to SEQ ID NO: 323939

SEQ ID NO: 352918 - DNA, 1065 bp, Pseudomonas aeruginosa; identical to SEQ ID NO: 323940

SEQ ID NO: 352919 - DNA, 210 bp, Pseudomonas aeruginosa
atgttcgagaacgcgggtgacgagttgtacacgctcgatccgcagaagatcgcgcaccggatcttcgacacggccacgagcgagaagccaccgcttcgggtggcgctgggcggtgacgccttcggcgtcatccaggcggcgctcaagggcaggctgtctgcccttgaagcgcaggagagtctggcgcgatcggtggccttcgatagctga

SEQ ID NO: 352920 - DNA, 426 bp, Pseudomonas aeruginosa
atgcatgcggtccaccagatcgcgaggcggtttccagccttgcacgtccagggcgatatgcacggcggcttggttggtttcgcagtggctcagcaccgctgcggccaggtcatccagcacgccctggaggatatgcggatcggcaccgtcgagggcgtgaggcgatacctcgatcttgaggtgcgagccgagggtatcgaccttgatattgtgattcttgatcagcaggatcagccccatttcggcgttctgcaggcggtactgatagccggagtcgcgaccgatgcggcccttggaccactcgtagccggcgaactcgaccacatccaccgagaggtcaaacagcgccatgacttccgggcgcaacttgccgttgtacaactgccgcaccgtatccacgccgcaccgcaggatgcgcacgcctga

SEQ ID NO: 352921 - DNA, 393 bp, Pseudomonas aeruginosa
atgcagggcgagctgacggtggagtcgagggtcgaccaggcaggtcagctccacgccggccgcggcgttctgcgagaggaggctggcggtgtcttccaccaggacgcccaggtcgaacgggatctgttccaggaccagttgcccggcctcgaacttggagaggtcgagcacgtcgttgagcaattccaccagcaccttgccggagtcgtgggcgatcgacagttgctggcgctgttccggggtgagcgggccgtcgaggctcagcgagagcatgccgagcaggccgttcagcggcgtgcggatctcgtggctcatgttggccaggaagctggcgcgggcctgggccatatcgagagcggtctggcgggcttcttcgagttcctggttggatag

SEQ ID NO: 352922 - DNA, 219 bp, Pseudomonas aeruginosa
atgacgggggcgttcaccgacctgtcaggcgtgcgcatcctgcgttgcggcgtggatacggtgcgccagttgtacaacggcaagttgcgcccggaagttatggcgctgtttgacctctcggtggatgtggtcgagttcgccggctacgaatggtccaagggccgtatcggtcgcgactccggctatcagtaccgcctgcaaaacgcagaactgggctga

SEQ ID NO: 352923 - DNA, 1539 bp, Pseudomonas aeruginosa
atgcagtttggtgcatccgcagcacagacaacggctctagtgaacggcatttggcgccacaaccgcgtagctacatccattggtcaaagtgagttaatttactccccaataaaagatgtcctatctctcggatacaatggtcaattgcgccaaacggaggctgagcagataaaaatcacctataccacagaaaatgacgaatctactgttcttgtgctgaaaggaaaaaataaaaatattcgtttgactgttgaaggtggacagggattagggcgagaactccaacagctcgacccaccgttttgcgctcttgtcaccggattagctggaatccccgccgaagaagactttgaaacaaaaattgttataagaaaagcagcggcaaaaggcgactctaacagcgtattcaggaatattctactccaactgcgctctaataatgaaaagtgggaatctttctctagccaattagaaagcatatttcccggatatgctattgatgtaggctttaacatcgaaacagacgagacaattagatgcacggtgaatcgtaatggctctccataccccattgattcctgtggaacaggggttttgcaagcgatacagatattttcatacatcaacctcttctcccctaaagttttgcttctggacgagcccgacagccatctccaccctaataatcaaaaagcactggcagctgaactaatcgaagtagcaaaaaacgggacaaagatagtcatatctacgcatagcagacatattatcgatgcattaaaggatgatgccaagctagtatggctgcgaaacggcgtgatcgaagaagacgccccggattatgagttaaatgctctgctcgagatcggagcacttaacgttggagagcgcttgcgaaatccgtcaaaaataattctaacagaagatagtgatacctcactctttgaattgctactcgaggccaatggctacgacctagatgattgcgatatcctctcttactctgggtgcacaaatatatctacagccgtagcacttattgagcacatcaaacgatcgcaccccaacgcacaatacataatccatcgagacagggatttcctatctccagaggacctagagcgatacacagacaagctaacgcctcatggggtggaaatattcataccagacggaaatgacctagagcatcatttcattatgcctgagcacatttcagaaacatgcaatattgatattgcactagcacgacaaattgttaataccgcattcaccacccgccaggcagacctcagatcgaagtatataaacaccagatcaatgaacatcttgaagagaagtgaaaaacccgatgccggcgcaatagcaaatgaatgcattgctcttatgttaggcccggatgcaatctgcgttcacggaaaaatactgctcaagggggtcagagatgaactgcgcaatcagggcataactgacaacatcatgactccttcaagacatctttcaatacagcgtctccaagaacttggtgcagctgattag

SEQ ID NO: 352924 - DNA, 837 bp, Pseudomonas aeruginosa
atgagtttgcttgataatgcaatatgttccatccaagtcggactgcatgattacggacgcgaagatcgctctatatctagcgttagaaacatttacgccgggatattgcttctttttaagtacaagcttttattacttagtgatgacgagagcaacgccgcactgatcaagcaggaagttgtccctgagattggctctgatggtcgagttatatggaaaggagttggcaataaaacagtagatgtaaatggaataaagactagatttaagtctctaggaatttctgttgagtggaagatttttgatcgaataaatcgttaccgaaacgagattgagcactacttcagctctatgccgagcgatgaagtcgatggccttttagttgactgctttaagataataagcagatttttctctgagcatttgcaaatggatgcaaaaaaatgtcttggagatgaggcgtgggaagttcttttgtatgcatacgaggtctacgagcatgagatagaaaggagtgagcttgctgtcagcgagcttcagtttcaccacgaaattataaaggagatatttcttaacttctattgcatctactgctcctcagcgttaattcgccctacgcaacgaggaggagaagctacctcagcaatcttccactgcccggagtgcaataaaaaatacagctatgaagaaatatgcaactacggagttactgatttatacattgactctttctggtcggggtatgacaagactgaagccgagttctctagttgcgagcattgcggagaaggaatttatttaaaagaattttgcgtctgcacatcatgcggcccctaa

SEQ ID NO: 352925 - DNA, 1146 bp, Pseudomonas aeruginosa
atgacaagaagagcaattttcgcagcgcttatagaccagattttcggcaaggactccgcaacatttgatacctctgcagatcaatctaaccacgtaattgatgcgctagctcatccgactgagttcaccaatttcaaatcaaacttcaaagcccgactacagcgactgaatactgcaattcagatcgacgccagcttgcgcaaagaaatcctgtacgcagtgaatcgaattgtagactctggttgggatggtgcatatgccgaactatgtgccctcgactacttcttagccgagcaacggactggcccaggaagggttttcttggatcacactgtgcccgcaagcgagacgcttgcctcggaaatgggtatgcagaacgcgaatcatgacttgagctttccagaattaggtgtctctatagataccaaactgctttctgacaagacaggtgatatcctcaaaggaatatttaatgattattgctcgactaaaggaataagcaatctattgatcgttccttcctatgatcccgacagcaccttcgagcaatttgtaacgagccgcagcgaacttcttactgagttagtcaacaaagttgacccagcgatacagccagcgacattacagagttcggtaatacctggcctttcatacagcctcgcctggggttctggcgtttactttggcgaaggctcctactctccagaggagcacgctagaaatcatcactcattgctctttggacatgcgaagaaattctctcgcctcaactccaccataattgtttttgtgatctttccttggtcggcagagaaggtttttttatttaaaaacttaagccagactttctttcaggcgcttggtgaaatattcttcaatgactatataaactcctgtgttccagcaaaaaaatttaacaagaaattccagaccatgatttcggccagcgaagtaacacgacacctatcaggcgtaatctatctggaagatcaaaccatcacaagcacagactcaagcttattaaatatcagtgcaaactacatccttaatgagcatgctattcatccactattcggacatgaattcgaactcatgttgaagcaccggggcgcctacaaccttaacagacataataatgctggttag

SEQ ID NO: 352926 - DNA, 876 bp, Pseudomonas aeruginosa
ttgagcaaggtcacaaacaatgaaaattatgatgatctatttgtaccagaaaaaatgccaacaacctgcttactatgcattgacggagcactgagcgaactgggtcacatcattccaaagctagcattgcgatggctaaaaagagccagcaaattgaacaccttctatttcaacaacaatccaaatataaaaatatcagacacaccagccttcaagatgatgtgcgaaaagtgcgaagacaagatatctacgctcgagaaggactttactgacaattatttcaagcgatattacaagcatcagccagtaagtaaaccccgagatgagctttacatatttgccatttcagtggcttggcgactgataatctcgacggagcgcctcaaagatacacaatctcacatcaaaccatacaaggaaatatattccaaccttgaatttaggatgcacaatctcctaaacaacaatcagaacaaatgcaatattggcgtttatgttttctctgcagacgaaatcctgaacaaccttcaagaagtccaaatcaaaagaaaccttctactatactctcttaggcacggtttaaaagcacataacctctacagtaaggatggtacatttcttatatcaaactcccatgtccctaccgtgttcttcaaaataggattttattattttcttgttgttgagaccggatactttgacagcgtccagttttcagtcaaaagcattaaagcctccgagagctatgagctttttgaggtaaaatataccgaggacttcctgggattcctggattggctgatggagcatggactttatgaggcgaacatatccccaccatctctaaaacactacgaccgaagaaattattactaa

SEQ ID NO: 352927 - DNA, 1383 bp, Pseudomonas aeruginosa
gtgcgccctatcacaaaccaaagattcaatgctttcgctgcttactgtagaagcccgcaggcactggcgatggcagacgaggtactttggtacgaagccgaagagtcgcggattatggcggcaattatcagagaaagagttgacggagagtacggcggcatcattctgggacgcgacgaaaaagaacgataccgttggatcaacggaacagagttttttaaatcaaaaatccaagccagagtagcccttagggcgaagataaataaaataatcccaatcttcgaacagcaccgaaagcaaggcgataacgaccagaagccagtggattttttcacgccactgcaaaagacaaagcaacctctaaatcaatcatttctaaacctaacaaaacttgaaggatactcaccagccaaggagatcatcgaaccgatgatgcgctggcatgaggatgcagatggaaattttgtggagcaattccagactactggatttgactcgcgaatatgggagttatacctattctctttgttcacggaagccggactcctaattgacaagtcaaatgctactcccgacttcacctgtgcggggttaacaggaaccttctgcgctgaagcgaccacagttaacccatcgcgcgacaagaaaggcaacatagttcctccaccgccaatcgatacagaagacgaatacgaagcagccctacgcgactactttccgatcaagtttgccgggcctcttaccgaaaaactcaagaaacgctattgggagaaagaaaatgttcaaggtaagccgttcattctcgcaatacaggacttccaaacgcccatcgcgatgacgctaacccgtaacgcattgccaacctatctatatggatatcgtcaagctaatgactggactccagacaaccccatatttgagagaatagaaacccataaatggggcacaaaagtcataaactctaacttttttagctttgaaggagcggaatacataagcgccgttatatttaaccctagcgccaccatttcgaaattcaatagaattggactacaggctggattcggctccgaccaagttaaacttttccgtttcggaacagcatgcaaaagaagaaatgggaacacggagatagctgagtacgcctattccgtttgggagggctcgcatacagaaacatggatcgaagggcttgaagtcttccacaatccacgagcgcttcatccactgccaaaggaaattttacctggcgcggcccatcactttatggaagaaaatggcgagatgaaaagctggctgcctgcttggcatccaattcagtcatacaccaagatcggaattggacaactaccaccccagccggatgacggcgaaccattctaa

SEQ ID NO: 352928 - DNA, 3096 bp, Pseudomonas aeruginosa
atggcggttcaaggcggcagtgaacgtggctcagagtggcggcagtgggatttgcatattcatacccctgcttcatttgagtggaagggagcgaaatttgatcgggacaatcctgccgcccatgccaacaaggcccttgtggatgaaatgatcaacgcgttgaacgaggcagagcctgacgtttttgcgttgatggattattggacgttcgatggctggtttgcactgaagcgaaggttaggtgagcaagacgcgccgaagctgaccaagactgtctttccaggcattgagcttcggctcgcagcaccaatgcgcggtcgtttgaatgcgcatgtcctgttctccaatgagcttgatgatcaggttctaagggacttcctttctcacctccgattagccgacaacgataggccgttatcagatcgtgctttgatcgagtacgcgagagaagtgcctgaggcacttctcagacaccatggtctcaagcctgagcaggttgcggtagatgatgaacaggcctatgtagcaggcgcaaaaattgctcagctaacatgtgacagctacaaagaagcgatagccaaagtacctgacgagcaagctattggctttatgccgtatgacacgaacgatggcttgaatgatgtgaaatggacagagcactacgctttcttcatcgggctggtacgtaactctccgatttttgagagccgaaacctggacatccgagctgccttcgttggcgaggaaacccttggcaattccagattctatgctggcatcagggaaggtttgaaggatgtctccaggctagtagttgcagggagtgacgcgcattgcttcaaaggcgttgctggcagcaatgaccggcgagggtacggtgacttcccttcggacaaaaaaacttggatcaaagctgaccctacgtttcgtgggttacagcaggcgattcgggagcctgcaaagcgctcgttcatcggtattgagccgcccaagcttggcgagattgccgccaacaaaacatatttcatcgaccatgttcggataaccaagtcccagggttctgaactgacgtctcgttggctagatgaggtccagctcccgctaagctccgatctggttgcgataattggcaacaaaggcagcggtaagagcgctctagccgacgtcctcgcattgttgggccactcccgtcagaccagccacttttcctttcttcgaagagaacgtttccgaggtcggtctggtgatcccgcgcggcatttcgagggctccatgcactggcatgatgggaccgtgaatgtttgtaatctcaacgatgacccgccagcggaaaaggtcgagatggtgcggtacatccctcaaggtcacttcgaggatctttgtaatgcgcacgttaccggcaaatctgaagcgtttgagaatgagctaagagcggtcatcttttcgcacgctgacgaagcaatccgattgggtgcgttggatttcgaccaattgatcgagcagcaagagagcacgttccgcttgcggctgaacgaattcagaaaggatctcaagcgagtgaatcttgagatcgctaattacgaaagccagctccacccgctgatcaaaaagacgctgatggaacaattggcgctcaagcgtcgacaggtggctgaacttgaagatctcaagcccgaagagatgcaaaaaccttcagccgagttgtctcaagagcagcaagagacggcgaaagcccttgaggtaatagccgccgacttgaagcggttggatgtccagaaaacccaggacactgaaagggttgcgcaactcgcggcaagaatgaaagctgtgaaggacgtgagagagcaagttcagttgcttcagcgaacatatgatcagtttgtgcatgacacgaagagagatctcgacttactgggtattaccgcgtcggacgttgccaagtttgaagtcaatctcggtccgataggacagctcgaagaaacttttcaggcggacgaagctgctctgcgcggcaaatacgctgttgctgacggtgagcgccaaggactcctggaaaggcaagccgatgccaaagccaagttggatgcgccacagctggcctatcagaaccatcttcttgccttcgaggactggcagcgtaagcaccaatctctgctgggagccgatgatttaccagaaaccgtaaaagggcttgaagccaggatttctcagcttgatgcggtacctgaaatgctggaggcgcatagagctctccggcagaaattggcaggcgatatttacgacatcctcgatgctcagcgccaagccagggaggcattgttcaagcctgtccaggagctaattcagggcaacagtttaatccgtgatgagtacaagcttcagttcaaggcaaaacttggtggctcgatggatgcgttcgccacgagcctgttttctttgctgaagcagaacgttggcgagttccgcggtgaggacgagagcttcaacacggttcgtcgtttgggtgaacacgccgactttgaaaagcgagaagaggcggttggttttgctcaagcgctacatgacaagatcgcagctgcagcagccacgattggcgataaggttgagtacggcatcgattccatgttgcgcaaggataaaagtgccagtgaggtatatgacctcctgtttgacttgtcctacttggagcctcgttattcgctgctattccaagatgcgcaaattgagcaactgtcgcctggacagcgtggtgctttgctgctgattttctacttattggtggataaagggcgaaacccgataatccttgatcagccggaagagaaccttgacaacgaaaccgtggtaagcctactcgtgcctgttcttaccgaggcgaagaagcgtaggcagatcttcatggtcacgcataatccgaaccttgctgtggtctgtgatgcagagcagataatctggtcgcattttgatcgggcgaatggccacaagatttcctacaccgctgggggaattgagagcccggtgattaatggccacacagtgaaagtgcttgagggaacaaagcaggcgttcgataaccgcagaatcaaatatcactga

SEQ ID NO: 352929 - DNA, 2328 bp, Pseudomonas aeruginosa
atgaacagtactactggtttttttgcatacgcttctcagccatctgaggttggtcaagtaattgagcgagcagttggtgtcatttctaagtcaagttctcatgtgcaggttgatacttgggccgctctggatatagtaggtcactttatcagtggtgaagtattgagcggtattgaaaatgcagattttctcattgccgatattacagagctgaacttcaatgttacatatgaaataggctatgcaattggcaaggggaaaagagtcttacttgtaaagaacagctcgcttacaactcaaggtcccactatcgcacaggttggaatttttgatactttgggctaccgtcaatatcaaaattcggccgggcttgctgagtttattgcaagcacgccaacggcaaaatctctcgatatatccactcctttgaacctgaaggcccctgtttattatctagatcttccagtcaaatctgattggtcaactagaatagtgtccagaatcaagaaggctgggtttatatttagaaattttgatcctaatgaaatgccgcgattatcggcaaatgatgccatttctcaagtgtctcagtcttatggcgtgatcgttcctcttctgagctctaaataccatggctgggacattcacaatcttcgtgccgcttttatagccgggcttgcagatggtatggggaaggctgttcgcattcttcaatggaatgacgagcctgtaccgctggattatagagactttgtaagtgtcaactaccatcctgatgatgtgaatttagtaatcgaagagtttgcggtagaagtaacccaagcatttcaacatattgacaattcgcaactaaagcaagagcggtcttttcttaaaaggctgaatctcggagctacctccgccgagaatgaaatgcgtgatcttgatagatactatcttgagacagatcagtttcttaagtctttgaggggcgaagcacacttggttgttggccgaaaaggctcagggaaatcagcaatttttattcagattagagatggtgagcgcgaaaaaaatcggaacaagaacattgttcttgatcttaagccagatggatataagttaataaaatttaaggaaagaatccttcggtttcttgcggaaggcacttatcaacacactatcactgcgttttgggaatacgtgcttcttcttgaaatttgctataaaatcctagaaaaagataaagctcgccatatccacgatcacaaactatatgatggctatagagaactggctggactctacaatgctgaaggatatgatacagaaggtgatttttctgagcgcatgtctgtactaatggagaaaatctattctgaataccagtccttatatggtgatcaaaatgatacaacattgagcgccgctcaagtcaccgaacttctgtataagcatgatgtaaggcagcttaaaacaaagcttggtaagtatcttgagaataaagaggttctctggctgttatttgataatattgataatggctggccaacatccggattagagcatgaagacttattaatcattcgagctctcattgaggcgacacggaaaattgagcgacaattcggctctgatgatttttctgtccattctgtagtatttctacgcaatgacgtctttgaactactggttcaagaaacatctgatagaggtaaagaggccaatgttgttttagactggacagaccctgacctacttcgcgaactagtgcgcttgcgaattatttccaatggccttgatgaggatactgattttaaaactgcatggctgcacgttttcaccagccattttaaaggtgaagagacctcgcagttcctgattgaaagatctcttatgcgacctcgatttttgctaaacctaataaatcaatgcaaaggctttgccatcaacctcaatcacgaaattattgagcccagcgacattgaaaaaggaattgttgcatattcatcagatctacttagagatattggctacgaactccgcgatatatctgccgatgcagatggcatactctatgcttttgttgcgtccgactctgtactttctgaggtcgaggttcttaagaaattaaaagaatcgggtcttgatgattctcaggcattgaatgtactcgacttgcttctttggtatggtttcttgggggttaaggttaactcagatgagccaaaattcatctatgactttagctataataagtcgctaatggatggcattaagcgcaaagcatcctttgttagtcttgcaattaatcaagctttttggcctgccttgatgataagtaaatga

SEQ ID NO: 352930 - DNA, 828 bp, Pseudomonas aeruginosa
atgcgggaccttctgcccttgatgacacctttctcaacctcgcagcttcttacggcagaggcacgccgtgagctgggagcactccttacggctgctgcaagctcaggggaaagtattttcttattgcttgcatatgggcagctttgggaggctgagatgttaatgcggccggtgttcgaagcttcgattaagttcgcctatatcgtccagaacaagagcgatttcgagtctcgccttcttgagttcggaaaggaccagttccagatcgcactcatgaaggatgaccagaaggcacgtgacctgctcgccatcttgccagatcctgattcagatgagtggaggcctatccgggacatcgtgttgccagacgattaccgtgatgaacttcgtgccagatatgacaaggccacccgtagggccatggagacgcgatggggttttacggggctgataaaggcactttccagtagtggagaccctctgtatcagtcgttacctggcttggccctaagctattcccaagcgagccatctaattcatgctgactcagttggtgttcatatgccgcttgagcgagactatcgagagtcggagcgtcggacaactctccattttgcacatcttgcaaagctaatttctgactgctttacatgtttccttattcgtcttggtgtggcctatcgctttgccggtgttccgttggatccttatgcaggcgctgttgacagggtcggggttctcatggaagagctttctccttattacaaaatatggatgggagtggagtatggccaagcttcagggcggtctggtgatttgccgggctaa

SEQ ID NO: 352931 - DNA, 459 bp, Pseudomonas aeruginosa
atggacaattcgctaaccctccacatcccgatgttcgctactccaaagcgaattacgtactactcgctggagctccgggcggagcgctgcccaacctgggatctgcactatgcgttcgagcatttcgaggtgatgctcagtccggcgctgcgtccttgtgacttacgcaacggcaagatgatcatgctgcttgacaagcacctcgcagaagaactggccagctatgcggagccagtcatgcagcagcggtacggggtctgcactgaggtccatatcgtcgaatgtagctgcccggagaaaatggccaagcccctaccgtttgatgcgcatcgcaaaaaggtacagcagctgctcgtcaagtttgaggcgaagaaggtgccgcgaacccaattaccgaaagtagcgttgccgccgaaagagaccgctacgttatttcggctgcctgttagagatttatag

SEQ ID NO: 352932 - DNA, 432 bp, Pseudomonas aeruginosa
atgctgtttggctgtatcagcatccccgtgatgggagtcctgttaatccgcagcctctatcgggactaccagggcaacaagagcaagaacaagtatgctagcgggccagacattacggcgctggttgctgtgttcctcgtagcgttcatccccctcaccatgacaacgaagctgctcgacaaggacacctacgagaagcctctgcgccaatccatcgcattcgcctccttccacctcccgactacctattgcgggctgcccgaggcgcaaggtgtcacagtggcaccaatgaaggatggcactgctacaatcgcgctcccagacgacaagctcggctacctgttcgaacccattgcgtgcaaaccgaagcagaagagccggaccgaagcgattgaactactggtcaaggtccaacagcaggaatcatcctga

SEQ ID NO: 352933 - DNA, 1461 bp, Pseudomonas aeruginosa
atggagacggaaatcccccgcaaaggcttcgcaggccatagtcaagagccgctccagacgctccttcccctgaacatagatgaacctgggcaggagcccatgaagaacgagaacttccccccattccctgcccccgggcaacccttgatgtttgcagacttgttcgcaggctgtggcggcttgtcccttggactctcgctcgcggggctaaacggcgtgtttgccgtcgagcgcgacaagatggccttctcgacactatccgccaacctgcttgaggtgcggaacgtaccggtgaaccaatttgcctggcctgcctggctggagaaaaaggcctgggccatcgacgagatcctcgaacagcacccactggagctggccaagctcaagggcacggtccatgtcctggcgggaggccccccctgccaaggtttcagcttcgcaggaaagcgtcaggaatccgaccctcgcaacaagctgttcgagaagtacgtggaaatggtcaaggccattcgcccatcggcccttgtgctggaaaacgtccctggcatgaaggtggcgcatgccaagaagtcctggaagaaacttggcatcctggtcaagccccagtcctactacgacaagctagccgaaagcctggacaggattggctacgaggtcctcggccagatcgtggactcttcccgcttcggtgttccccaaaagcgccctcgcctgattgtcattggggtcaggaaggaccttgcctgccatctccccggcggggccgccagggccttcgagctgctagaggaagcccggctcaagcaactacaagagctaggtcttcccgacgtcatacatgccgaggatgctatttcggatatggaagtggggtatggaggcacgaggccctgcaacgatcccgagtctccgaagagatttgaggagattgtctatagcggccctcgtactccgttccaaaagcttatgcaccaaggctgcgatggccccatcgatagcttgcgccttgccaggcacaagccagaaataaaggctaggttccagaagatcatcgacgatcctaactgcgccaagggtgtgcgcatgaactctacggtgcgtgaagcatacgggctcaagaaacatcgcatctacccgatgcaggccagtgcaccggcgcccacgatcacgaccctgccggatgacgtcctccactacaaggaacctaggatattgaccgtccgggaatctgcacgactgcaatcattcccggattggttccagttccgcgggaagttcaccaccggtgggagccagcgcaccaaggaatgcccgcgttacacgcaagtgggcaacgccgtgccaccctacctggcccgggctgttggcatggccatcagggcaatgctggcagaggccgtggagcttgcaagcctgcaggcagagcgtgaactagaagaagaaatgatagccatcgcttga

SEQ ID NO: 352934 - DNA, 2148 bp, Pseudomonas aeruginosa
atggatagctcccaacaggaaggagcgcactaccctgccgcgctggtcgactgggccggccatcactcagggggagtaaagcggctactggaccagaacagcggccagccgaacaagcaattgctacggacaaacctcctgtcccgcctccaggcctgggccaagaggcttcccacggaaacctcgagtgtcccgaggattgtcctgttggtgggtggccccgggaatggaaagaccgaggcgatcgaatccaccatccgttggctcgatgaaagcctcggttgcgatggccggctggtcgacgagctctcgaaggcctttcatccacccatggggtcggcagtcccgcggctggcaagggtcgatgccggcagccttgccaggcttgatggcaacttgagcctggacatcgtccaggacgcttctgcaactgccgggcacgagggaagcaccgcgccagccctccttatagaggaactcggtaggttgctggacgggccgccctcccaggcctatctctgctgtgtcaaccgtggcgtcctcgacgatgccctgatccatgcaatagacaacgacctggagcaggcacgagccctcctcgaagccattacccgggcggtaagcctcgcgtatgacgccccctcatgctggcccctcgagggctttccatcgattgcagtctggccgatggatgccgagtcgctcttggtcaagccagacgacgagcccacggcgcctgcggagatactcctcgggcaggccactgcatccgggatgtggcccgcaagagggacatgcccggcaggcgacaagtgccccttctgctccagccaggccatcctggcacgcgacgaacacaaggcagccctcctaaggatactgcgctggtacgagctagccagtggcaagcgttggagcttccgggacctattctccctgacctcgtacttgttggccggccaccaccccgtggtccacgaccctgcgggaaccccacaccagtccactccctgccaatgggctgcgaaccttgtcgagctcgaccagaaggctcccgcggccaagaggcccagcaggcaatcgctcacggccatcttccacctggcaacctcgagctaccagcatgcgctcttccaccgatgggacaggggcacagccacctcgctccgccgtgacctcaaggacctaggcctcgagaaggagctcgacagggaggaaggacggaccttgatgggcctcgtacatttcctggcagagcgcaagggccactacctcccggcgaccatcgcccccttgctggagggcctggtcgataccctggatcctgccttcgcaagcccggacagcaaggtcgccgtgagcagtcgaaacacaatcgtccttggtgagctggacatgcgcttcagtcgctccctcgaaggaggcatcgagttcatccgcaagtaccaggtgctatcaccgaacgagctcgagatactcaagcgcctttccgcggcagacaccatgctttccttcccggtcatccggcgcaaaaggcccgtggctgccagtcgggtccaacacattctccgcgactttgcctgccgcctggcccgcaggagcatatgcacccggacagccgtcgtggcggacgccccaatcctgcaagcgttccagcaagtcgtcgaggatagcgacaagcaccagcacctcttcgaggtggtaaggcaagtgaaggagctattgaacaccggcaaggaattcgaggtgtccctgaccaccaccttcggccagccgctccccccgcggcaacgccaggcgacactggtcgtcccgcagagcccggtcaggatgttcccccaggacaccagcgggcgcccgcacccgccgatctgctacctcagggtaggccaagggcaatcggcgcaaccagtccccctgacctatgacttgttcaaggccgtgaaggaactggaaaggggactctcccctgcgtccctcccgcgcacggtcgtggcactgctggacacgacaaaggcccgtttatccggccccattgtccgcgaccagggactgctcgacgatgcccggatccgtgtcggggcagacggcacggtagtaggtcgttcgtggaatggcttcgttgaaagcagggaggacggggtatga

SEQ ID NO: 352935 - DNA, 2328 bp, Pseudomonas aeruginosa
atgaccgaggatgtatttcggattagctcgcacttaaaagacattattggccgagatctagtaaccaatcaatttgttgcgatttttgagcttgtaaagaactcctttgatgctggcgcaaaaaaagtagacattgagttcttcccagaaaagcaacaaatcgtaatcgttgacgacggccacggtatgtcacagagtgacattaaaaacaaatggctttttgtagcctactccgagaaagcctcgacagaatcgggaacataccgagacaagatcaaaccagccggtcaattcgcaggaagcaaaggtatcggcaggtttgcatgcgacactttaggtgagcaactagagctatatagcctaacagagagcgggcattcaatttccaagctaagaatagactggaggatgttcgaaaaagacagcactgaagaatttcagaatatccctgtcactttagaaaagacaaactcgttccctgatatctacaatacaacagccccctccccacacggcaccgttcttttaatcagaaacacacgacaccgctgggatcaggagagtatcagtcgactccggagagacctcgccaagctgattgaccccttcggcactactaatcatgtcgccgtctccacctggctagtagatggctccgacaaggcgattgaaaatgttgatggccctatcggaaatgagattgcggagctcctccaagaaaaaaccagtcgaattgtagtctcgatcgaaaactcggtcatcgagagcactctatttgaccgcggaagaaaaatatactcaataagagagccttccccctatagcgagctcaacgaaagccgagttacaggtgaaatttattaccttaacagggctgcaaagcaaaatttcacccttcgaatgggtgttagacctatcgaattcggcagcgtttttcttttccttaatagatttcgaatctaccccatcggagaagaatatgatgacactctgggactgaaccgtagaaaacaacagggacaatcacgctatctaggcacgcgggatatcataggacgtgtcgacgtaatagcaggccctaaactattccgagaggtctcaagtagggatgccggattggtagaggacgcacgtagccgtgctctattcgaggcggtccgccggcacatgattttccggctggaacgttatgttgtcggcgtcaattggcaggacaagattgatcaaggaaaagacacccccgagcgcttagagacagaccagtctcgcgaaagaatcctgaatatagtcggggcacttgcgagatcaaaagacatcgagattctttactacgacaaagagatccttcaagtcccggaagaccccgaccagattacggacgaagctctcaaagcaatgtcggaggtagcccagaatcagggtgacactttccttcgagcccaaattgaagaagcaaaaaagcgaattcttgaattaagggcttccagagaagaagcacgagaaattgcacagcgtgcaatagaagaccgaaatcgtgcagacgagcatatagcaaggctagaacaacaagcagctttcttaggcagtagccaggacgtagatgtagagcgtgttcagctattaatgcatcaggcaattatccacttggggcatttacgctccgctatcgctaattctgcgcatgagcttaggaatatctatgcgattgccaaaatatctgatgaaggcctagacaaccctgatgatatagaggacttattagcagctatacgccaatcagcaaagcgagcatcttcatcggtcgccagcgctaccctttcgggcgacagattgagcaccctcctatccttcgccccgaacattcgaatagaccttcagactgataaagtccacggagatctagtgcaatttctagatgagtactttgacgttcgattatcgggaatgtcaggaataccccgcgccattttcgatggctcaggagagtctttggttagagacttccctccggttgatatcgcagtgcttgttgacaacctactagacaatgcgcataaggcgggagcaaaaaaactagaattcaaagtaatccaaagaacaaaagaacatataaaattccatgtgagtgatgacggactaggaattgacgataagaaagtcaacccctccaagatttttgagcgcggatatactggatcagctaatggtacaggcatagggctctatagcgtaggtcagatcctcaaaaacttgggcggaacgatcgagcttgtgggtgatggcagccgagcagactttgagattacgattcccggggagaaaaaatga

SEQ ID NO: 352936 - DNA, 960 bp, Pseudomonas aeruginosa
atgaatctcgacattggtgtactttggatagaagactcctttagcacagaggaggaagatagtcttcgcaggcgcatcctgaatgctggctttgtagcgcgcatagatgcaattcctaatagcacagggatagatgcactagccaagaggcatgagctctaccactgctttgacatcattctgcttgactataaacttcaggatgaaaaaggcgacgaaatagcaccaagaatccgagagcttttcccctccaccaccattctattttactcgggaagcctagaggaagatgcgcttcgccagaaaatggctgccaaggaaatagagggagtgtactgcagcgctcgccgacgctttattgagcgagctggcgcccttatagatcaaacagcgcgatctcttaacaggctttctggcatgaggggtttggcaatgagagtggttgccgaatgcgatgaaataatgaaaaaagccatcctttcaatgaccgctcgcagcccgaaatgctctgagaaaaaagccgacctcgacaaagatgttattgagttcatcgatcaatccaaagagcgatacacagccaccatcgatggcaatatcgaggatagattcaaaacccttgcagtagacagcaccaagctattcaaacactttcgacgactaacgcaggtagtcgcaagcagcaaagaagatttcggtttaaatgaagaccaagctgaccggctcagagagctaaggcgacatagcgccatctacgaccaagaagtcctgaaaaaaagaaatgtgcttggccatgtctttgaaactcgcgatgaatcaggctggaccctcagaggaagcgatgaaataaagaccagtgacttccccgatatacgaagaggcttcgctaaacacatcgaaatccttcgggaaataaccactatagttaccatgcaagataaagaaaacactaaccttagctga

SEQ ID NO: 352937 - DNA, 585 bp, Pseudomonas aeruginosa
atgaaggctgacattcgaaaaatcgccacatttatcgagacgacatacaacgagggcggcaaggatgctgagcggcctatcacctcagtcgtggtggccgctgtcgttcgcaacccatgggcaggtcaaggttttgtagaggatctgcgtcctcagatccttcggttggcgcccgggttaggcgagatcatgactcaacagctgattagccacatgcctgcagatcgagtgcaggcttatggcaaggcggcagtggtcggggtaaacggcgagattgagcacgcttcggcgctgatccacacgctgcgcttcggtaatgtgttccgagaggcagtggaaggcaccgctttcctcagcttcatcaacacacgcgtcggccctggtgctttgctgtcggtaccgatgatccataagtcggagtctggcaaacgctcgcacttcatcacttcgaccttccagattgcagatgcacctgcgcctgatgaaatcgtaattgccatcggtgccgccgacggtggacgtgtccacccacgtatcggtgatcgcttccaggatatggaagagatggctgcagagaaggcttaa

SEQ ID NO: 352938 - DNA, 792 bp, Pseudomonas aeruginosa
atgttatcgagcatgaaagccacccccgcccaaccgccccacctgaccgccgcgccacagacgcccgcggtggtgattgagggcctcgagaaaaactacggtgacttcaccgtgctcaagggcatcgacctagtggtccggccgggtgagcgcattgtcctttgcgggccctcgggctccggcaagtccaccctgatccgctgcatcaatcagctggagagtgccagtggcgggcgtattctcgtcaacggctgcgacctaatggccgagccccggcgcagcgtcgacgtgctgcgggaggtgggcatggtgttccagcacttcaacctgttcccacacatgagcgtcttggacaactgcatcctcgcgcctatgtcggtgcgcggcctcacgcgcgcccaggcggaagagcgcgcccgcgagtacttgcgcaaggtcggcatcgagaaccacgcgcacaagtaccccagtcagctttcaggcggccaacagcaacgtgtggccatcgcccgggcactgtgtatggagccgaagatcatgctgttcgacgagcccacctcggcactggacccggaaatggtcggcgaagtgctggacgtgatggtgaagctggcgggtagtggcatgactatgctctgcgtgactcatgaaatgggttttgcccgtcaggtggccgagcgggtgttgttcctggaaggtgggcgcatcgttgaggacagtccgccggaaaccttcttcagcgcgccgaaaagcgagcgggcgaaggctttccttgcacagatcctgcactga

SEQ ID NO: 352939 - DNA, 1242 bp, Pseudomonas aeruginosa
atggactgcgacatccttgtcctgggcgccggcatcgtcggcgtctccaccgccctgcacctgcaggcgcgtggtcgtgacgtctgcttgatcgaccgcgccgagccgggctcgggcaccagccacggcaatgccggcctgatcgagcgcgccagtgtggtgccttatgccttcccacgcagcttcacggcgctgctgcgctatggcctaaaccgccagcctgatgtgcgctacagcccggcgtacttgccgaagatcgctccttggctcgcgtcctattggcaccactcatccgcgcaccggctggaagaggcgtcccgggccatgttgccgctggtagagcgctgcgtggcggagcatgaccaactggtggccgaggctgggctcggccatctgatccgcgcccggggctggatggacgtttaccgcagccccgaagccctgggccaggcggccaacgacgctcgcgccctcgaccgtttcggcctgcgcttcgatgtgctggatgggaccactctgcgccaactcgaaccacatcttggatccgtcgccgccggcggcatccactggcacgacccgaagacggtgctcgaccccggcgcgttggtgcgtggttacgccgagctcttcgtgcgtcggggggggcgcatcctcaagggcgatgccacttccttgcgccagcaggccggcggctggcaggtgcgtgccggcgaccgtgagctgctggcacgacagaccgtggtggcgatggggccgcaatcgggtgatctgttccgagccctgggctatcgaatcccgctggcgatcaaacgcggctaccacatgcactacgcgccggccgaaggcgctgagctgggccattccgtctgtgatgcccaaggcggctacgtgttggcgcccatggcgcggggcattcgcctgaccaccggcattgagtttgcccacccagacgatccggccaacgagatccagctgcgccgcgccgagcgcctggcccgcgagctgttccctttgggccagcgccgggacgctgagccctggctggggcgccgtccctgcctgccggatatgcgcccggtgataggcccggcgccggatcacccgggcctctggttcaacttcggtcacgcccaccacggcttgaccctgggcccggtcagtggccgcctgctggcggagatgatgactggcgcccgcccctttaccgacccgactccctatggcgcccagcgattccgctga

SEQ ID NO: 352940 - DNA, 705 bp, Pseudomonas aeruginosa
atgagcgaattcctgcatttcttcgtcgatcctgaactgctcgagcgctacggcccgggtctcctcaacggccttctggtgaccgcccaactcgtggcaatttcgttcagcctgggcctgctgttggggctgttgctggccctagcgcgcaactccggcagtcgccttctgcgtggcgtgagcggcggctacatctacctgctccggggaacgccgctgctggcccagttgttcctgctttactacggtgtcggctcgttccgcgagttctggcaggacgtggggctctggtggttctttcgagacgcctggtactgcgcactgctggccttcactttgaactccgccgcctaccaggccgagatcttccgcggcagtctgctcgccatcgcccccggtcagtacgaggcttgctcggcgctcgggctatcccgtgccaccaccttcttaaaggtggtgctgccgcaatcgatgctggtggccatcccgccgctgggcaacgagctgatcctgatgatcaaggccagcgctattgcctccctggtgaccatccacgacttaatgggcgtggccaaggcgggcttctcccgcaccttcgactttcagctctacttctgggccgcggtcctctatctggtgctggtcgaactgattcggcgcggtctgctacgggccgaggggcgcctgggccgccacctgcactag

SEQ ID NO: 352941 - DNA, 720 bp, Pseudomonas aeruginosa
atgttcgagcagttggctctcctttccctgggtgaaggcggctggggcatggccctgctggccggtgccctggtcactctttccttggcgctggcttgcgttccgctggggctttcactggggctgatcgtcgccctcggtgcgcgttcgcccagccgctggcggcgcgctctgtcttcggcattcgccacggtgttccgtggactgccggagctactgacactgttgatcgtctattacggctgccagattggcctgcagaaactgctggcccatttcggtcatcacactgaagtcaccttcaatgccttcctcgccgccatggtcgcctttagcctggtgtttgccgccttttccagccaggtctggctaggtgccttcaaggtggtgggaaagggtcagtacgaggcagccaaggtgctggggctttcgcgtgtgactacctttttcaaagtgatcctgccgcagctgacccgcattgccctgcctgggctttcgaataattggctgagcttgctcaaagacacgtctctggtgtcgaccatctctctggtggacgtgatgcgccagaccacgctagcggtgggcgccaccaaggaaccgatgctgttctacggctgtgcctgcctgatctacttgttcttctccgccctttccggtcgcgtcttcagctacgccgagaagcgctttagccttggccacaggagtcaacgcgcatga

SEQ ID NO: 352942 - DNA, 759 bp, Pseudomonas aeruginosa
atgaaacgactcacccgtttggcactggtttcccttgcattctgcggcttcgtctcgaacgcccaggctgagaccctgcgcatcgccatggatgggacctacccacccttcaactatgtggactcgaacaaccagttgcacggcttcgacgtggacatctccaacgctctgtgtgcgaagttgaaggtcgaatgccaactggtaatccaagattgggacggcatcattcccgcgctgctggccaagaaatacgatgccgtagttgcttccatggcaattaccgaggagcgtcagaagaaggtagccttcaccgaccactactaccggacccgtctagccgttgcggtggccaagggttctgagctgaaggacacccgccccgagagcttcaagggcctggtggtcggcgcccagtcgtccaccacccagggtatgtatgccgaggatgtgttaggtgccgccggtgctgaggtgaagctctaccctaaccaggatgaggcacaggctgacctgaataccggccgcctggacgccgtagtcaacgacaagttccctctgatccactggctggctaatgacggcaaggactgctgctccctactgggcgacctccagggctccgacgacgacgtggccatcgctgtgcgccaggatgacaacctcctgcgcgagcgtctgaacaaagccctggcggagatggtcaaggacggcacctacaagcagatcgccagccgctacttccccttcgacatctactga

SEQ ID NO: 352943 - DNA, 1419 bp, Pseudomonas aeruginosa
atgcatgatcgtctgcagctatacattgacggcgcctgggtggtaccgcaggggccgggtctggccgaggtgcagaatccagacaccgaggaggtcattggccgcgtgccgctgggcggtgaagccgacgtgaaccgcgcggtagatgccgctcggcgagctttcccagcctggtcgcggacgccttccagtgtgcgtgccggctacatccgagccctggccaataaactcaaggcacacgccgatgagatggctgcactgatcaccgcagagctgggcatgccagttcagtggtgccgtatggtccaagtggacgggcccatccaggggttggagagttacattgaccaagccgcgcacatggacaaggtgcgtgaggtgggcaactcgttggtggtgaaggagccggttggtgtctgcgccttcatcaacccctggaattaccccctgcatcaactgatcggtaagctcgccccggctttggccgccggctgtacagtggtggtcaagccgagtcaggacactccgctgcatgctttcttactggccgacatgattcacgccatcggcctgccggcaggggttttcaacttggtcagtggaccaggctcgaaagtcggcgaagccctggcgcggcatcctgaggtggacatggtgtccttcaccggctcaaccggcgctggcatcaaggtgtcggaagctgcagcgcagacggtgaagcgtgtgtgcttggagctggggggcaagtcgcctttcctgatcactgcggatgctgatctggacgctgccgtgcgcttcggtgtgcgggacgtgatgatcaactccgggcagacctgtactgcgttgacccgcatgctgctgccagccagccgctatgccgaagcgctggaaatcgcgcgcgctgaggctgaagcactgaagctgggcgacccgcttaatgcagagagtttcctcggcccaatgtgctcagctggccagcgccgtactgtcctggactacattcgggtgggccaggaagagggcgcacgcatgatctgcggtggtgctgaacgaccattcggcctcgatcgtggccactacgtgcagccaacccttttcgccgacgtgaacaaccagatgcgcatagcccgcgaggaaatcttcggaccggtgctctgcatgatcccctatgccgatgaggccgaagcgttgcgcattgcaaacgactcgccgttcggcttgtccagtgccgtctgggctggcgaccgggagcaggggctgcatctcgctcgacagatgcgtgcaggccaatgcttcgtgaacggcggtgccttcaattaccgggctcctttcggcggctacaagcagtccggtaacggtcgcgagtggggtgaagaaggtctggccgagttcgtggaacacaaggccatccagctctga

SEQ ID NO: 352944 - DNA, 1191 bp, Pseudomonas aeruginosa
atgcgctattcaaatctaacccaacgcatcgccggcgatggagccgccgcgtggactattcactatcgtgctcaagagcgtatcgaaaaaggggatgacatccttctcctgtcccaaggtgatccggacttcgatactcctgcccctatcgtacaggcagccatcgacagcctgctggcgggtaacactcattaccctgaagttcgtgggcagcgaaagtttcgcgaagcgattgcgcgccgtcacacgtctcgtagtggccatgcagtcgaggcgaacaacgtcgtagtcctggctggggcgcagtgcgctctctactgcgtaacgcagtgcgtacttaaccccggggacgaggtaatcgtcgctgagccgatgtacgtcacgtacgaagcggtgtttggtgcttgtggcgccaaggtgatcccagtttcggtgcgttcagagaatggttttcgggtgcaggcagaggacgttgcagcactgatcacgccgcgcacccgcgcaatagcgctgaacagtccgcataacccgtccggtgcgagcttgcctcgagcgacttgggaggcgatagccgaactatgcatccgtcatgacctatgggtgatctccgacgaggtctatagcgagctgctttacgatggcgagcacataagccctgccagcctgccgggcatggccgagcgcacagcgaccatcaatagcctttcgaagtctcatgccatgactggttggcgggttggttgggtcgttgggccgttggagctttgcgagcacctggagaatcttgctctgtgcatgctctatggttcgccagatttcgtacaagacgcagcctgcacggcgctggaggcaaacctgccggaagtagaggcaatgcgtgatgcctatcgtcaacgccgtgacctggtcatcgattgtctgaaggatagtgctggcattcgaactgtccgaccggatggggggatgttcgtcatggtcgacatccgtgccactggtctctcggcgcaagaattctccaaccttttgctggatcaccacggtgtgtccgtactggccggcgaggccttcggccctagcgccgccgggcatatccgactgggtcttgtacttggcgaagagccactgcgcgaggcctgccggcgcatcgccctgtgcgccgcggatctgttgaaggagaaacgctatgcatga

SEQ ID NO: 352945 - DNA, 537 bp, Pseudomonas aeruginosa
ttgcagcggatccataagggaatcattcagcggatcgtcgccaccgtgccggacgaggcgttcattgccagtgacatgacccagttggcctacaccgctaattatctgtacccaagcaaggccccccgtcgctggctgcaccccaatggttacggcaccctgggctatggcgtgccagccggcattggtgcgaagtttggcgcccccgaccgtccaggtttggttctggtcggcgatggtgggtttctctacaccgcccaggaccttgccactgcaaccgaggagctgaacagcccgttagtggtgttgctgtggaacaacgatgcgctggggcagattcgagacgacatgatcggtcgggatatcgagccgatcggcgtgctgcctcgcaacccggatttcgctctactcgcccaggcatacggttgtgttctgcgccagcctcggaaccttgatgagctggaaagctacctgcgcgacggctttgcccatcccggtgtgacattgatcgaactgaggcacgcctgcgcttgctga

SEQ ID NO: 352946 - DNA, 1122 bp, Pseudomonas aeruginosa
atgatcggttgggtttactggatgagttgggttagcactgtcggcttggagttcactgcggccggtatgctcatgactcgttggtttcctgatgtgcctatctgggcctggtcgggcttcttcgttgttgtgttgttctctctcaatgccttggccactcgcgccttcggtgaggccgagtactggtttgctggtgtaaaggtcgcagccattctcgccttcattgtgattggtgttctggtgattttcggcggcttgccgctcaagagcggcgagccagctccgatgatgacaaacctcatcggcgaccagctttttcccaatgggctgtccgctgtgttcgcggtgatgatgaccgtcgtatacgccttccagggttgcgagatcatgggtgttgctgctggagagaccgacaacccagagaaaagcattccgcgcgcggtgcgtaatgtggttttccgcgtattgatcttctacgttctggctgttctggtattggcggccattatcccttggcagcaggcagggcttgtggaaagccccttcgtccaggtatttgatctggtaggaattccctacgccgctgacatcatgaactttgtgattctcaccgcgattctctcggtgggtaactccggcctgtacgcttccacccgtatcctttggtccatgtccaattctggcatggccccgcgcggactgtcgaagctcacctctcgcggagtgccgatttacgcgcttctgatcagtttggccttcgcgctgctctcactgctgaccagcgtggtagctgctgacacattgttcatggtgcttatggcggtgagtggcatggccggcacagtgacttggatcgtcatcgcgctggcgcaataccgctttcgtcgagagcatatggccaagggtggaagtgtcagcgatctgaagtttgcttcgccgctgttcccagtaattccgatagcgtgcatcggcctctgcagcgtgctcttgatcttccttgctatcgacccggtgcagcgcacctcgttgtactggggctgcggcttcattgcagcctgctacttggcctactacctgctccgacgaaaacactcgcaagagctggtcgctgctgaagcgtga

SEQ ID NO: 352947 - DNA, 1392 bp, Pseudomonas aeruginosa
  misc_feature (921)..(921): n is a, c, g, or t
atgttgttaatgcttgatcccgcctcggtcacgcctctggtttctcagatagtggaggggatagcgctggccatccatgagcagcgcttacgtccgggggccaagctgccttctatccgcaagttcgccgagagccacggcgttagccacttcaccgttgccgaggcctacgatcgcctcgtggcccgcggctgcctgaacaccgtgcccaatgccggctattacgtgcgcggccaggtcgctgaggatgcgcgcgacgcggaggatgctccggagtttgacttcgatgcccacctgctgttgcacaaggcgttccaaccgcttggaatggaactgcgccccggcattggccttctgcccgagcactggatagacagtgagggtctgttgcgcggcctgcggagcctggcgcgcgagaatcctattcagtacggcaactacggccagagcaaaggcaaccagcgccttcgtggcaagcttgccgaccgcctggctgacgcaggagttgccgccggtcccgaacaactactgctgaccagcggtgccagccaggcgcttgatctggcagttcggtacctggtgcaacgcggcgatccggtattggtggatgagcccggataccagcacctcttcctcaacctgcgcctgcagggtgcccggctgctgggtgttcctcgcaccgtcgatggcctggacctggagcgtttggagcaactggcaagcgagcaccggccgaaggtctatttcactcaggcacgactgcatagccctaccgggaccagcctgtcccttgctgcaagccatcgcttgctgcaattggcggagaaatacgatttcctgattgtcgagaatgacatctacgctgacctcgatccctccggtcaattggtgctggctaacctcgatcagttggcacgggtnatctacatcagcagcctgtccaaggtaattgcccctgcgctgcgggttggcttcatagcagcgcacccggagctgattgaggaattggtgccgctgaagatcgttagcggcctgaccagttcggagctcaccgagactctggctctggacattctgctccagggccgccaacgcaaacacgtgcgccagctgcgcgaacagctcagcgaggctcacgaaagcgtggcgcggcgccttgaggcggccggtctggagcttttccacgaaccgcacgccggcatgttcctctgggcccgccacagggcagtggctgacgcgacgcaactcgcccggcaagccaaggaagcgaagatccttctgttccctggccagctgtttatgcctgatggccgcaatgtaccttggatgcgcttcaatgttggccactcattggacgcgcgactctacgaattcctggctcgacagaactga

SEQ ID NO: 352948 - DNA, 861 bp, Pseudomonas aeruginosa
atgttcacgccggctgcaaccacacttacaacagtacttctgcctcctgaacgaaaaggctttgcactatcgctaatattcggtggcatgacggtctcacaagccgttggtgtgccagtgacgtcctggattgccgaggctttcggctggcgctatgcgttttactttgtcacgctgttcggtttgatcgccctgatgctcctcacaatcatcttgtccggaatctcccacgctagcccccagatcaaaaagcaggccctacagatggatgttccgaaggtgatatacggattactttccgttaccttcatgatcgtggcagcagaattcgtcgtttattcttatctcagcgttctgttgtctgatacaaaatttggaatcattccggtcttaccgagcgtgctgttcgcctatggtgtcggcgccgtggttggtaatatcgccaccggctacctgacggacaggatcggcccggccaacgttcttcttggtgcaatcctgacacagaccggtctgctgattgcgctggttactctccgggacaatgggcctttggtcatcggaatcggcctcctatggggcattgtcagctacatgtacctggttccgattcagcatcgcttgttgagttacgccggcaagcagtcgagtatttttctagcgatcaacagttcgatcatctacatcggcatcggggccggaggctggataggcggtctattgctcacgaggctgggaatccccttccttgcgatatttacaggcattgtcgggctgtcggccctggcaagcgctgtcatagtgatgcggcgtccagttaacaactccgccacaggcgacgctctgtcgcaagtatcctga

SEQ ID NO: 352949 - DNA, 1380 bp, Pseudomonas aeruginosa
atgagccaatcaaatattttgcttgctaaaaaggacgtacaacatcatctccatccttacaccgatgcacgcctgcaccaggacgtgggtccgctgatcattgatcgcggtgaaggtgtttatgtctttgatgtcgagggtaaacgctacatcgaggctatgtctggcctgtggagtgttgcgctaggtttcagcaatgagcgcttggttaaggctgccgagcagcaaatgcgtaagttgcccttctatcatatctttacccataagggacatggtccaagtatcgagcttgcggagaagctgatagagatcgctcctgtgccaatgagtaaagtgttcttcacaaactctggctctgaagcgaatgataccgtcgtgaaaatgatctggtatcgaaacaatgctcttggtaagcctgagaagaaaaaattcatcagccgactgaatgcatatcacggcatcaccgctgttagcgccagtctgacagggcttccggttaatcagcgtggctttgatgtgccgctgcctggttttcatcatgttagttgcccgcatttttatcgtaatggccaaccaggtgaaactgaagagcagtttgcagatcgtatggctgctgaactggagagcgtcattctccgagaaggaccggaaactatcgctgccttctacggcgagccgcttatgggggcgggtggtgtcattgtgccgccgcgtacctattgggagaagatgcaggctgtttgcagaaaatatgacattttgatcgttgcggacgaggttatctgtggcttcggtcgtacaggaaaaatgtttggctgcgagacattcgggatccagcctgatgttatggttatctccaaacagatgtcttcttcgtatcaaccgatcgctgcaatcttgattaacgagaaggtatttgaaggtatcgccgatcagagtcgtgctcttggtactctgggacacggattcacggctagtggccatccggtcgcaagcgctgttgcattggagaatattaagattatccaagagcaaaatctcgttgggcatgctgctgaaatgggcgagctgctacgagctaagttggcgggcttcgcggatcatccgatggtaggtgaagtgcgcgggtgtggcttgattgctgccgtggaacttgtcacagatcgtaaaactaaagctccattcgaaaccgtaggtcgactgggtcgcttcttggccgctcgtgctcaggcgcatggcatgattacgcggcctatcggtgattcgatcgctttctgcccacctttgatttcgacgaaacaggaaatccaagagatagcagatatctttggcaaagcgtttgaggacaccgaacgctggttcagtcaaggtggcaagtaa

SEQ ID NO: 352950 - DNA, 1443 bp, Pseudomonas aeruginosa
atgctcagcaatccgatcttgtttcgtcagcaggcctatattgatggcgcctgggttgattcgagcaatggtctaaccatcaaggtcaataaccctgccactggcgaattcatcggtactgttcccaggctgggggctgcagaaactcgtttggcaattgaggccgcggatcgcgcattacctgcttggcgagccttgacggccaaggagcgggcagcaaaattgcgccgctggtttgagttgctgatgacaaaccttgaggatcttgcgcgtctgatgacgatggagcaggggaagcctcttgttgagtcccgaagcgagattgcatacgcggcctcattcattgagtggtttgctgaggaaggtaagcgcatttacggtgacaccattcctgcgcatcagtccgataagcgtctgcttgtccttaagcagccaataggtgttaccgcagctattacgccgtggaacttcccggctgcgatgattacccgaaaggcagggccagcattagcggccggttgcactatggtcatcaaacccgcatcccagacgcctttctctgcactggcgatggctgctttggctgaacaggccggaattccgcgcggtgtactgagtgtggtgactggcagcgctggtgaggttggcggtgagctgaccagtaatcccatcgtgcgcaagttgtctttcactggctccaccgagatcggtcggcagcttatggctgagtgcgcgaaagacatcaaaaaggtgtccctggagcttggcggaaacgcgcccttcatcgtttttgaggatgcggatctggatgcggcggtggagggggctctagcgtcgaaatatcgcaatgctggccagacatgtgtatgcgccaatcgtttgtacatccatgatggtgtttatgacgcattcactgacaaactcaaactcgctgtggcaaagctgaagattggcaatggcctcgatgaaggtataacaactggccctcttattgatgagaaagccattgccaaagtggaagagcacattgtggatgcagtcgctctgggagcatgtgtcgtcgctggtggcaacaggattggcgggaatttcttcgagcctacgatccttgtaaatgtccccgccaatgcaaaggttgccaaagaggaaacctttgggccgctcgcgccgttgttccgcttcactaatgaggccgatttaatcgctcaagcgaatgacaccgaatatggcttggctgcgtatttttactcgcgcgatctgggtcgagttttccgcgttggtgaagccttggagtacggaattgtcggggttaataccgggataatttcatctgaaacagcaccctttggcggtattaaggcatctggtattgggcgtgagggatccaagtatgggattgaagattatctagagatcaaatatctctgccttggcggaatttga

SEQ ID NO: 352951 - DNA, 1026 bp, Pseudomonas aeruginosa
atgaaaaaaacgctaattgcgaccctgatgatgggcctgacttcttacgccttggccgctgacgtgacggtgatttcgtttggcggcaccgccaaggaaacgcagaccgaggcgtactacaagccttttgaaaaggcctccggcaacaaggtgatcgccggcgaatacaacggtgagatgggcatgatcaaggccatggtcgatgtcggcaacgtctcctgggatgtggtccaagtcgagggatcagaggtgctccgtggctgcgacgaggggttgttcgagcaactggatcagaagcggctgggcaactccagcgactttattcaaggaaccttttccgactgcggtgctggcctgttggtctggtcgatggtcatggcctacgacgccaagcgcctacccaccgcaccgaccggttgggcagatttctgggacacgcagaaattccctggcaagcgtgcgctgcgcaagggtgccaagtacaacctagagatcgccttgttggctgatggcgtgccaaaggaagacttgtacaaggtgctgtccactcccgcaggcatagatcgtgccttccgcaagctggaccaaatcaagtcgtcggtccagtggtgggaatctggcgcacaacccttgcagttcctggccagcggcgacgtggtaatgagtgcagcctacaacggccgggtgtttgctgcgcagggggaaggtgcgccaatgaagatggtgtggaacggcagcatctacgccatcgactattgggcaatccccaaaggtagtccggacaagcaagcggccgaggatttcatagccttatcgttgcgtcctgagcagcagaagatcttcaccacgaaaatgggctacggctcaaccaacctgaaaaccactgcgctactcgatccagctctacaggaacgtctgaatacttccccggagaacttggagcaggcggtgccgctggacttcgccttctgggttgaccacggcgaggacttggaagagcgcttcaacgcttgggctgccaggtaa

SEQ ID NO: 352952 - DNA, 198 bp, Pseudomonas aeruginosa
atgcgcgacacagcttacattttcgctaaagaatggccggtccaccataacctggtcgcgttgggctgcgcgatctcacgctgtcgccggattgaccagttctctgcttggttcccgggcgaggtgtcgcgcctggttcgcggcttcattccgcacctggcaatgattctgcgtaatcgaggcgagcccgtcacctag

SEQ ID NO: 352953 - DNA, 1392 bp, Pseudomonas aeruginosa
atgttgttaatgcttgatcccacctcggtcactcctctggtgtctcagatcgtggaggggatagcgctggccatccaggagcagcgcttacgtccgggggccaagctgccttccatccgcaagttcgccgagagccacggcgttagccacttcaccgttgccgaggcctacgatcgcctcgtggcccgcggctgcctgaacaccgtgcccaatgccggctattacgtgcgcggccaggtcgctgaggatgcgcgcgacgcggaggatgctccggagtttgacttcgatgcccacctgctgttgcacaaggcgttccagccgcttggaatggaactgcgccccggcattggccttctgcccgagcactggatagacagtgagggtctgttgcgcggcctgcggcgcctggcgcgcgagaatcctattcagtacggcaactacggccagagcaaaggcaaccagcgccttcgtggcaagcttgccgaccgcctggctgacgcaggagttgccgccggtcccgaacaactactgctgaccagcggtgccagccaggcgcttgatctggcagttcggtacctggtgcaacgcggcgatccggtattggtggatgagcccggataccagcacctcttcctcaacctgcgcctgcagggtgcccggctgctgggtgttcctcgcaccgtcgatggcctggacctggagcgtttggagcaactggcaagcgagcaccggccgaaggtctatttcactcaggcacgactgcatagccctaccgggaccagcctgtcccttgctgcaagccatcgcttgctgcaattggcggagaaatacgatttcctgattgtcgagaatgacatctacgctgacctcgatccctccggtcaattggtgctggctaacctcgatcagttggcacgggtgatctacatcagcagcctgtccaaggtaattgcccctgcgctgcgggttggcttcatagcagcgcacccggagctgattgaggaattggtgccgctgaagatcgttagcggcctgaccagttcggagctcaccgagactctggctctggacattctgctccagggccgccaacgcaaacacgtgcgccagctgcgcgaacagctcagcgaggctcacgaaagcgtggcgcggcgccttgaggcggccggtctggagcttttccacgaaccgcacgccggcatgttcctctgggcccgccacagggcagtggctgacgcgacgcaactcgcccggcaagccaaggaagcgaagatccttctgttccctggccagctgtttatgcctgatggccgcaatgtaccttggatgcgcttcaatgttggccactcattggacgcgcgactctacgaattcctggctcgacagaactga

SEQ ID NO: 352954 - DNA, 897 bp, Pseudomonas aeruginosa
atgtcccaacgtctcttagtaaccggcgcttccggcaatcttggtcgtcgcgtagtcgagtcactgctggaaataaacgccggtcccatcgttgccagcacgcgcgatccgtccaagttggctgaccttgccgctaagggggtcgaagtccgcgctgccgacttcgaccacccggaattcctgtcttcggcttttgctggtatcgaccgcatgttgctgattagcaccgatgccatccacgtgcccggtcggcgtctggcccagcacaaggctgctatcgccgcggccgagagagctggagtcaggcacatcgtctatacatcgttgccgtcgccgcaacctagcagcgagagtgccgtggaagacgatcatttctggactgagcaggccatcgccgcaagctcgatgagttggaccttcatgcgccatgggctctatgccgaaaacatgctgtggatgctgacgcaggcaattgccagtggcgtattgaccaccgcgacggccaaccgagggcgtcactgggttacgcgtgaagactgcgcccgggccgatgcggcggtactagcttcgggcgacagctctaaccggattatcgaggtcaccggaccggcagccgtgaccgcagaagaaattgccgcgttcgtgtcagagctgacgggtaagcagttggtgcatgaggaagtcacggcggctgcactgcgtgatgtcatggctggaactggcctgccacgtacgttaattggtgcgctggtcgggttcgatcaggccacggccattggcttccatgccactgtcacgcaggccgtcgaagagttgacgggccgcaagcctacgaccatgcgagatttcctttctgccaacaaggtagcgctgcaagccacgagggagtctgcgtaa

SEQ ID NO: 352955 - DNA, 396 bp, Pseudomonas aeruginosa
atgccggacgagtgccttttcgtacgcgaaatcctcgaccgggtcggtgacaagtggagtctttgcatcgtgggcgccttgcgagcggggcccaaacgcttcaatgagctcaagcgcgccgtcgagggcatttctcagcgcatgctgactctcacacttcgtggactggagcgcgacggattaattaagcgcaagatgtacccaacgatcccgccgcgagtggattacgaactgactgatcttggtcagaccctgttggaaccggtgctcgccctcgttgcctgggcagaacagaacaaggtggtcattcagggcgcgcgatcgaactatgacgcaatgagcgggacgtcgtcgccaccggctccactgcctttgcaggcgcactctgacgcgtga

SEQ ID NO: 352956 - DNA, 1239 bp, Pseudomonas aeruginosa
atgggtgcactaaccggataccgcgtactggacctgagtcgagttttggccggcccctggtgtggccagctgctggctgacctgggagcggaagtcatcaaaatcgaacggcctggcgtgggggacgacacccgagggtgggggcctccctacatgaagaacgctgacggttctgacagctccgaggcgtcctactaccagtccgccaaccgcaataagctttcggtagcactgaatctcgccacgcctgaagggcaagagttggttcgtgcgatggtttgtgagtgcgatgtactgatcgaaaactataaggctggttcactggcgaagtacggactcgactacgacagtctgtcgaagctcaatccgcggctggtgtactgctcgatcaccggttttggtcagaccggcccgcgttcggaagagcctggctatgacttcatcatccagggcatgggtgggctgatgagcatcaccggcgagaaggatgggataccgggcgccggtccccagaaggtcggggttgccgtggctgatttgatgactggtctgtattccaccatcgcgattcaggctgcattgctcgcgcgtcagaagactggccgtgggcagcactgtgacatggcactgttggacgtgcaggtcgcagcactgggtaatcagagccagaactacctgagcaccgagcgttcccccgggcgtcagggcaatgcgcacgtcaacattgtcccttaccaagtattttccgcccaggaccgggacttcatcatcgcttgcggtaacgacggccagttcgttgccttgtgcaatgtcatcggccttcctgacctgccgagtgatccgcgcttcgcgaaaaatgccgatcgagtacgaaaccgcgaggcgatcgtcagcatgcttgccgaacacttccttagtgataccgccgacagctgggtagccaaaattcacgcggccaaggtaccggtaggagtcatcaacgatatcggtcgggcactggccgaaccacaagtggtggctcgtgaaatgctggtcgatatcccccatgcgctgaatcccgagttcaggatggttggtagtccggtgaagctgtccgatacgcccgtccagtacgtgcgcccagcaccacgtcttggtgagcacaccgacgtagtactgaagcgtcagcttggtctcagcgatgcccgtctgagtgagctcaaggcggctggggtgatcgaacagctcggggagctctga

SEQ ID NO: 352957 - DNA, 1203 bp, Pseudomonas aeruginosa
atgctcaatgcatttctgtatgccggcctgcgtacaccctttgggcgccatggcggtgcacttgctccggttcgtccggacgatctcgctgctcttgtgattcgtgaactgctggcccgaaatggcgtgccgggtgacgctgttgaggatgtgatcctcggcaacaccaaccaggccggcgaagacagccgaaacattgcccgtcatgccgccttgctggccggcctgccagtgactgtgccggggcagacggttaaccgcctgtgcgccagcggcttggcggcggtaatcgatgccgcgcgggcggtgacctgcggtgagggcgatctgtttgtcgccggtggcgtggaaagcatgtctcgcgcgccattcgtgattgccaaggccgaagcggcctacagccgtgacttcacagcgttcgacagtacgatcggtgcacgctttcccaacccgcgaatcgttgaggcttttggcaacgacagcatgccgcagactggcgacaacgtggctcatgaatatggcatcagccgcgaggaggccgaccgtttcgccgcagcttcccaagcgcgctacgaagcggctcgaagtctcggtttcttcgccgacgagattatgcctgtcagtgtgcccaccggccgtaagacgccgcccagaatcgtcgagcatgacgagcatcctcgtcccgagtccgaccaggctgccctggcacggctgcggccactgttcgacggtggggttgtcaccgcaggcaatgcatctggtgtgaacgatggtgcagcagctttgctgatcggttctgctgcagcaggtgagcgcttcggccttaaaccaatggcccgcattctctccgcagccgcggtcggtgtagagccgcgcatcatgggcgtcggaccggttgaggcgatcaacaaggcgcttcagcgcgccgggctgagtctggcagacatggacatcattgagatcaacgaggccttcgcctcccaggtactgggttgcctgcgcggactcggcgttgccttcgacgatattcgcgtaaatcccaatggtggtgcaattgcagtggggcacccgctgggtgcttccggtgcgcggcttgccctaagtgcagcacgagagttgcagtgcagtggtgggcgctatgcggttgtgagtctgtgcatcggtgtcggccaggggctggcgatggtgatcgagcgtgtgtaa

SEQ ID NO: 352958 - DNA, 1530 bp, Pseudomonas aeruginosa
atgacacgcagtatcgagcgtatggccatcgtcggtaccggtgtcatgggcaccggcattgcccagatcgccgtacaggctggcatccaggttcaactattcgatgcccgggagggcgctgcacaggctgcctgcgacaacctcaagaggaccttcgacaagttggtggagaagggcaagattccggctgacgaagcacaggcagcagtggagcgactacaggtcgcgaccgccttggagcgactgagcgatgcccaattggtggtggaagccatcatcgagcggttggacataaagcagaaactcctcgctgagctggaggtagtagttgccgccgaatgcattttggctaccaatacatcgtcgctgtcggtgaccagtattgcccgaaactgccgtcatcccgagcgcgtggctggtttccatttcttcaacccggtaccgctgatgaaagtcgtcgaagtgattgacggcttagctaccgatccggccgtaggtgattgcttgcaggcgcttgcgacgcgcatggggcaccgtggcatccgcgcgaaggatactcccggattcatcatcaaccacgctggccgcgcctacagcacagaggcgctgcagatcctcaaggagggcgtggctgagccagccgatatcgatcgcatcctgcgcgagggtatgggcttccgtatggggccgctggagctcttcgatctcactgctcttgatgtctcgcatccagtaatcgagtcgatctacaaccagttctatcaggatcctcgctatcggccggccgcgcttacacgcctgatgcttgaggcagggcacgtagggcgcaaggttggacgcggcttctaccgctatcaggatgggcagatgatcgatgctcccgccccgcagttggtgccgacggtgcaggttctaccaccggtttggatcggggcagagaatgagcaagatggcgtcaccctgggcgcgttggtgcagagattgggcgggcgtttggagcggggcgagcacccctccgaggaagcactctgcttgttggcgccttatggccgtgatgcaagcagcgcctgtctgcgcttcggcaccgatccggcacgcactatatgcatcgacatgctgctggacctacagcgccaccgctgcctgatgcagacgcccgcgactgcaccaatcatgcgtgaagctgctcatgcattgttggctggggacggcgtcggcgtgaccgttatcaacgacagtgttggtttcgtcgcccagcgcgtaatggccatgatcgttaacttggctggcgacatcgttcagcaaaggatctccaccgtggatgacctggatgagggggtgcgtcgtggtctggggtatccgcatgggccacttgcttggggtgatgagttgggcgcgaagcgcctgctggaaattcttgagcgcatgtcctacctgactggtgatccgcgctatcgccccggaccctggctgcggcgccgagctgagctgggactttccctgcgccaacccgaaccggcgcttgcctaa

SEQ ID NO: 352959 - DNA, 786 bp, Pseudomonas aeruginosa
atgagttcccaagaagacaccctcgtccatgtgcagattcaagagaacggcgtggcgattgtccgcattgaccgtcctgaggcgcgtaacgcgcttaacacccgcgtgcgtcagcagttggccgagcatttccgtgctcttgccagcgactcgcgagtgcgggcaatcgtcctgaccggtggcgagagttgcttcgtcgccggagctgacattcgcgagttcgcccaggctaccccgatcgagatgtaccttcggcataccgagtacttgtgggaggcgatcagccgctgcccgaagccagtcattgcagcagtgaatggcttcgccttgggcggaggctgcgaacttgccatgcattgcgatctcatcgttgccggtgagtcggcccgattcggtcagcctgaggtgaagctggggctcatgcccggggccggtggcacccagcgcttgattcgcgcggtaggcaaattccatgcgatgcgaatcgccctgaccggctgcttagttaaggcccctgaagcgttggccatcggcatggtcagtgaagttgtgagcgatgatcggacattgtcgcgagcgcttgagctcgcctcggagattgcagcactaccgccgttggcagtagcgcagatcaaagaggtgctgctgtgcggtgccgatctgccgttggacagcgcgctgacgctggagcgcaaggctttccagctgctgtttgactcgcaagaccaaaaggaaggcgcagccgccttcctggaaaaacgtgaagccatcttcaagggggagtga

SEQ ID NO: 352960 - DNA, 867 bp, Pseudomonas aeruginosa
atgcgtcgcaacagggtggatcgggatgacggcgggcaatctagccatgagagcgaacttgccctcctggaaaagggcctgcttgaccccatcacagcgatgaacgaggaggagaacagtggtcagttcgtcactgcgctagcccgtggtcttgaactgatgcgttgcttcagcccacgcgaaaacgtgctcggaaatcaggaattggctcgtatgaccggcctacccaagccgaccgtgacgcggctgaccaacacgctgatgcgcttgggctgtctgaagcgagagctgcactcgggcaagtatcagctggatgtaggcgtgctcggatttggctacgcgatgctctccaacctgtcgatcaggactgtcgcgcatccactgatggaacagctggcaaaccatgcgcaggctgccgttgccatggcagcccgcgacagattgcagatggtttacctggatgtagtacagggccagggaaacatgacgatgcgcaggcagatcggaacctacctgccgctagcgcagagctcggtaggccgagcatgcctggccgcgatgccggagaacgagcgggaattcctgcttgaacatatgcgtcagcgcgaagttgaacagtggccagccctgcgcaaagggctggagcgcgcgctcagggattacgccgattacggctattgcctgtcgatcggcgagtggcaccgcgacgtcaactctgtcgctgtgcccttggtacatccgcagtatgggctgctggccttcaactgcggcggaccgagcttccagctaccacgcgagaagctcgaagacgatatcgggcctcgcctgatcaacatggttaacaacattggcgccgccgctcgctga

SEQ ID NO: 352961 - DNA, 915 bp, Pseudomonas aeruginosa
atgcagcgcacacgaattccacctatgtccgcattgatcgctttcgaagccgcagctcgtcacgagagcttcaccctcgctgcccgggagttgtcattgaccgaaagcgcagtgtctcggcaggtcaatggactcgaggcgaatctcaacattcggctgtttgtacgagtcaagcagcgggtaatgctgaccaaacctggaaggctgtatagcgagcaggtgcgagccgcgctgcgaaaaatcgaacgagacactctgtctatcgccgcccacggcacgggagaggggagtctcgagttagcagtgttgccaacctttgccacggaatggctgataccacgacttccaagcttttacgcacaacatccgggaatgaaagtgaatatgggggtacggacgaacccattttcttttgatgaagagcactttgaggctgctatacaccatggcaagcctgtctggccacgcgcgacttcagatctcttgttcggcgaaacaatgattgtaatcgctcggagtgatctaatcggcgatagcatcaaggagccagctgacgttctaaagtttccacttctatattcaacaactcgccctgagtcatggcggcagtggttcgatgcagcgcaaattccagaggatgcagttcccgtgcagagcgttggattcgagctacattcaatggtgatccgagcggcagaggctggcttgggtatagcattggtgccggagttttttatctctgacgctgtttgggcgagtggtgttgttcgtgcgcaccaattatccatccccgctgcttattcttactatttggtctatccgaacgacatgcggcatagcggcccgttagaggctttccgggagtggcttctcgatgaggctaagatatttgacgagaagctaaaaggtcactga

SEQ ID NO: 352962 - DNA, 1221 bp, Pseudomonas aeruginosa
atgtacagcttttcccctgccttcgttaaccccatgagctctcccattcgggagctgttcaagtatctcagcgagccagggatgatttcctttgcgggcggatacccagatccggctctgttcgacgtggaaggcctacaagaggcttcggtacgagcgttcgcaaacagccgcacctgcctccaatatggcagcactgatggaggtccggagataaaggcccaaatcgtccgactcatgcagggtagaggcgtgagcgcccagccggagaacgtcatcgtcacgacgggttcgcaacaggcattcgacttgctcctgcgggtgcttctggacattggtgatcacgtgtttgtcgagcaacccacctacacaaccaatatccaagcgctgcgtacccaccaggcgcgaatgacgcccgtgcctgtggatgcggacggattggatgtcacgtcgctcgagcgcctcctcgagtccgcagaggctgctgccgacttgcctaagctggtctacacagttccgaccttcggcaatccctcgggagcaactctttcggtggagcgtcgtcgccgactgctcgagctcgcagttcaatacaagttcgtgatcgtggaagacgacccgtacggcgatctgcgcttttcgggtgagcccgtaccttccttgcttgcgctggcggaacaagtgcctggtgcctccgactggatcgttcacctcgcgagcctttcgaagattgttgctcccggcatccgcatcggctgggcaattgcgccgagcgaaatcgcccgccgcctctatgttgcgaagcagagcgctgacgtgggcagttcgccctggactcagggtattgctgccgagtacctcgccagcggcaagctcgaggtgcatctcgacaagatccgccaggcctacggggcgaaatgccgtgccctgagccacgggctgaaagagctggtaggggatgcgatttctttccacgagccagcgggtggcatgttcatttgggccaagctcgccggtggctacaaagcggcggacctgctcaaagaagcgattcctcgcaaagtcattttcgtccccggaacaggtttccatgcagagaaccctgatccgtcaacgctgcgactctcgttcgccgcgccaagcctggatgacatttccgaaggggttcgcaggctggcgaaagcgatcaatgcggttcatgcaactgcccgaacgaattga

SEQ ID NO: 352963 - DNA, 1545 bp, Pseudomonas aeruginosa
atgaacggtgctaagagtttggttgagacattgctggcctcgggtgtggatacttgctttgcaaatcccgggaccagtgaaatgcactttgtcgccgcgctcgaccaaattcctggaatgaaatgcgtgctgggcctgcaggaaaacattgtgaccgggatggccgacggctacttccgtatcgcccgcaagcccgcttgtacgcttcttcattgcggccccggcctggcaaacggcatgggaaacctccacaacgctcgccgcgcacgcagcggtattgtgaatatcgttggtgatcaagccacctaccatcgccccttcgatgcaccgctcactgcggataccgacggcatggctcggactgtctcccaatgggttcacacaagcacccattctgctgatctcggtcgcgatgccgctttggctgtgcgcgctgcaaagacctatcccggtcaaattgcgacgctgatcctgcctgccgacgtttcttgggaggaaggtggcgtggtaggcgcgccgatgactccaccgacgcctcccgcagtcgacgggcatgcgattgagaacgctgcccgcatcctgcgtaacaacagccagaacgtgctaattctgcttgcaggccacggagtcctcagcgaggcacaggctcttgcatggcgcatcgcaagcgcgaccggcgcgaaagtcatggccgactacgttacctcccacctggcccggggccacggccggttgcaactggaacgggtcccctatgggatggatgcagccatcaccgcccttaagccctacgagcacatcatcctggtgaacgccaaggcgccggtaggcttcttcggatatccggatctgccctcgaagcagtactcccccaccgcccaactgcatgtgctcacgcggcccgaccaggatgcggtgggtgctctgaaagcgctggttgatgccctgggcgcccccgaggctgcgattcccaatgccggtccccgcccggaagctgtcagcgggaatcccactccagaaggcctggctcaaacgctggcggcgctgatgcccgagaatgcaatcatctctgatgaaagcatctcttacggtcgtgggttctacaaattcactcattccgcccccgcacacgactggctccacctggccggcggcgccattggcgacgggatgccagtagctactggtgctgcgctcggtgccggcaagcagcgtcgcgtgatcaacctgcaagcggatggttccgccatgtattccctgcagtccctctggacccaggcgcgcgaacagctcccggtcacgaccatcattctcaacaacagcaagtacaacattctgatcggcgagtacaagaatgtgggcgcggttccgggtgacaccgcaatgagcatgctggaccttggcaatccattcctcagctgggtcaagctggccaacggcatgggcgtcgaagctgcacgtgccacgacgctcgacgagtgcgctgacctcatgaagagcagcttcaatcgcaaaggtcccttcttgatcgagttgatggtttaa

SEQ ID NO: 352964 - DNA, 1440 bp, Pseudomonas aeruginosa
atgacatatccaaatactcaactcttcatcaacggcaagtggcaggatgctgcagacggccggaccatagccgtcctcaatccggccacgggcaaggaaattggccgcgtagcccacgccagcaggaccgacctcgacagggcgacggccacaacacttgaaggcttcaaggtatggcgcgacatgaccgcggctgcgcgcagccagatcatgcgccgcgcagccggcctgcttcgcgagcgtgccgaaaccatcgcgcaggtcctgacccaggaacaaggcaaacccgttcgcgaagcgaagggcgaggtgctcgccggtgcggacatcatcgaatggttcgcagaagagggcttccgagtttatgggcgggttgtaccttctcgaaatgacccggcaattcgccaaaccgtggtcagagacccggtaggcccggtagcagccttcacgccctggaacttccccatcaaccaactggtgctgaaggtcagcgcggcattggctgcggggtgctccgtcgtcgccaaagctgctgaggaaacgccagcggcacccgctgccctggtggccgctttcgccgatgcaggtcttccgccgggcgttcttggcctggtgtatggcgatccaggcgagatttccagctatctgatcgcccatccggcaatccgcaaagtcactttcactggctcgacccccgttggcaaacacctggcggcgctggcaggcacccatatgaagcgctgcacgatggagctgggcggccacgccccggtcatcatctgtgaggacgcggacatcgagctggccgccaaatccgcagcattcgccaagttccgaaatgctggccaggtctgcatctcgccgacgcggttcctggtccacgagagtgtcgcggatacctttgcgaaggcgctgagcaaacatgcgcagaacctgaaggtaggcaacggccttgaggaagggaccgaaatgggcccccttgccaactcccgccgggtgaccgcgatggaggaattcctgcaggacgccgagaccaagggcgcgcaaatcctggcggggggctcacgaatcggcgaagaaggcaacttctgggcccctaccgtactgatgaacgtgccactcgacgccaagatcttcaatgaagagcctttcggacccattgcgccgattcgcagctttaccgacttgaatgacgccatttcggaagcgaatcgactgtcgttcggcctggccgggtatgccttcaccagctccctgaagaatgccgacctgatctctcgtcgggttgaagtgggcatgttgtggatgaacatgccggcctcgaccagtcccgaactaccttttggaggcatcaaggattccggatacgggtccgagggcggcccggaggctctcgaggcctacctgaacgtccgctctgtcgtggtaaggaactgctga

SEQ ID NO: 352965 - DNA, 1092 bp, Pseudomonas aeruginosa
atggcattggccgccgctggccggcatatcatcaacatgggtattggtgagcctgacttcaccgccccgccgacagttgtcgaagcactggagcgagctgctcgaaatggtctgagcggctacaccgcgcctgccggcatcatgcagctacgcgaagcaatcgcccgctattacgacgagaacttcggcacccagctcgatccctcccgcgtcattcttaccgcaggagcatccagcgcgttgatcctcgcctgctctgtcctggtcgacagcggatcggaagtgctgctgccggatccgtgttactcgggtaatggcagtttcatcatcgcatccggcggcaaacccaaattcgtaccaaccagcgcagcaaatcgcttccagctctcggcacaggatgtacggaacaactggggccccgctacgcgaggtgtcttgattgcctcacctagcaacccgaccggaacctcgatcacgggctccgagctacgcgatctgcttggtgaggtccgagcccaggatggcttcaccatcatggatgagatttacctgggtctctcctacgacggccaagcgaagtcggcgctcacctatgatgacgacatcatcgtcatcagcagcttctccaagttcttccacatgaccggttggcgtcttggctggatgatcgtgccccagaatatggtgagcgtggtcgaacccatcgcctccagcatggcaatttgcgccccgaccctggcccagcatgccgcacttgcatgcttcgagcccgaggcaatgtccatctacgagcagcgtcgtgacgccttccgccagagacgggactatctggttcccgccctggagaagctgggcttctccatcccggtcaagcctgacggcgccttctacatctacgcggatattagcgagctcgggaccgatggcgtcagccttgcttatcgactcctgcgcgaagctggcgtctccacccttcccggcgtggagttcggttccgccccccaaagcagtcactccatgcggctttcctactgcaccagcatggatgaactccaagaagctgtttaccgcatcggcaaactactggcgtaa

SEQ ID NO: 352966 - DNA, 801 bp, Pseudomonas aeruginosa
atgaaaaaactcaaaccgactctcgtgaccggactcgctgcagtgttgctttccctggctgcagcttttgcaagtgccgaagatttgttcgacacggtcaagcaagccggagtcctaaagatcgcaatggaaggcacctacccgccctttgactatcgaaactcgaaaggcgaactcgagggtttcgacgtggacgttgcgaaggctcttgcagagcgcctccaggtgaaaccccagttcataaccactgaatgggccggcattctcggggggcttcaagcaggcaagttcgacgtaatcatcaaccaggtcacgatcacaccggagcgtcagaaggcgctcgatttcagccaaccctatgtctattcctccgttcagcttctgcaacgcaagggtgacgagcgggagttcaagtccctggctgatctgaaggagcacaaggttggcgtgacgattggcagtgtgtttgctgatgtagtcaaggcacagcccggagtcgtagttaagacctattcgggcaccccggaaggactgagcgatctggtgtctggccgaatcgacgcggtgctcaatgaccgcctgatgaacccgtatctgatccaaacctccggacttccgctccgctcgggtgcttccctgccggatggcggccaagaactcggcatcccattccgcaagggtaatccgaagttcgcggaggcaatcaattccgccctcgattcgatgagacaggacggaacgctcaagaacatcgcaatgaagtggttcggtactgacacatctgtccccgttacccgctga

SEQ ID NO: 352967 - DNA, 660 bp, Pseudomonas aeruginosa
atggacagcctagcgcttgttgttaacacgcttcccatcatgctgaacggggcgttgattacgttggaattcgccgtggcgtcgatggtgctgggcctaatcgtaggactggttgtcgcgatcatgcggatcagtgacaacctattcctttccggcatcgcacgggtatatgtcagcctgatgcgtggaactcccctacttgtccaaattttcgtcgtttattatggacttccgagcattggaatttcattagagccggtggctgccggtatctttaccttaacgctgaataccggtgcctatctgtccgagagtatgcgcggcgcgatccttggcatcagccgcggccagtgggctgcatctaatagcctcggtttcacgcacgttcaaacattgcgctacgtcgtgtgcccgcaagccttgcgtctcgccgtaccgagtctgggcaacacccttattggtctcatcaaagatacttcgctcgtgtctgtcatcactgtgaccgagctgctgcgcactacccaggaggctatcgcctcgtcgttccagcccctgcctctgtatgtggcagctgccgcgatctattggattctgagtaccgctctttcatggctacaggaacgggtcgagaagcggtgcgcactcgtcgcgaatcattga

SEQ ID NO: 352968 - DNA, 726 bp, Pseudomonas aeruginosa
atgattactctcgaaagcgtgtcgaaatggtacggcaatcatcaggttctcaccgattgcaatgctgctgttaccaagggtgaggtagtggtcgtctgcggcccttcgggttccggcaagtcgacactgatcaaaacgattaatgggctggagccaatccagaaaggccgcatcacggtcgacggcattcccctgagtacctctcccgccgagctgaataagctgcgcatgcgtgttggtatggtatttcagcactttgagctgttcccgcacctttccgtgacagaaaacctcacgcttcctcaaatcaaggtgctgcgacgaagccgcgatgaagcgcatgagattggcatgcgtctcctcgaccgtgtcgggatgagggcccatgcacacaagcacccgggacagttgtctggcggccagcaacagcgtgtggcaatcgcccgcgccttgtcgatgaacccggttgcgatgcttttcgacgagcctacgtctgcactggatccggaaatgatcaatgaggtgcttgatgtaatggttgagcttgcgcgcgacgggatgaccatggtttgcgttactcacgagatgggctttgcgcgcaaggtggcgaatcgcgtgctgttcatggacagcggggtgatcgttgaggatgcaaagtgcgacacgttctttagcacccctcgttcggagcgtgcacgcgacttcctcaacaagatcctgcactga

SEQ ID NO: 352969 - DNA, 1197 bp, Pseudomonas aeruginosa
atgagtctgttttctgccgtcgaaatggctccgcgcgaccccatcctgggtctcaacgaagcgttcaacgccgacccccgggccaccaagatcaacctgggcgtgggcgtctatcacaacgagcaaggccatatgccgctcctgcacgctgtagcggaagcggaaaatgtccgcatcgaagcccacgcaccccgtggctacctgccgatcgaaggcatcgccgcctacgaccaggccgtgcagaagctgctgttcggtgctgattccgaactcctggcacaaggccgcgtggtcaccacccaggcagtgggcggtaccggcgcgctgaagaccggcgccgacttcctcaagcgcctgctgccgaacgccgtcgtcgccatcagcgacccgagctgggagaaccaccgtgccctgttcgagtccgccggcttcccggtgcagaactatcgctactacgacgccgccaccaatggcgtgaaccgtgccggcctcctggaagacctcaaggccctgcccgcccgttccatcgtggtcctgcatgcctgctgccacaaccccaccggcgtggatctggaactggacgattggaaagctgtcctggaagtcctgcgcgagcgtgagcacgtgcccttcctcgacatcgcctaccagggctttggcgctggtatcgacgaagacgctttcgcagtgcgcctgctcgctgaatccggcctgcagctcttcgtttccagctctttctccaagtccttctccctctatggcgagcgcgtcggcgccctctccgtggtgaccagctccaaggaagaagccggccgcgtgctgtcccaggtcaaacgcgtgattcgcaccaactactccaagccgccgacccacggcgccaccgtggtcgctgcggtgctgaacagccccgaactgcgcgccatgtgggaagaagaactgggcgaaatgcgcagccgtatccacagcatgcgcctggccatggtcgagcaattggctagccaaggcgccaagcgtgacttcagcttcgtggcccgccagcgcggcatgttctcctactccggcctgaccgccgagcaggtggaacgcctgaagaacgagttcggcatctacgccgtcagcaccggccgcatctgcgtagccactctcaacaacagcaacctggaacgcgttacccgcgccatcgtccaggtgctctga

SEQ ID NO: 352970 - DNA, 1218 bp, Pseudomonas aeruginosa
atggcggacgtaaagaaggttgtcctggcttattccggtggcctggacacctcggtgatcctcaagtggctgcaagatacctataactgcgaagtggtgaccttcaccgccgacctcggccagggcgaggaggtcgagccggcccgcgccaaggccaaggccatgggcgtcaaggaaatctacatcgatgacctgcgcgaagagttcgtccgcgacttcgtctacccgatgttccgcgccaacaccatctatgaaggcgagtacctgctgggtacttccatcgcccgtccgctgatcgccaagcgcctgatcgagatcgccaacgagaccggcgccgacgccatctcccacggtgctaccggcaagggcaacgaccaggttcgcttcgaactgggcgcctacgccctgaagccgggcgtcaaggtgatcgctccctggcgcgagtgggacctgctgtcccgcgagaagctgatggactatgccgagaagcacggtatcccgatcgagcgccacggcaagaagaagtccccgtactccatggacgccaacctgctgcacatctcctatgaaggtggcgtgctggaggacacctggaccgagcacgaagaggacatgtggaagtggaccaagtccccggaagccgcgccgaacactccgacctacatcgagctgacctaccgtaacggtgacatcgtcgccatcgacggcaaggacatgaccccggcgcaggtgctggccgagctgaaccgcatcggcggcgagaacggcatcggccgcctcgatatcgtcgagaaccgctatgtcggcatgaagtcccgcggctgctacgaaacccccggcggcaccatcatgctcagggcccaccgcgccatcgagtccatcaccctggaccgcgaagtggcgcacctgaaagacgagctgatgccgaaatacgccagcctgatctataccggttactggtggagcccggagcgtctgatgctgcaacagatgatcgacgcctcccagaccaacgtgaacggtgtcgtgcgcctgaagctgtacaagggcaacgtcatcgtggtcggccgcaagtccgacgactccctgttcgacgccaacatcgccaccttcgaggacgatgccggcgcctacaaccaggccgacgcagcgggcttcatcaagctcaatgccctgcgcatgcgcattgcttcaggcaaaggccgccagctgctgtaa

SEQ ID NO: 352971 - DNA, 1878 bp, Pseudomonas aeruginosa
atgatcaaaaacctacggttcagccacaagattctgcttgccgcctcactggtggtaattgcggccttctcactgttcaccctgtacaacgattacttgcaaaggaatgcgctccgcgacgacctggggaactatttgcaggagatgagcgatgtcaccgccagcaatatccagaactggctttcgggtcggattctgctggtggaaagcgtggccgaatccattgcagtcaacccttcacctgacgcggttaagaccttgctcaaacagcggacgcaggtctccaccttcaccgccacctatttcggcggccaggaggggcagttcatcccaggctccgatgaccccatgcccgaaggctacgacccgcgcacccgcccctggtaccaaggcgccaaaagcgccggcggcaccaccctcaccgaaccctacgtcgacgctagcaccggccaattaaccgtgaccatcgccacgccggtgcagacccagggtgtggccggcggcgacctgggcctggatactctggtgaagatcatcaacgccctggacttcgacggcatgggttacgccttcctggtcagcgcggacggcaagatcctggtccacccggacaaggacctggtgatgaagagcctgcaggatgtgttcccgcagaacaccccggccatcagtgccaatttcagcgaagtagagcaggacggcgctacccgcatcctcaccttcgcgccgatcaagggcctgccctcggtgaactggtacatcggcgtgtcggtggacaaagccaaggcctacgggatgctcagcgagttccgagcctcggccatcgtcgccacggtgatcgctgtggtgatcatcatcatgctgctgggcatgctgatccgcgtgctgatgcaaccgctgcacaccatgggtcgcgccatgcaggacattgcccagggcgaaggcgacctcacccgccgcctggtgatccacgcccaggacgagttcggcgagctagccggcgccttcaaccgcttcgtcgagcgtatccacggctccatcagcgaagtgtcctcggccaccgcccaggtcaaccaggtggcgcgcctggtgctgaatgcctccaactcgtccatgagcaactccgacgagcaggccaaccgcaccaacagcgtcgccgccgcgatcaacgaactgggcgccgccgcccaggaaatcgcccgcaacgccgccgatgcctcgcaccaggcctcctccgcccgcaccctggccgaagacggccgccaggtggtagagcgcaccatccaggcgatgaacgagctgtccggcaagatccgcgcctcttgcggcaacatcgagacgctgaacagcaagacggtgaacatcggccagatcctcgaagtgatcaaaggcatctccgaacagaccaacctgctcgccctcaacgccgccatcgaggccgcccgcgccggtgaagccggccgtggtttcgccgtggtggccgacgaggtgcgcaacctggcccaccgcacccaggaatcggcgcaggaaatccagcagatgatcgaggagctgcaggtcggcgcccgcgaggctgtcaccaccatgaccgagagccagcgctacagcgaacagagcgtggaaatcgccaaccaggccggcgagcgcctgggcagcgtgacccaccgcatcggcgagatcgacggcatgaaccagtcggtggccaccgccaccgaggaacagaccgccgtggtcgactcgctgaacatggacatcaccgagatcaacaccctcaatcaggaaggcgtgggaaacctccaggcgaccctgcgcgcctgtgccgacctagaccagcaggctgcacgcctgcagcagctggtaggcagtttccgcatctga

SEQ ID NO: 352972 - DNA, 1251 bp, Pseudomonas aeruginosa
atggatccgtcttcttccgctcgtggtctggccgcgctggcctttgctctggtgctgagccagttctttcgtagctgcctggctgtaatggcgccggagctgcagcacgacctgcaactctcgccagccggttttggatccctctcatcatgctttttcctggccttcggattggcgcagattccggtgggcatggccttcgaccgattcggcgtgggggtaccgacgcgcctactactgatgctcggcgtggcttcggctgcgctcttcgtctgcgcgcccgacggcctcaacgcgatgctggcacaggcggggctgggcctggcctgcgcaccggtttttatggggctgatgcactatgcctccgagcaattgccaccgcagcgcgctgccgccttcatcagccgagccaatgcggtcggcatgctcggttcgctgtgtgcgacggcgccactgggctgggcggtgcaagcgttgggctggcggccggcgatcgcggttggggcactgtgcatggcgctggcctgcgtgggagtttggcgcaccgtgcgcgaccacggacatgcccaggtgctgcaggaaagcccagcggccatgctgaacgctagcgcccgcctactggccattcctgcgctgtggacgctgattcctatgtgcatggcgatggcggcaggtacttccttccgcaatgcttggggtggtccctacctggccagtgtgtttgggcttcaggccggtccgcgcggcctagctctggccgcactgagtctgggcgcgttctgtgctgcgatggcgctgccttggttagtgcaccgttactcgatacggggtaccgtgctgggctggtcttgcgtgacgctcgtcgcaggcgttgcgctggcggccttgcccggtgccgggctactgcccgatgtggcattgcttaccatgctggccaccttgggtgtgctgcacccactggtcatggcgcatgggcgcttgttgctcgcacccgcgatgaggggacgtggattgggctttctcaatacctttgtcttcctgggcttcgcgcttacgacctgggcctttggcctgattgctgatgccggccagcgtgcgaacactccggctccagccgtctacgcttacatctttgcctgcgcggcagcgatggtgctggttggtttgctggcctatgcgttcagtccaagtatgccgtctgctgagccgcgcgatgccctgagatcgtcaacacgcattcaagaagagtag

SEQ ID NO: 352973 - DNA, 885 bp, Pseudomonas aeruginosa
atgtctgtcgcgcaattttcaggatccattcctgccctcattacgcctttgttggatggtcagtaccaccagccgaccttgcaacgcttggtagattggcatacggatcaggggtcatcggggcttgtgatttgcggcaccactggtgagtgccccaccttgagccatgaagagcatgtgcaggtgattgcggacgcagtgcgctttgccgccggccggatccccatcattgccggggctggctcgaatagtacccaggaagcgatcgcgctcacacttgcctctgaggaggcgggcgcggatggcgtgttgcatgtcacaggctattacaacaagccaacccagcagcaggttgtgcagcacttcgcggcgattgatcgcgtcactcgacttccgattcttgtctacaacatccctgggcgtactggccaagagcttaccgtcgacaccatcgtggaacttgcgcagctcgaacatgtggccggcgtgaaagactcgaccggcaacgtggctcgcgtcaccatggagcgggcaagaattcgcaagccattcgcgtttttgtctggtgatgacagcacgagcttgggatacatcgcccatgggggagacggatgcatctcggtcacggcgaacgtcgcaccagcactattcgcgcgaatgattgccgccgcacgtaccaatgacttgccagcggcccgcgatttacaggatcgcctcatggcattgcatatgtctctgtttcttgagcccagccctgcaggcatcaagtacgcaatgtggcgattgggtctatgtgccaatgaattgcgcgctccattgtcgacagctaccgctgctgcttgcgcggccatagatgaggcgatggcaaccgctgaccttggctga

SEQ ID NO: 352974 - DNA, 240 bp, Pseudomonas aeruginosa
gtggtggccggcgaggtgcgcaacctcccccaccgtaaccaggagtcggcgcaggaaatccagcagatgatcgagaaactgcaggtcggcgcccgcgagacggtcaccaccatgaccgagagccagcgctacagcgagcagagagtggagatcgccaaccaggccagcgaacgcctgggcagcgtcacccaccgcatcggcgagatcgagcgtgcctgttggggcgaccgcagtaattag

SEQ ID NO: 352975 - DNA, 1326 bp, Pseudomonas aeruginosa
atgttcgtagcctccaaattacctaagaacaccggggtatccggctgggtcgcgatgctgcctgcccgagctccgaaaccgcccctcgaaggatccattacggcggacatcgcgatcattgggggcggctttgcaggtctatccgcagcccgaagactttctcagctcgatcctggattacgcgtagcagtgctggaagcaggtgttatcggtgaaggtgcgaccgggcgcaactccggtttcatcatcgatctgccgcacgaggtgtcgtcggatgattacggcggcacctcggccgaccgcgccagacgcgacatcacgatgtaccggacggcgatcggtctagcgaccgagatggccgaagagcaaggttggggacgtgacgtatttgacccttgtggaaggtacagcgtcgcgattagctcacagggagatgagcacatacggtcctatgccaagcagctcgaatccttggacgaggcccatcacctgctcagcacaaaggaaatcttcgatgttacgggtagccacgcctacacctctgggctgtacatgccgggaaccgtgatggtgcaacccgcggcctacatccgttcatttgcggacggattgcgagatcccgtgaaggttttcgaaaggacgcccgctctgtccttcgagaaagtctctggcacctggttgatcaagaccccgaatggctccgtcaatgcgaagaagattattctcgccaacaacggacatgcgcagagctttggattcttcaagggggttttcctgcacatcttcacctatgcctccatgacagaggagttcgatccgaagcttctttcaggccaccggaattgggccgcgacaccggcgcttccgatgggaaccaccgtgcgccgtatcagcggaagcaaaggggatcgtgttctcattcgctcgagatacacctatcagtccaatattgaaatcactgagggtgatatcaaaagtgccgggcgggttcatgatcgcaaatttgccgatcgcttccctgggctgaaaggcacccgtatgcagtaccggtggggcggagcaatggctcttacctggaacggcgtccccgcattcggtgaaattgagccgggcatcattgccgcttgtgcgtgtaacgggcttggtgcatccaaatcatctgcagcaggaattgccgccgcagagtcggcactgggcttgagaactcagctcgtggaaatcttcaacagctatgccccgcccaagaacttgccgccgcaaccatttctcagtatcggtgcgaaggcaaacctgagcattcgcgagtggagtgcaggacgcgagtaa

SEQ ID NO: 352976 - DNA, 894 bp, Pseudomonas aeruginosa
atgtccgcttttgccttttctggtgtgaaccttgcgatcaccactccgtttgatagcgcggggaaaatcgacttcggtcgactggaacagttgatcgagcgctaccttgctgccggcgttcacgggttcgttctgagctccgggaccgggatgcatgtttacctctcgaaagaggaatccaaggaacttgtcgccttcggcgccaaggtgataggtggccgcgccaaagtcattgcgcagacatctgccttgctggtcgacgaagtcgttgaacggacacgtcatgccgccgactgcggcgcagacggtgtgatggtgttgcctccgttctttgaaggtcctaccgacgatcaggggatcatcgatttctatactaccgtcgcctcggcgggcctgcccgtcatcggctacaacgtgccccaggctgtcggcgtcgaaattaccccttcgcttctgcgccagctctgcgaaatccccaacttcgttgcggtcaaggacagcagtggtgatctgggcagacaggcctctctgattcgcaccggactctcggcaatgaacggcgccgacccgcttgtgccgtacgcgctctacgctggctgcgccggtctgatctggggcggggcgaacatggcacccaagacctgtgtcgctctggtcaacgcagcaatggagcgcaagtgggacgaagcccgcgaaatctggaaggtgctggagccggtcatgtccctcatctgggagggtgactacgtccagtccgtctacgcgggtgcggagatcactggctacggcgctggcaatccgcggcgcccgctttcccgcctggcgccccaacgagttgaagttttgcgcgccgcgcttggccaactcgtagaactagaagctgacgcatcctga

SEQ ID NO: 352977 - DNA, 1488 bp, Pseudomonas aeruginosa
atgaccgaaatgctgacaaaaactgactacgagaagatcgcccggcatctgaagctgccaagtgcggccattatcgacggcgagccgtacctcgcaaaatccggggatacattcgccactaccaatcctgcgactggcgaggttcttgttgagctcacggcatgctcggcagccgatgtggacgtcgccgtcgcgagcgcgcgtgcagcctgggccgacggtcgctgggcgaagcttcatccttccagccggaagcaggcgcttctgcggttggctgcacttatcgaaaagaatgctctcgaactggccgttatggagagcctagatagcgggaaaacgatccttgattgccagacggttgatgttcccgaaacgatcaactgcctcaagtggcacgcagaagccatcgacaagatctacgaccaggtgtctccaccgtcggacagccacatcgctctgatcgtacgcgagccggtgggcgtcgtcggtttggtattaccgtggaactttccgcttctaatgctggcctggaagattggcccggcactggccgcaggctgctctctggtggtcaaaccggccgaagagacttctcttaccgcacttcgtgttgctgagcttgctctcgaagcaggtatccctgcaggcgtcttcaacgtaatcaccggcacggggccgggcgtgggtgaacctatcggtcggcacccggatatcgatgtcatctcctttaccggttcgaccgaaactggtcgtcgattcctgaagtactccgctgaaagcaatctcaaggaagtcgtcctggagatgggcggcaagaatccctgcatcgtcctggatgacgttggtgatatcgatgcagccgccgctcacatcgtgaacggcgcgttctggaacatgggggagaactgctccgcaatttccaggctgatcgttcacaaggacatcaaggcacagcttctccagcgcatcagcgagctcgctgatgattggcacgttggtgatccactcgatccggccaaccgcattggtccgctggtgtctcgggaccatttcaacaaggtcagctcctatctgggcaatggcgaaaaggtgctctacggcggggaaaccagcaacgagcgctacgttcacccaaccatccttgatgtcgcgagcaatgatgccaagcctgcccgggaagagatctttggtccgatcctgtcggtcatcaccgttgacagcctgcaagaggccgtggctgtggcgaacgatacggactatggcctcgcagcttccgtgttcactgccgacggcaagcgtgccatgcgagttgcacgtgcattgcgagccggcaccgtcaccgtgaactctttcggcgagggagacatcaccacgccgtttggcggcttcaagcagtcaggttttggcggtcgcgacaactccctccatgcccatgaccaatacacacaactgaaaaccatctggctggatctgtccggcgaagaataa

SEQ ID NO: 352978 - DNA, 204 bp, Pseudomonas aeruginosa
ttgcagagttggccgggggggcgcatcaccttgatggcggggatcaacgccaccaccacggaagagagcctggaccttggccgcaacgccaaggccgccggcttcgactgcagcctcctagccgatccccactactgtcagccgacccaggacgagctgctatcccacgcttgcgccgtggacgacgccctcgacctgccgtaa

SEQ ID NO: 352979 - DNA, 951 bp, Pseudomonas aeruginosa
atggttaagcacagcgaacccgatcaaagcctaatcaagatgccatcgcttcgagccgtaaaggcttttgtcgcggcggccaaataccagaatttcactcgtgccgccgaggccttgtgcgtgagtcaggcggccatcagccgacagattcgcgagctggaaatctatctcggcgacgagctgttcacgcgcgtggggcgaaccgtagagcttacgaatgccggctcgatattcttcgatgcggtgcagctgtctttcgccaacatctctcaggctgctgagcgaattcgcagaaagagcacctcaaagcgcgttctcactctctgctgttcacccgcattttccgcactctggctggcccgtcggctgcccagtttcttcagcgcgaacccggacgttgatctgaacctcatcactacgcagaacttcctctccatggagcccggcgtgagtcccgacatcttcgtcaccaagattgccaaggttcgtgagggttatcgcaactacccgctggtgcacgatgtgatctacccagtgtgtacgcccaagtatctagaagagcacccggagataagcagcctggaaggtcttcgcgacagtgtgctgctgaacctcagtccctacggccgttcccaggtagccgagcatgtcgactggaatctttggctggcctaccacgacatcgatctggggacgcgtccccccaacgcacctcatttcttcaatgctaacgactacaacctgctgatacagatggttctcagccaccagggcgtctctctcggctggcattacctggtcaaccatctgatcaatgaaggattacttgttcgtccggtcgagcaggagctggtgcacacgaacagcgtgcactacctcgctttcgatgaagaaaaagactttgatgatgcgtgttgccgcctgcgggactggctaatcaatcagttctga

SEQ ID NO: 352980 - DNA, 1212 bp, Pseudomonas aeruginosa
atgaacaaccgtaccgatgtattggccttgattcgccaacgcaaagagcaacatggacttccttccgcggcgtataaagatccggaggtttatcgtcaggatcttgagcaaatctggcacaaggaatggatcttcgcaggtcataccttcgagctggaaaaacccgggcagtacctgaccctgcaaatcggcgactatccgattgcagtggtccgtggcggcgacggccaagtccgtgcgttccacaatgcttgccggcatcgaggctccaaggtttgtactgaaaacagcggtaaggtagccaagctggtttgcccctaccacaaatggactttcgatctggatggtaagttgctgttcgccgggaacatggggcccgacttcaacgttgccgaccatggcctgaagcccgcccattgtcaggtggtgaacagctatatctacgtctgcgtggccgacaaggcaccggactttgataaattccgaagcgccgtatcgcccttcatcggtccgcacaacctggatcactgcaaggtagcattcgagtccaacctggtggaacggggcaattggaagctggtcttcgagaacaaccgcgagtgctaccactgcgatggcagccatcctgagctgctcaaatcctatgttgaagatccttcagtacagggcgttggcggtgaggagccccccgaactaacggaatactggaatcgttgtgaggcagccggcctgcctagccgcttggtgatggatgaagccgggcagttccggatgacacgcattccactcaccaacggagccgtcagctacacaatggacggcagacctgcggtaaccagtcgcctggaccgaagtggcgaagacaacatcggcgcgctcctgtacttcaactatccctccacctggaaccacttcctcggtgatcacgccctgagtttccgagtgctgcccctggggcccggcgagaccctggtgactacaaagtggctggtacacaaagacgctcaggaaggcatcgactacgacctcgatcgcctgacccgtgtctggactgccaccaacgaccaggatcggcgcctagttgaaggcactcaggttggcgtgacatctcccgcatacgagcccggcccattctcgtcgctcgtcgagattggggtcagtcaattcgtggattggtactgctcaaaaatgattagtcgacttgctgactga

SEQ ID NO: 352981 - DNA, 867 bp, Pseudomonas aeruginosa
gtgctcttggccgcgctttgctacggactgcaacccctcttcgccaagtacgcatacgtaggcggcgccgatcctgtagggctactgctagcgcgctactcaattgccgctggagtattgctgctgatcctccgccgccgaggaattccgcttccgagtcggcacctggcaatacagaattttctgctgggcgctggatatggggtatcggcactcggttactacgtcgccagccgctatgtatccgtaggcttggcggtgattctggtgttcacctttccaaccttcgtcacagcaggatccatcgcgcttctgggtgagcgcaccaactccctcaagctagtgagcctgacattggcgctgggcggggtccttatggcgactgggctcacgatatctggatcaccgacaggggtgctttgggcgttgttctccgcaatttgctacagcatcgccgtcctgtatggaacccatcgcatcttgcatgaacatccgctggcctcagccgtaatagtgctcctaggttgcggaactgtattcgttctggtcgccctttttcggggcgcgtccctaccgtcttcagcccttggctggtggtcaacagtgggcttagccttgttttcgaccctgataccgctcacagcattcctggccggggcctcgcgaatcggcccgtcgtcagcggcaactgtttcaacgctagagccggtagtggccattgcggttgcactcatgggcgagcagctaacctctgcaatgatctgcggaggcggaatggtagttctggcggctttgctgttggcgcgccggggagtcgttgatcaaggcttgagcgacgcgcagaccgaaaccgcctcaaatcgataa

SEQ ID NO: 352982 - DNA, 1173 bp, Pseudomonas aeruginosa
atgagtcaggccgatgagattctttcggtaaagaacatcttcaaggtattcggacctaatccggatattgccatggagatgctgcgcaaaggcgccgacaagaacgagatcttccgcaagaccggtcatgtcgtcggggtgttcgacgccagcttttcagtcaagcgcggtgagatcttcgtgatcatggggctgtccggttcgggcaagtccaccatggtgcggctgttcaaccgtctgatcgaacccacctcgggcagtatccacctgaacggacgcgagatcaccggcctctcggacaaggcattgctggacgtgcgccgcaaggaaatgggcatggtgttccagtccttcgcgctgatgccgcacatgagcgtcctggaaaacaccgccttcggcttggaaatctccggtgtcagcgagcgcgaacgccacgcccgagccgccgaagccctgcggcaggtgggcctggccggccatgagcacagctacccccaccagctgtccggcgggatgcagcagcgcgtcggcctagcccgggccctggcgaacgacccgaccatcctgctgatggacgaagccttctccgccctcgatccgctgattcgcagcgagatgcaaggcgaactgatccgccttcaggccgagcagcagcgcacgatcattttcatctcccatgacattgaggaagcgatccgcatcggtcatcgcatcgcgatcatggagggcggccgggtggtgcagatcggtaccccgcaggaactgatcaaccagcccgccaacgagtacgtcgaaaccttcttcaagggcttcgacagctcccgggtgctcaaggccggcgacgtcgcccaactcgacccggcgatggtctgccgagtgaatggcaaagccccacactttcaagcgggtgtgccctacggctacctgatcgacgagcgtgaccagctcctggccgtggtgggcgcggatgagtccggtggcgtggcgatcggccagccggaggagcagttcagcctgcacaagcagagccccgtctacaccgacacgcccttgcatgacgtgctggatatcgttgcggcactgccttaccccgtgcccgttctggaccgtgacggtgccttgaaaggcaccatttccaagaatcagctgttgcacactctgagccgccattga

SEQ ID NO: 352983 - DNA, 954 bp, Pseudomonas aeruginosa
atgtcagagttcagtcttctcgatcctttccagagcgcagtcattcccctgggtgactgggtggaaaccaccctcaatttcctggtgcacaacttccgcgatgtgttccgtgccatccgttggccgatcgatcaggtgctcaatggcatcgagttcgtcctgcagagtatcccgccaaccatcggcatcatcctgtcctcgttgctgggctggcagctggccggcaagcgcatggcattgttgtgcttcgtcaccttgaccctgctcggcttcatcggcgtgtggtcggagtccatgaccaccctagcgctggtgctgacctcggtgttcttctgcgccgtgatcggtatcccgctgggcattctctgcgcccgcagcgaccacctggaacggatggtgcggccggtgctcgacgccatgcagaccctgcctgcgttcgtctacctggtgcccgtggtgatgctgttcggcatcggcaacgtgccgggtgtgctggtaaccatcgtgttcgccctgccaccgctggtgcgcctgaccaacttagggattcgccaggtacccgaagacaagatcgaggccgcccgcgccttcggctgcaccccgcggcagatgctgacccgcgtgcaactgccgctggccacctcgaccatcatggctggcatgaaccagaccctgatgctgtcactgtcgatggtggtgatcgcctcgatgatctccgtcggtggcctggggcagatggtgctgcgtggcatcggccgtctggacatgggcctggccacggtcggtggtgtcggcctggtgttgctggcgatcttcctggaccgcctgacccaggccatgggcaaacgttccagcgccgacccgagcctgcgttggtaccacaccggccccgttggcgtgctgctgcgtctgtgcggtgccgggcaatcagccgggcggcgcaagaccgcctaa

SEQ ID NO: 352984 - DNA, 1032 bp, Pseudomonas aeruginosa
atgcatcagttcagtttttcccgcaaattcatgcaatgcgcctcggctttggcgttcacggtgatgtctttgcatggcaacgcatccgctgaaaagccgggagatggtgtcaaggtcacaccaatgttctctacggttgccgaagagcgcttccgtggcgaaatcgccatggccggcttggaagagcttggctacaacgtccaagagcccaaggaggccgaatacgccaccgtcattctggcggttgcttatggtgatgccgacttcaccgtgcatttggatgacatcctacatgctagcttctacaaaaaagcaggcggcgacaccaatctgattaaggccggggtgttcatgccaggaatcctccaaggctacatgatcgacaagaagaccgccgaagcccataacatcaagtacgtcaccgacctgcagaagcccgagatcgccaagctgttcgacaccgacggcgacggtaaggctgacctgaccggctgcaaccccggctggggctgtgagctggtcatcgagcaccatatgaaggcctacgacttggacaagaccgtgcacgtcaaccagggctcgtacttcgccctaatggccgacaccatcagccgctacaaggaaggcaagccggtcctgtactacacctggacgccacaatggatttccaacgtactggtcgaggggcgtgacgtggtctggctggaagtaccaaaaactgacctcccggatggcaataacgatgccaacaccatgtacgaaggcaagaacctcggttttgccatcgacacggtcgagtcaaccctgaacagggaattcgccgagaagaatccagttgcgctgaagttcttctcgctggtgcagatctccgccgctgacgaaagcgcacagaacttgaagatgcagcaaggcgaaaacaagccagccgatatccgccgccatgctcaggagtggatcgctgctcaccgccagcagtgggatcagtggctgcaggcctcccgtgccgcagcagcaaatcacgcctccaagtag

SEQ ID NO: 352985 - DNA, 1347 bp, Pseudomonas aeruginosa
atgactacttctccgtactcgattcatccagacgcgcgaaaaatagatcctgccaagcggcgaatttcagcagtcaaggcggatggctctgaagacaataatgatcgtgttgaaattggccctaccccactggctttctctgaatgggcaagcctgaatctggaagtgccaaatctgcacgccatgcgcgaatatcgtttgcgacggattcgcgagcagcttgtagcacgcgacttgggcggcgctctcatctttgaccctttgaatattcgttatgtgactgacaccacgaatatgcaggtttggactgctcataaccctgccagggcttgctttgtctcggctgctggatacgtggtgctgtgggattttcatggttgtgatcacttatctgcccatctgccacttatcaacgaactgcgtagcggagcttcttttttctactttgagtcaggcgatcgaactgaagagcacgctcgtaaatttgcggctcaagttgatgatttacttcgtcagcatgccggaagtaatcgtcgcttagcagttgataagatcgagatggcggggcttcgcgctctacaaggtctgggtattgaagtcttaaatggacaagaagttacagagttcgcgcgatcaataaaggggccagatgagataaaagcaatgcgctgtgcgattgcatcatgtgaggcatccattgccgtgatgcgcaaagagcttcgtgcgggcgctactgaaaatgatgtttgggccgttctgcacgcagaaaacatacgacgcggtggtgagtggatcgagactcgaattctcagctcaggcccacgtacgaatccctggttccaagagtcgggacctagggtcatcagtgatggtgatttgctctcattcgacacagatctcatcagtgtctatggagtgtgcgtggatatttctcgtagctggatttgcggtggtggtgagcctactgcagagcagaaacgattgtatcgaatcgcatacgaacatatcacgaccaatgcgaccctggtgaaacctggcgttagattctccgagctaactgaaaaagcccatcgcctaccagaagagttccgggcgcagcgctatggcgtgattttccatggagttggattgtgcgacgagtatccctccattcgatacccagaagactttgaatcgtatggttacgaaggggagcttcaagccggaatggcattatgcgttgaggcttatgtgggagctgtcggtggtagggatggcataaagcttgagaatcaaatcctcgtcactgatgatggatttgaaaatctaacttcttacccatttgaggactcatttttaatcgactaa

SEQ ID NO: 352986 - DNA, 1041 bp, Pseudomonas aeruginosa
atgagaacttcattcgaaagtgtcttgaagtgcaagaacttagtgcatctggacagggctagtcgagctggcctgacgactcccgtacgtcgagtgtccttcgttctgcgcgagcatttttcaatgatggcatttactggggcggtagatgccttggtgactgccaacctcatgagttcgatgcccgtattcgaagtccaggtggttggcggccagagtaacctggtcgtgagcgacctgggtatcgctatctccacagactgctcgctggctgaactggatgaaagacacgaagacatcatcgtggtgtgcggtggtttccgggtccgccttgaaagcgatcctttattacgatcgaaattacgccacgccgatgctgccggctcagtgcttggcggactctggaacggtgcttacttccttgccgaggctggattattggatggccacgaatgtgcttttcatccggacggccgggctatgatgaccgagctttttccaaaagtaagtgtgactactcactcccatgtgctggatcgcaagagaatgagctgtgccggcgcaaacagctcgctgggtatgatgcttgaagtggttgggcatagtggcggccaggaacttctgaatgctgtcgaggaggttttgggctgcgataaaatgcgggaggctgttgatgtttcagttgtgtcgatagactttgacccaacgttgccgagaacccttaagcttgccttagagctgatgcacagcaatatcgaggatccgatagatatcggtgagatagcccgttacgctcgcatatcccggcgacaccttgagcgattgttccgccgatacgtgaaggccacaccaccacgctactacatggaattgcggctcacccacgcgcgccagttgttgcagcacaccaacaagtctttgaccgaaatagctgtagcaagtggatttgctaccctcccgcatttcagccgctgtttccgcgagaaatttgacatcgccccaggtcaatttcgcgctcgttctcagttcagcgttcggtaa

SEQ ID NO: 352987 - DNA, 888 bp, Pseudomonas aeruginosa
atgaatacccaggtgaaatcagaatgcacatcggaggctgacaagactcgtcgcggggtatttttttgcttattggcaatgttggtatttgcttcccaggatggaataacaaaatatctcgttaaagacttctcaatcgcacaactggtgatgatgcgctattgggtttttcttttagtttccgttggcttcgctgtgtggaaaagttctttgaggactgcagtgcgcagttcactgccttggacgcagattctacgctccctattggccgtcggggagtcggcactgttcggttggggccttcactatcttggactagctgagagccacgctctcttggcgatatttccactgataacactagcattagcgagagctttcctcggcgaaactgttgggctacgccattggattgccgctatggtgggcttttccggtactctggtgatcctgcgccccggcttcggcgtttttgattctgcagcgttgataccactactggctgcttttactttcgccgtttacaacctgctttcccgtaagaccagtcagactgattcattttccacaaacatgctttacatggcgttggtcggagcaattgcatccacttgcttcggcattcctgcttggctgccgccatcacctaaagaatgggtgctactcagtgctctttcagtagccgggatgattgggcatctgcttttaattaaggcgctggagtatgcacctgctgcgctccttcagccgttcaactactcacttcttgtttttgctacgttagttggcttgatcgtgttcggagagtttcccgacatttggacgctaacaggcgcagccttagtgcttgctgggggtatgtacgcggctaagaatcgtctgaagtag

SEQ ID NO: 352988 - DNA, 735 bp, Pseudomonas aeruginosa
atggacaagattcgcaccttggcattcgttgcactctggctcgcgattggtgttgctgtgccggaggaactgcgcctggttgcaaatagctggccgccattcaccgaccaacgcttgcttaacaatggcctggcggttgatctggtaaacagcgcgctgcagcgcgccggttatacggtcacgtacactgaggtacccggagcgcgcgccctgcgtggcttacaagacggtacctatgatgtattggtcggagcttggtatagcagcgagcgcgcccaatttggccggttctctgaaccctatctgatcaaccgcatcctctttgtccagcgcaagggaagaaaaattggttttgagcgcctggaagacttgcgccactacagcatcgcggtggcgcgcggctatgcctatgacgcccgcttcgacagcgacccgctgctgcacaagcaaaaagtgctcgactttcggatgggcgcgcggatgttggcggccgggcgggtcgacctaaccttggaagacgaatatgtggcgcgctattacctcaatcgcgagctagtcgacttgcgtgaccagttggagtttctgcacaagccgctcagtgagaatggcctgcatatcctggtgcgccgcagccaccctcagaacacggctattgccgcggccttcaaccaggcaatccgagccatgcgcgacgacgggagctacgcggaaatcttcaagcgccacgggttttag

SEQ ID NO: 352989 - DNA, 282 bp, Pseudomonas aeruginosa
atgatcggcatgctcggcgtgcacactctgctgcgggtggcgaggcgcgacaaccagctggaattgctgcgccagttgttcgccgggggcatgagcgcgggcgacgtggtgcgcctggcgccgctgttcgactccggttggctggagcagccgcgctacgtgccgccctgggccgccgacctgcgccgcgtggccgccgccttggccttttccgcctttgtcgggcggatcaagctggatgtggttgacctggagcggttcgtggagttggaggaggagtaa

SEQ ID NO: 352990 - DNA, 1200 bp, Pseudomonas aeruginosa
atgtcaggtaatcgcggtgtcgtttatctcggttcgggcaaggtcgaagtccagaagatcgactaccccaaaatgcaggaccctcgtggcaagaagatcgagcacggggtcatcctgaaagtcgtctccaccaacatctgcggctcggaccagcacatggtgcgcggccgtaccaccgcccaggtcggcctggtactcggccacgagatcaccggcgaggtgatcgagaagggcagtgacgtggagaacctgaagatcggcgacctggtttccgtacccttcaacgtcgcttgcggccgctgccgctcctgcaaggaaatgcacaccggcgtgtgcctgaccgtcaacccggcccgcgccggcggcgcctacggttatgtcgacatgggcgactggaccggcggccaggccgagtacgtgctggtaccctacgccgacttcaacctgctcaaactgccggatcgcgacaaggccatggagaagatccgtgacctgacctgcctctccgacatcctgcccaccggctaccacggcgccgtcaccgctggcgttggcccgggtagcaccgtatacgtggccggcgccggtcccgtcggcctggccgctgccgcctccgcccgcctgctgggcgctgccgtggtcatcgtcggcgacctcaaccccgcccgcctggcccacgccaaggcccagggcttcgagatcgccgacctgtcgctggacaccccgctgcacgagcagatcgccgcgctgctgggcgagccggaagtggactgcgccgtcgacgcggtgggcttcgaagcccgtggccacggccatgaaggcgccaagcacgaagccccggccaccgtgctgaactcgctgatgcaggtcacccgcgtggctggcaagatcggtatccccggcctctacgtcaccgaagacccgggtgcggtggatgccgccgccaagatcggcgccctgagcatccgcttcggcctcggctgggcgaaatcccacagcttccacaccggccagaccccggtgatgaagtacaaccgcgcgctgatgcaggccatcatgtgggaccgcatcaacatcgccgaagtggtgggcgtgcaggtcatcagcctggacgacgcgccgcgtggctacggcgagttcgatgccggcgtgccgaagaaattcgtcatcgacccgcacaagaccttcagcgccgcctga

SEQ ID NO: 352991 - DNA, 1332 bp, Pseudomonas aeruginosa
gtgtcccaccgtacctgcgccctgaccgggctatccgcgaccgcactgatcctgctcagtctgcctctcatggcagccactgatgccaagccggcggagggcttcgtcgaaggcagctcgctgaaactgatcaaccgcaacttctacttcaatcgtgatttccgcagccgcggcgacggcctgttcaatggccgccagcaaagctatcgcgaggaatgggcccaaggtttccaggggttcttcagctcaggatacactcaagggtcggtcggagtcggggtcgacgcccacgctctgctcggtgtgaagctggacagcggcggcggtacctcgggcaccaacctgctgccgctggacagccaacgccgtgctgaggacaactattccgcagccggcggcgccctcaagctgcgtgctttcgacactgagctgaaactgggcgacctgttcccggtcactccggttttccagcatggcgatggccgcctgctgccccagagctttcgtggcgtgtcgatccagaatacctccatcgacggcctggtgctccagggcggtcgtctgcattcggcgcgcaacaaggccagcagcaaccacgacggcgagttgaccaccgagtacggcggcaccacctatgactccgccagctatctcggtggggactacgagttcgccgacggcacactgctgagcctctatcaggcacagttcgaggacgtttggaaccagacctacgtcagtctgggcaagaccttcaccttcgacgatgcccgcgccctgtccctcggggccaccctctacagcacccgcgacgaaggcagtgcccgggctggtgaaatcgataacgacagctggagtgcatatgcccgtctccgtgtcggcgcccactcagtcatgctggcccaccagcgcatcaacggtgaccagcccttcgactacctgggagacggggattccatctaccttgccaattcggtgttgtactccgacttcaactcccccaacgagcgttcctggcaactgcgctacgacttcgacatggctgccattggcctgcccggcctgaacttcatgacgcgttacctgcgcggcactgacatcgacaactcgaaggtcgaccccaacggcgcctacgcctactacgccgtgctgggtgatggtggcaagcactgggagcgcgacttccagctccagtacgtggtccagagcggcccggcgaaggacctttccatcaccctgcagcagaccatccaccgatccaactcggcccaggccgacggcgatgttgatcaggtacgaatcattacccagtacccgctggacttgctgtga

SEQ ID NO: 352992 - DNA, 1377 bp, Pseudomonas aeruginosa
atgcaatcgaatcaacgaaccacactgctgatcatcggcggcgggcctggcggctatgttgcggcaattcgtgcaggacaactcggcattcctacgatactgatcgagggccgagcactgggtggaacctgcctgaacatcggctgcattccttcaaaggcactgatccacgtcgcagaaacctaccacgcgacccagcatgctcagtcgttggggatctccgtgccgcaagtgagcctggacatcagccagagcatcagttggaaggatggcatcgtagatcgtcttaccagcggggttgccgctctgcttaagaagaatggcgtttccgtgattcacggatgggccaaggtgctagatggcaagaccgttgaggtgaacggacaacggatcgagtgtgagcatcttctgctggcaactggctcgaccagtgttgcgcttccgatgctgccattcggcgacggagtgatctcttccactgaggctctctctcccagcaagttgcccaagcgcctggccgtagtgggcgccggttacattggtctggaactgggtacggtgtatcgcaagctcggcgttgaagtgctggtcgttgaggccaaggagcgaatcctccccgcctatgatgcggaactgactgcaccggttgcgcaatcgctcaaagcactgggtatcgaggtctatctacagcacagcgtggaaggatacgaccctgtaagccagcaactgaaggtcaaaaacaacagcggcgaggttgtggtgcttgaggcggatcaggttctggtcgcagttggacgcaaacccaatacgcaaggctggaatcttgaaacgctagatcttgcacgacagggttcagcagttgcagtcgatgatcagtgccggacgagtatgcgcaatgtctgggcgattggtgacctgacgggcgagcctatgcttgcgcaccgcgccatggcccagggcgaaatggtggcggaacttattgccggcaagacgcggcatttccagcctgccgctatcgcagctgtttgcttcaccgatcctgagttggtggttgcagggttaacacctgagcaggccaaggtacaaggactggacgtcatcaccgcgaccttcccgtttgcagcgaacggtcgggcgatgacacttgagtcgaaatcaggcttcgtgcgagtcgtcgctcgtaaagacaatcacctgatcttgggctggcaagccgtgggaacccaggtgtcggaactgtccaccgcgtttgggcaatcgctcgagatgaatgctcgactggaagacgtagccgggacaatccacgcgcatccgacccttggcgaagccattcaggaagccgcgctcaaggccctgggacacgcactgcacatctga

SEQ ID NO: 352993 - DNA, 1305 bp, Pseudomonas aeruginosa
atgggcacctatgtgatcaagatgccggacatcggcgaaggcattgccgaagttgagctggttacctggaatgtggcggttggcgacatcgtcacggaagaccagcctctggtagacgtgatgaccgataaagccacggtggaaatcccttcgccggtgaacggcaagattcttgcgctaggcggcaaacccggtgatgtcttggctgttggcagtgagctgattcgcttggaggtagagggtgcgggcaatactcagggtgatctaccacctcccgctccagaagccgagccggctccggctccggcacaaaacccagtggcagccgcgcctgctccggcggcgccagagcagccaaaggctgctggggcaccggtgaaggcagcatcttgccaggcctccaatcccaagccctttgtgccacgcaatgagaatgagtgcccgctggcatctcctgctgtgcgaaagcgtgcctgggatgccggtattgagctgcgcttcgtccaaggcagcggtccagccggaagaattctgcacgaagacctcgatgcttatgtgagccaggctggactgccatccacttcactcggcatctataccgctcgcacggatgagacccagatcccggtgatcggactgcgcagaaaaatcgcccagcgcatgcaggactcgaagcggcgcattccgcatttcacttatgtggaagaagtcgacgtcactgccttggaagagctgcgcattcacctgaatggcaagtacggaaacagccgcgcgaagctgacgctcctgccctttattgcccgggccatggtggtcgccttgcgcgatttcccgcagatcaacgctcgctacgacgatgacgcggacgtggtgacacgtttcggtggcatacacctgggtattgccacacaaagcgacgccgggctgatggtgcctgtggtgaggcattccgaagccatggatatctgggcttttgcccaggaggtcgttcgcttggccgacgctgctcgcagcggcaaagctctacgcgaggaactttcgggctccaccatcacgcttaccagtttgggatccctgggtggcatcgtttcgaccccggtgatcaatgctcccgaggtagccatcgttggggtgaatcgaatcgtggagaagcctgtagtgctgaaagggcagatagtagttcgcaagaccatgaatctctccagttcgtttgaccatcgtgtggtcgatggaatggatgccgcccagttcatccaggctatccgcagtctgctggagcagccggccaccttgtttctggagtaa

SEQ ID NO: 352994 - DNA, 1059 bp, Pseudomonas aeruginosa
atgaatgctactaacaacaaccttcagacagatcacgccaatgcgaccagcacgatgaccatgatccaggccctgcggtcgggcatggaaacgatgttggagcgcgacgagaacgtggtggtctacggcgaggatgtcggctatttcggtggggtcttccgttgtaccgaagggcttcagaacaagttcggcacctcgcgagttttcgatgcaccgatctcggaaagtggcattgtgggaacctccgttggcatgtgcgcctacggtcttcgccccgtcatagaaatccagttcgccgactacgtttaccccgccttcgaccagattgcttcagaggttgcccgtatacggcatcggtcagccggcgagttcacggcccctctgaccatccgtatgcccactggtggtggtatctacggcggccagacgcatagccaaagtccagaggcgatctttactcacgtgtgtggtctgcgcacggtgatgccatcgaacccctatgacgcgaaagggctactgatctctgccatcgaatgtgatgacccagtgatttttctcgaaccaaagcgcctgtacaacggcccgttcgatgggcatcacgatcgcccggtcgtgccctggtcgaagcacgcggccagtgcagtcccggaaggctactacacggtaccgctcgacaaggccgccattgtcaggccgggcgaagccgtcactgtcattacgtacggcactactgtttatgtcgctctcgcagcagcagcggagactggaatcgacgctgaagtgatcgacctgcgcagcctctggcccctggatttggacacgctggtcgagtcggtcaaaaagaccggccgctgtgttgtggtgcatgaggccactcgtacctgcggcttcggttccgaactgatatcgctaatccaagagcattgcttccaccacctggaagctcctatcgggcgtgttgcgggctgggacactccctatccccatgcacaagagtgggcgtatttccccgggccgagtcgggttggggcggcactgaagcgggtgatggaggtttaa

SEQ ID NO: 352995 - DNA, 1128 bp, Pseudomonas aeruginosa
atgccagcactcgatgtcaccgccgtagagactactgacttggcctatggcttggtgcgcatcctcaacgaacaaggcgaggccgtagggccttgggctgaatcccccatagcgccagaggtcctgcgtgaaggtctgcgcgtcatgctgaagacccgcatcttcgatgcgcggatggtcatggcccaacgtcagaaaaagatctcgttttatgtccagtgcctgggcgaagaagccatcggcagtggtcaagccctggctttgaatcgcgatgacatgttctttcccacctaccgtcagcaaaacatcctgatggcgcggcagttcccgctcacggacatgatttgccaattgctctcgaatgaacgcgactccctgaagggacgtcagctgcctggtatgtattcgtcgcgggacgcgggttttttcagtatctcaggcaatctgggtacgcagtttgttcaagctgttggatggggaatggcgtcggccatcaagggcgatacaaggatcgcctctggctggattggtgacggttcaaccgccgaaacggactttcaaacggccctgacatttgctcacgtgtatcgcgctccagtcattctgaacgtcgtcaacaaccagtgggcaatctctactttccaagcaattgccggtggagaatccacgacattcgctaatcgcggcgttggctgcggcatcgtttctctccgcgtagatggcaacgatttcctggcggtttacgcggtatctcggtgggcggctgagcgcgcgcgtcgaaacctcgggccgacattgattgagtgggtgacctaccgggctggcccgcactccacctcggatgatccgtccaaataccgccctgctgacgattggtcgaacttcccgctgggggatccaattgagcgcctcaaacagcatctggttcgaatcggccattggtccgaagaagaacatcagcaactctccgtggcgctggaggctgaggttatcgctgctcagaaggaagctgaacgctacggttcgctcaacgatggccacatgtccagccctgccacgatcttcgaggacgtttacaaagaaatgccagatcacctgcgtcgtcagcgccaggaactaggagtgtga

SEQ ID NO: 352996 - DNA, 798 bp, Pseudomonas aeruginosa
atgggtgtccagttgttcacgcggacgcacaagactcttgatctaaccaaagcaggaagaatgctgttaggtgggattgagagaagtttgtccgaactgcgtaggacagtagagaccattgaaaatgaaaagagtccgactgtcaccattagtgcgagcatggcgattgccagtttttggcttctacccggtatagctgaattcaaggagcagcacccggacataagagtcagagtcatcgctggtgacggcgaagactatgctgccatacagaataatgaaacggattttactattctgtatgaccagggtcagcgaggaggctatgtctccatcgggctattcgaagaggtcatctttccggcctgcactccggactatttaaaaggtcgagcaattggcagtattgaggacctttctcgtgaaagcttaattgattttgaagttaagcacttgcgtaccgtgaaaggatggccggattggtttagtcgggttggctgcgaaactagaggtattaattatactatttcggtttcgaattacgatcttgcttgccgtgctgcctttgctgggcagggggtcgtactcatgtgggcttatgttgcaccactcgccgagcttaaaaatggcgctctcgttagacccgtcaaggaggtggtgaataccgggcacgttgagcacctcgtgtatagcaagccacttgaagagtctcgcgcgcatatggttttcaaagactggattttggattatgcgagaaggactaatgaagcaacccaggattatctgaaacaggtttaa

SEQ ID NO: 352997 - DNA, 1317 bp, Pseudomonas aeruginosa
atggacatcaaacttagacctcacgatgaccataccaatggctggtcagccattcttccaccacgtcgcccgcatgcgaccttgcgccaactcataaatgccgactggctgatcattggggctggctatgcagggcttgctgctgctaggcgcttggctcacaaccggccggacgacaagattgtcgtgcttgaagccggtgaagcaggggacaacgcttctggccggaactccggcttcgcaattgatgtcccccacaatgttgggagctccacggcagaactggaaaaggccgctaactataagcggctgatgaaagcaggtatcgcctacctagacggtatcgttaacgagcaccagatcaagtgcgattggagcgtaaagggtaagtaccactgtgctgctgctccacacctggctgataccttgcttaagcagcatgcgcatgagcttgaaacgctaggtgaaccctacgaatggctggagcaagcacagcttagagcgcgtctgggaacctctttcttccatgctggaatttatacaccagggtgcatactcctgaatccatcagcattgaccagggggctggctgactccttgcctcagaacgttttgatattcgaaaacagtgctgtgacaaatttggagtacggaaagcttatattggcaagtactgcgcatggttctgtcagtgcgcgtaagctgattttggcaaacaatgggagcgcgtcccagttacctgggttcgagcggcagatgttcaatgttgcgtcctatggcagtctgactcgcccattgacgccggagcagcgttctcgcctcggcgacattgaggagtggggggtgacgcctgcgaatgcagttagtggcgcgacgatgcgatacacgcaggaccatcgcatcttgatacgtcagcaattcgatttcacgccgaacctgcaggtcactgaatctgttcgatctcgcgtccgagagcagcacagggacgtgtttcttgcgcgattccccgaactctacgatgtatcgatggatcacttctggatgggctttttcagcatcacccggaatggtgcgccgtgttgggggaaaatcgacaaaaacgtatacgccgcggtcggctgtaacggtgtaggtattgcgaagcaaacaatcgcaggtttgacgcttgctgatcttgcttgcggcgtggaaaacagcttgattgacgatatgctggagttgggaaaaccagaaaaattgcctccaaggccgttcttggatattggtgtgaaggcttacctggcgaaggagcgctgggttgggaggcaggagtactaa

SEQ ID NO: 352998 - DNA, 351 bp, Pseudomonas aeruginosa
atgactaatgaaattgtcccgctgagcgttaaagagtcgcaggtcgtcctaagtcagcgcccactttccggaggttcggcggtggaaatgggctggagcatcccggaatcggatgaagggcctctcctggcagggtttgccaaatgggatggtgataactccccctataaaacgctgaattatgacgaggtcctgttggtactggaggggactttcggattccaggttgaagacggagagcgcttcgaaggtgggcccaatacgactttgcgtattccgaagtatacccgcgtgaagtacttcggatcgaacgcgaaagtcttctttgtcatcacgcctccatgcgagtga

SEQ ID NO: 352999 - DNA, 1308 bp, Pseudomonas aeruginosa
atgtcagtgcagtcgactagcattggtggttcgttgtcaccaaccacttcttccgtagtagcaagttccggcgcctggaccacgctacttattctcatggcggtatacgcaattaatattgcggaccgctatgttctttcgacgctgattgagccgattaagcatgagtttcagctcagtgacgcatctgttggatttctgaccggtgttgcgctggcaatcttctatgtgagcgccgggctgccgctgggcgcattggcggataagaccaaccgcaagcgcatgatcggaactgcggtggcggtatggtccgccatgacaatattgtgtggcttgagcacgggcttctggcagttactgcttgcccgcattggcgtcggtattggcgaggccggtggcacccctcctagccattccattgttgcagacaagttccgtccaaaattgcgagccttcgccctctcggtatacgggattggtgcaagtgtgggggcttggttcggcgcatcgggtgcggggtatctgaacgatgcatatggctggagaactaccctgattgtgttcgggctttgcggattgccattcgccctcttggtgtggctgtgcatccgagagcccaaacgcgtccatgacgatgtgcatggcaagtccagtgaaaatgcagcgttcaaagatactgtcaaatatgtcctccagcacaaagctttgtttcatctgatagccggcgcaaccgtcattaccttctggggctggggcattctgtggtggacaacttcattcctcgtgcgcacctactcactttctgtgggtgaggctggcgcaattcttggtccgattcacggtattgccggcacagcaatgatgctgattaccgtattcgtgatgcttcagttgagaaataaagagatgtccaatcagtcaggcttcattgcttggactacgctgcttggtactgcattctcaattgcactgttcgccaccactaatttggatgttgcccatattctgctgtggctctttattccgattacttatatctacatcggtccctcgattggcatattgcaaaaccttttccctgcaggtatgcgtgccaaaggttcggcaattctactgttcacggccaatatcgctaaccttgcaattgcgccgcaacttattggcttgctgtcagactttgttgcgccccgtatcagtaatccagacgagtcacttcgatatgtactgcttggctgtgccttcactggtctctgggctacttatcactactgggcttgcgctcgacatatgaaaagtgaagcacgatga

SEQ ID NO: 353000 - DNA, 918 bp, Pseudomonas aeruginosa
atgagctcgaaaaagctgccacccttaagcgccatcgtggcatttgatgcagttgtacggctcggaacttttaccaaggcggcaagcgagcttcatttaacgcaaagcgctatcagtaaacaaattaagcgacttgagttgagtctaggtgcgcctctttttgaaagaaaagggaatgaagttattctgaccaatagtgggtctattctttacagggcagtcacccagagtttgcagtgtattaaagaagcagtcctgcaaatagatggttccttggtgcccactttgtcaataagtgccacttcggggatagccagctatctcgtaataccgctaatttcacgtttcaggaagcttcaccctaaaatcaatgttcgagttattggggcagaggacaggtcaagcatagactttgctgatgcggattttgcaattttatacggagatggcaattggaaggatctcagaattcatcggattgctgaagaagagatatttccgatctgtacttccagttacaagaaagaacataatatcgaacgcctctcagatctggccaactgtgatctgatagagcttgaatccaacgacccagcgacgatttccactcggcaatggatgcgacaggttgggtttcaggggcaacacagtggttcgataattaaagtttcaagctacgatttagcgatcaaggccgcgcttgccggcgaaggagtcgccctggcttgggcagaagcgctccctgacgagttcagaacaaataagttatgcagggcgtgtgatgagacttacaagacggggcacggtcagtacatcgcctaccctatgtctcgggatctctctccgatggcaaaaaccttatgggactgggtgcttgccatttcatctggacagccagcccaagctcactcctcctga

SEQ ID NO: 353001 - DNA, 1101 bp, Pseudomonas aeruginosa
atgaataccttcgcgcaatccatcaatacgcaaacgtggaccaatggccgtcacctcgttcgttgcgtcaagacggtccaggaaacctcggacgtgcgcacattctgtttcatggctgaccagcccatggtgttcttcttcaagccggggcagttcgtgaccctggaactggagatcgacggccagccgatcatgcgctcctacaccatttccagttcgccctcggtgccttacagcttctccctgaccatcaagcgcgtgccgggcggcaaggtgtccaactggctgcacgacaatctcaaggaaggcgacgtactgccggtgcacggtccggtgggccggttcaatgccatcgatttcccggcggacaaggtgctgttcctgtccggcggcgtcggcatcaccccggtgatgtccatggcgcgctggttcttcgacaccaatggcgccgtcgacatggtgttcgtgcatagcgcgcgtacgccgaaggacatcatctaccatcgcgagctgcgccatatggcctcgcgcatcaacaacttcaagctgcacctgatctgcgagaagtacgagatcggcgagacctggtccggctaccgcggctacctcggccgggcgatgctcgacctgatcgcctcggacttcatggagcgcgaggtcttctgctgtggtcccacgccctacatgtcggcgatcaagcgactgctggaagccgccggcttcgacatgaagcgctaccacgaagaggccttcggcccgaccccgccggaggtcagcgaggaggtgcgcgaacacgccgccgaggcggccgaagccgctgccgaggtgccggccggcgcgatgaacctggtggaattcaccggcaccggcaagagcatccgggtcgctcctggcgagaccgtgcacgccgccgctgccaagctcggcctgcacattcccaaggcctgcggcatgggcatctgcggcacctgcaaggtgatgaagaccgccggcgacgtggagatggagcacaacggcggtatcaccgacgaagacgtggccgagggctacatcctgtcctgctgtagcattcccaaaggcgacgtggccatcgactactga

SEQ ID NO: 353002 - DNA, 1233 bp, Pseudomonas aeruginosa
atgacagcctgcagccacaacaacaaaagcggcatcaatttttgtgcattggccgatatatatagccagtgcaagcgggggtacaccctgcctcaggagctctacacttctgaggaagtttttgattttgaaatgaaagccgtattcggtcgttcctggctgcaggcaggtcatttggccgaaatcccaaaggtcggtgattacataaccgtccagttggcgaaaacttccgtcgtgataatcagggagtcggaaagttcggttcgctcgtacttcaattcgtgcaggcaccgcggcgccatcatctgtacaagcgaaaaaggatcagcgcggcgactggtgtgcccataccaccagtggacctatgacctgacgggcaatcttatttttgccaagaatatgccgtctgattttgactcgagccagcacggattgattccagttcactgcgaagtggtggccggcgtcatttttattgcgctgtccgacgatgtacctgatttttccgagttccgcaggcacattgagccgatgctggcgcctcatgacctggaaaatgccaagatcgctcattcggctgttcttcctgagtatgccaactggaagctggtcatggagaatggccgtgagtgctatcactgcagtgcaaggcatcctgaactattgtcttccttccgtgacccaactgaagacgattacttcgaaggtcagcctgagtggatgaaaacctttgaggacgtctgcaaaaacaacgggctgatcaatggtcctgcggagggggcttggttcgatatcttacgcttcccgattaaagaaggagttaactccctaaccctggacggaagatacggttgctccaaactgctgattccttctggcgaaggtaatatcggaacccttcgctgggccacggagccaagcgcattcagccacgcgctgagagaccatgcctttacctttgagagctggccaatcagtgttgggatcacacatgtaaaggcgaaatggcttgtccataaagatgcagtcgaaggtcaggactacgaacttccacacttgacggcactctggaatgccaccaacgatcaggacaaatggctggcagaaaacaacttcctcggcgttcaaggcgcaggatatgttccaggcccttattcctcgagcgatgagaaaaaggtcgtggattttgtgaactggtatcttgatactgtgcaaagctacctgaacaaataa

SEQ ID NO: 353003 - DNA, 348 bp, Pseudomonas aeruginosa
atgcttgatgactatcggcaggtggtaattgatacccctacgttcgtgctgacagagcgtacggatatcgtgggggtgattgtaatgagccaggagaacacagaactgctccttatcaatatcgctgtgttgcctcgctgcaaaggcaaaggttttgggaaaatgctgatgacgttctgtgagaactatgcgctgcgtactggatgcgatgctatacggctatacactcatgaactgatgagtgaaaacattgaaatctacaaaaaacttggttaccaagaaacccatagagccgcagaaaatgggttcgctcgggtgttcatgcgcaaggtgcttcaggttcggtga

SEQ ID NO: 353004 - DNA, 489 bp, Pseudomonas aeruginosa
atgaaccagatgagcttttccgatgccgagtacgccggcaaacgcaaacagacccggcgcgagcgctttctggcggagatggaacgggtggtgccctgggccgggctgttggcactgatcgagccgttctaccccaaggctggcaatggccgtcctccgtatccgctggacaccatgttgcgcatccacctgctgcaaaactggttcgccctcagcgatccggcgatggaggaagcgctgtacgagatcacctcgttgcgtcagttcgccaagctgtcgctgacccagggccgtatcccggaagacacgacgatcatgagtttccgccacctgctggagcagcacgatctggcagcgggcattctggcggtgatcaatgaccacctgagtgagcgcggacttccgaggactggccaagaacactgcgcaacttgtcaccttgttcgccctttcgaacctgtggatggcccgccgacagttactggctga

SEQ ID NO: 353005 - DNA, 336 bp, Pseudomonas aeruginosa
atgaacatcattgctacgtgcagccatcaaccctggaacaagagaaatcttgtcgggcagaaagccccgctccggcttaaagaaatttgggccattcgagtaagacctcagctcacggagaggagtcgcgatctggcgctcttcaatttggctatcaacagcaagctgcgagcctgtgacctaaccaagctccgtgtgcgggacatagcccatggaaaacatgtgtcgtcacgagccatcgcgatgcagcagaacacgcagcggcaagtacaatctgaaatcaccgagcaaaccggaacgcccctggaggcgtggatgcgtaaggccgtgacctaa

SEQ ID NO: 353006 - DNA, 945 bp, Pseudomonas aeruginosa
atgactaacctcaggcagctactcccgccattgaacgcactgcgcactttcgaagcggcggctcgccatggcagtttcaagatggcggcggaggagctctgtgtgactcaggcggcggtcagtcgccagatccaaacgctggaagacttttatggcttgaatttgttcctgcgcagcaaccgcaaggtccagctcaccagcgacggacatgcgttgtacctcgcggcatcttccgccttgcatcacattgctacggcgtcccgcgagctgctgcgacgcaacagtctggattacctggccctgacaaccactaccgctttcgctcagctatggctgatgccgaggctgaagcaactgcgagccctgcaccctgaactgcacttgcatctgattagctgcgaggaaaaccccgactatcaggtgagtttcagtgctgcggtgactctgggactcgaagagcatccgcactatgtggccgagtacctcttcactgaagagatattcccagtctgtacacccggttttctccagcagaacccccagatcaccaccctggaagggctgatgagcgtcacgctactgaacctcagggccgacaattggaaagccaggctttgcgtgcccgtcgattggtcgttctggctgaagcagtttggcttcgatgctgcgatgtgtcgggagacgatggatttcagccatttctccaagctgctggatgcggtccagaaggaggtgggtgtcggcctggtctggcgtcatttggtccagccgcagttggacgcgggcaagctggtaaggccgttcagcgagacttatctcgccgaagatcgaaagcactactttgtctgtcgtcgcgatctggccgagtcggtggaaatgcaggtgctccgcgattggttggttgaacagactcaggatttgagggcgcggtccattcgcggttag

SEQ ID NO: 353007 - DNA, 885 bp, Pseudomonas aeruginosa
atgcaaatccctgaggtggaggtattttccgcgatagctgccagcggcagtctttccggcgcggcgcgacggctggggttgtctcccatgacagtttcacggcggttggcttctctggagcgagagctgggtgtgcgccttgttcaccggaccacccgctcggtgtcgctcacatcagagggggaagtgttcctcccctatgcgaatacgattctggaggctgaagagtcggccaggacaatgctgaaggctaatgcaggaacggctagcggtgtattgcgagtcacggcgccaacggtgtttggtcaggctgtgatcatgcctctgattccctcgttgctggccgataatccggcgctggaagtagacctgacgctgtcggatagcatcgtcgatattgttggcatggggattgacttggccattcggatcgcgactctgcaggattcagaattagtagctcgccccttggcacccaatccgcgcgtgctttgtgccagtcccgactatctggcccgccatggtaggccgagcacgctcgacgagcttaagacgcaccagtgcatcgctctgcacggtatgccttgttggtcatttgtgcagcgaggagaggttgtcgctatccgagcagagggggccttttccgcaaatagtgtcgaagcggttcgcgcagccagcaagaacggcttggggctggcgatgctgacctactgggatatccgcaacgagttgagcgacggcagcctggttcaggttgagttagatgatgctgtttccgaacagctttctatcactgctgtattacccacgcgccggcagataccttaccgagtacaagcttttttggagcgtctcgaagttgctctagatcgccaggcgcagtga

SEQ ID NO: 353008 - DNA, 1113 bp, Pseudomonas aeruginosa
atgaagacatcccccctccagattctaactcgatacgatattggcggcgtccaattgagtaacaggctagccgtcgccccgatgacccgtgtcagtgctacggaaagtgggagcgccacgacggaaatggcccgctactacgagcgcttcgccaaaggtggcttcgggctggtcatcacagaaggcatctacacggaccaaaaattctctcagggctatcctttccagcccggcatcaccgatcaagcgcaagccacagcgtggcgagcaatcactgacctgattcacagccatcagggcgcagtgttcgcgcagatcatgcatgcaggagcgctaagccaagggaatcgctttctgggcaattctgccgcgccatcgacgattcgccccaagggaacacaaatgaatttctactacggccagggcgagtacccgataccgaaagcaatgacggatgaagacatcgctgacgccatcgcagggttcgctcataccgcgcaactggccataaacacctcgggattcgacggtatcgagatacacggcgcgaacggctatctgctcgatcaattcatcactgactacaccaaccaacgtagcgaccgctgggggggtaatgtgcaaaatcgaattgccctgacacttgaggtgatcaaggccgtgagagctgtggcagagagcgttcctgtaggtgttcggatttcgcagagcaaggtcaacgactacgagcacaaatgggcggagggagaagcggccgcagaagtaattttcggctcgctggccgacgcaggtgtcaatttcatccatgtcaccgagtttgaagcgtggaagccagcattcaggcagggagataccagtctggtaactttggcgcgccgatacgctccaagtgtttccgtgatcgccaatggcggattgcacgacatccagcacgccgaacgcgctctaagagatggcgcagacatcatcgccctcggaaaggcggccttggcaaaccctgactttccgaatcgcctcgcagagaatcacccaattgccgatttcgacccgacaatcctgggcccaatagccaacatcaaagcgagtgaggtagcgccgagtcaggctcactga

SEQ ID NO: 353009 - DNA, 315 bp, Pseudomonas aeruginosa
atgctgcgcgagcatctgatgcagaactggttcggccacagcgatctggcgatggaggaagcgctgtacgagaagcccctcttgcgccagttttccgggctgagcctgcagcgcattcccgacgagattgtcatcctcaacttccgtcgtttgctggagaagcacgaactggccgtaaggattctggccgtgattaatggctacctgagtgatcgcggtctgtcgctgcgccaaggcgccatcgttgatgtgacgctaatttatgcgcccactaggtattcccaacccggggcgactcacatcttgaggcagtag

SEQ ID NO: 353010 - DNA, 1266 bp, Pseudomonas aeruginosa
atgcgtgttctggtgctcggcagcggtgtagtcggtacgacaagtgcgtactacctggctcgtgcaggtttcgaggtagtcgtaatcgatcgtcagaatggccctgctgaagagaccagtttcggaaatgccggtcaggtttcccccggatacgcttcaccgtgggcggcgcccggtgtgccgctgaaagccatgaaatggatggtccagcagcatgcgccgttggcgatcaagctgacctccaatatggatcagtacatttggatgacccagatgctgctgaactgcactgctgcgcgctacgccgtgaacaaggagcgcatggtccgcctgtccgagtacagccgggactgcctcgatgaactccgcactgaaaccggcatcgcctacgaaggccgccagctcggcaccactcaactgttccgcacccaggcccaggttgacgctgccgtcaaggacaccgccgtgctcgaagcttcgggcgtgccctacgagctgctcgaccgcgatggcatcgcccgtgtggaacccgcgctggccaacgtcaaacacaagctggcgggtgcgttgcgcctacccaacgaccagaccggcgactgccagatgttcactacccgcctcgccgagatggcagtgcagctgggtgtggaattccgcttcggtcggaacatcgagcgcctggacttcgccggcgaccaaattaccggcgtatgggtcgatgggaagctcgagaaagctgatcgctatgtcctggcccttggcagctacagcccgcagatgttggcgccgttggggctcaaggtgccaatctatccgcttaaaggttactccctgacggtaccaatcatcgatccggccatgtcaccgacctcgaccatcctcgacgagacctacaaggttgccattacccgtttcgataaccgcattcgcgtaggaggcatggccgagatcgctggtttcgacctgtcgctgaacccggcccgtcgcgacaccttggaaatggtcaccgctgacctctatccgaagggtggcgatcttagtcaggcaaccttctggacagggctgcgtcccgcgactccggatggcacgccgattgtgggcgccacgccttaccgaaacctgtatctcaataccgggcatggcaccctcggctggaccatgtcctgcgggtccggccgcgtcctcgctgacgtgatgtcggcgaagaaggctcaaatcagcatcgctgggctcgacatttctcgctacgacactacgagtgcctag

SEQ ID NO: 353011 - DNA, 6702 bp, Pseudomonas aeruginosa
atgagcgacgacgcagttgaaaaaggcagcaccggtctgctcagcattgagatggttccgaccacgtccgagcccctgattgccgaggacaaatcgcccgacgaatcgaccgagccggtgccagtcaaagccgttaagatccaagccaccgtcgttgccaagctcaacctcgctgattaccagaatgctgtcccgctgatccgtgagctgcgagtcatcaacgagaccgcgacaaagtacagcgatctcgaacttacgctgtcttccgatccggccgtattcaagccgaagacctggcacatctctgagctcagcgcggaggtttttcggcaaatcccggggctcgatctagccgttgatgggagcatgctcgccaaactgaccgaggccgagcactcgacactcaacttcgttctgacctgtagaggggaatcccccgaggcgcgccgcgaagtcattgctcagactgatctcccgctggaggtgctgccgcggaatcagtggggaggactggcccaccttccggagttaacggctgcgttcgtacagcccaatgatctagccgtggagaccctgcttaagaaagcggccgaactgctgcgcaagcatgggaaaaatgcagctctggacggttactccagtggctccgagcatgcctgggaaatcgtttccgccatctggagtacggtggtgtccatggggctggactatgccctgccgccggcaagtttcgagcgagatggtcagaaggtgcgcagccccagccacctggctgaacacggccttgcaacctgcttcgacaccaccatgctgttctgtgcactgcttgagcaagcaggccttaatccgctgatcatctttacccgtggccacgcatttgttggcctatggctaaaaaacgaagagttcacgacaacggtcgtcgacgatatcactgcgctgcggaagcgcatgaagctcaacgaactcgtgctgttcgaaaccacacttgtcacccagcgcccatccgtgggtttgcgctacgccatcgagcgcggtgcggaacaccttgccgaaggtaaggaagccacgttcgaaatggcgctggatatccgtcgggcacgccttcagcgaatcaagccgatggccagcggggaagcccaggcagttggcagcggtacagctcaagaagaagcctccgcagcgcttgcacccgagatcgaagcgccgatggcgttgccgagcgatgtcgcggacacagtcgatgtcgcgagccttgatcccaaggatcgcctaggccgctggcagcgcaagctgctggacctgtccctgcgcaacaacctgctcaacttcaagacgggcaagaaagcgctgaaactcgaggcgcctaatcccagtgcgctcgaagatctgctggccaccggcaagcaaatcaagctgatgacacggccggatctgatggatggtgctgatccgcgcgacaaggagctctacgaatcccgcgaacgcgaaaacgtccggcgacagcatgccctcgatgcgctcaagcgcaacgaggtgttcatcgccctgtcgcaaacagaactcgacagccgcctgatcgagttgtaccgcggcgccagaaccaacctccaggaagggggtgccaacaccctgttcctcgcccttggattcctttcgtggacacgggaagaccgtgacaaccaacgctatcgtgcaccgctgatcctggttccggtaaccctggagcgtaagagtgcgcgctcgggctttacgatcctcctgcatgatgacgagccacgctttaacccgacactcattgagatgctgcgccaggactacgaactgaaccttggcgtggcggaaggtgagttgccgcgggacgaatcgggcctggacatcgacgcgatctggcgcaatgtcgcgcacgcggtgaaggacatcaaaggctgggaagtgagtgaggacgttgtcctctcaatgttctccttcgccaaatacctgatgtggaaggatctcagcgagcgcaccgatgccctgcgggataaccccgtagtgcgtcatctgctggacacgccccgcgatgcgtacagctcggccactaataccccattccccgccagcaacaaactcgacgctgagtacagcccgaagcaggtgttctgccccctcccctatgactcttcacagctgtcggcggtgctagctgcctcacagcagaaggacttcgtgctgatcggtccgccggggactggcaagagccaaaccatcgtgaacatgatcgcccagttcatcgccgaggataagcgcgtgcttttcgtctcggagaaaatcgcggcgctcaatgtcgtgtaccgccgcctacgggaagtgggcctgggcgagttctgcctggaagtccactccaacaaggcgagcaagacggatgtgctgtcgcaactcaatgccgcttggcaagctcgtggcgaggtggacgcagaaacctggaaaactgaagccgagcgccttgagtcactgcgcaagagccttaacgtctacgtcgatcgactgcaccaccgttatccaaatgggctgagcatctacgatgcgatcggcgccaccatcgccggccaagacttgcctgtcgtctcgttgtcatggccgacaccactgatgcacgaccgtgaggcgttgcatcgcctgctggagctcacggatcgcctggaagtcaatgcgcaatcagttgggtattccaagcttaccgaacaccccctaggcgcgattagtcagcacgactggtcgccaacttggcagcaacaggtgatccaggccgcgcgcgacgttatcccagcaatcaattcgatggggaaagacgcagcgcacttcatcgaagcggctaacctccccaatatcgagctcactcgtacgacgcgcgagggtctctcgacgcttgccgcaaccctgccccaggcggccggccaggattggagattcgtccttcggccagatgcccgcctcatcgcgcaacgcctacaacaaggctgtgaactggttaaggtgcatcgcgagatcaacggcaagcttcccgcgccttggtcgcaaaccacaatcactgcctgccaggatggcttggagctactcgaacagcacgcccagctgacgcagtcgttaccggagccactcgcggtgtcgaacatggtcgtgctgtcgcaagcaatcaagctgtttgacgaaattgcagccttgcgccaatgcctatcggtttcctacacccctggcattgaagatctggatgtcgccgccttgcttggagagtgggaccgggccgagcagtcgttttggcctaagtcctggctggggaaacgacgaatcaggcagcaactgagtcagctcatcgacggcaacgccgaacccaacatccccgtcgacctccagaatctggtttcgattcgaaccgtgcgtcagcacatagagggcttgggactcggttccgacaccgccgaattctggcgaggagcgaactcggatcctgccgtactgctccaggtgaaaacactccaagtcgccattcaagcagccaaggagaaccgtggctgggaggatgaaggttttgaactgatcgctcagggcgcggccggctccgcattgaaaggcacgcttgacgccatgcgtgaacaacgtgtgcttcatcggaagattactgcccacggtgagcctctgaaatcagccgctgctggcctgtggcaggatctcagcacaagcaaaaccaaccttgctgccgcgattgcgtttcagaaagaacgtcgtgcaatagtcgaggaaggccgcctcgagcaagaccatgaactgatcgccaccggcaaatgtggaccgaccctgcgggcagagcacaacctgctcgaacagcgggcaaacaacgagcggacgctgaaggagttcgctgacctacgcgacctcgccgccgggctctggacaggtttacacaccaagaccgacgtggctttggccgcagtgaatttccaaggacacatcgctactgccgtctcccagttggcacgtactccggatgaaatcacctcactcaagtcggcgctgacgcagctactgggtgatggcaacgccctcctcgagtcacaaggtctggtgaaccaatatggtcggcagtacctggcgtccgtggcccaactcaaaaacagcttggaccggctggcctctacgggacacttcagcaacgacggcagcgaacgtgttggcggcctgtcccttgatgagcaacgtcagcagtgtgaaggcatcattcaggctgaacacaacctgcatgattggagcgcatggtgcaaagtccgtgacgaggcatccggcctcggactccggcctctcattcaagctcttgagaatgggctcctggctcagggcacgatcaagaaggtgttccaagccaattacgctcgctggtggttgaacgcaacggtcgatcaggagccgactattcgcaacttcgtcagcgtcgagcatgagcaacgtatccgggatttccgcgccctcgatgagaagctcactgccctcacccgagatttgctgcgggcccgtttgtgtgcaggcctgccgacgcccgacagtgtcactcaagcctcggagtggggcgtgctgcgccacgagctttcgaagaaaacccgacacaagccacttcgcgaattgatgtcgaccattccggcagccttggcaaagctcacgccgtgcatgctgatgagtccgctgtccatcgcccagtatttgtcgacaacatcgaccgtgttcgacgtggtcatctttgacgagtcctcgcaaatccccgtgtgggatgccattggcgccatcgcacgggggcgccaggtgatcatggttggcgacccgaaacagatgccgcccacctccttcttcgaccgcgccgaaacgacgaacgaagacgatgatgtcgagccggatctggagagcatcctggacgagtgcctgagtgccaacctgcctaccctcgacctgaattggcactaccgcagtcggcacgagagcctgatcactttctccaaccatcgttactacaaaggcaatctggttaccttcccggcaccggtcacatccgatcgcgcggtaagcctgaacctcgttcaaggcgtctacgacaggggtggctcgcgcaccaacctgggcgaagccaaagcccttgtggcacatctcgtggcgcgcctgcgcacccgcgaggtgaaggagaacaagctgaccttcggcgtcgttactttcaacggcgaacagcaacgcctcattgaagacttgctcgatgccgagcgccgcaacgacccgtcactcgaaagctacttcgctgacacgcagttggaaccggtcttcgttaagaacctggaaagcgtccagggcgacgagcgggacatcatctacttctccatcacctatggccgagatgccgcaggccatatgacgatgagcttcgggccgatgaaccgtccaggcggtgaacgtcgcttgaacgtagcggttacccgtgctcgccatgagctactggttttctccaccatgagtccggacctcatcgatctggcccgcacccagtccattggcgtgcgagacatgaagcacttcctcgagttcgccgagcgcggaccgcgggcaatcgtcgaggcaactgctaacagccttgggagcttcgacagccccttcgaggaacaggtcgccaaagcgttgggtcgcaagggctggcatgtcgcgacgcagattggcgtctctgcgtttcggatcgaccttgccgtggttcacccggacgctccgggccgctacctcgcgggcgttgaatgtgacggcgccacttaccatcgcagcgccactgcccgagaccgcgacaagctccgcgaacaggtgctgcgtggcctcggctgggagattctgcgcgtttggtcaaccgactggtggatcaaccccatcggaaccgccgaaaaacttcacgaacgcctggaaacgctgctggctgaaagccgtgcccgccaagccagtgcgcaagccgatttgacctacccggttgaagaggtgaaagaagcagtagaagtcgccagcgacgacgtgcaaccgatggaggaaattgccttacctgttggccgtatgactgacgccccacaggtcagcggccagtacgcgagggcattcacgccagaggctactgccgtccccgaacagcagtcggctgtgtaccgtaaggtggacccgcttgccgcggttgagaccgtcgacccagaggcgttcttcgaggaccattacaacaacgtcctgacctccatgattgctcacgtcgtggttcacgaaggcccggtgctcgacgttatcctggcccagcgaattgcgcgagcgcatggctgggtacgcaccggcaaccgcattcgtgatcgcgtcagccgactggcggagcagacccaccgcaagacggcagaagatgtcggcgacttctattggccatcccatctcgaagatgacagcgcagtatcgttccgaaaggcggccgatagtgacagcctgcgcggcgtggatgagatcagccagaaagagcttgaggctctggcgcgtgaggtcttggctcgaggcgaactcgccgacaatctgctttacgccatggcacgtgctatagggctgcagaaagtctctgctcagagcaagcagcgacttgaacaggtcattgccaacgtgaaccaggccgccgctctgtag

SEQ ID NO: 353012 - DNA, 1008 bp, Pseudomonas aeruginosa
atgggctggaagggaacattgcgctccatgcaggctgcatctcgccgagcagaacggaatgcgcagcgtaagcagagagagttggagaagcgcggcaaggaatacgccaagatggaggcgcttgagcaggcggcttacgaagtggaggtctacgacaactacatcgaagtcctgcagtcggtccacaaggaatgctctgagcaggtcgattgggctagttatctggcacgacctgaaccacgagaaccagagcgggttgcctcttcggaagtggcggcacaatcgcgcttggacagctaccagcctggcttctttgcgcgcttgttcggcttacagcagcgccagctagcgtcgctgcgaaatgccgtcgataagggccgtgcggaagactccgatcgcttcaagaaggagagggaggcctggcacaccgaatactcagaatggcaaacggattacgcattggcccagcgattgttgagaggggagggccaagccaagttggatgcgatcgaactgctgaacccgttcgaagacatttccatgctgggcacctcagtcaaatttgtcatccaggagggcgggctggttgaggttttcctcagtgtccacggggatcgcgtcatcccggcagagagcaagagcctgctgcagagtggcaagctatccacgaagaagctcccggcggggaaatacaacgagttgctgcaggactacgtctgcagttgcgtattgcgggttggtcgagaactcctggcgatactcactgatgagctggtcatcgtcaccgctaccgaccggctcctcaacacgtcctcggggcatctggaagagttgcccttgctcagtgtggcgatctcccggcggacgatcgtgtcgctcaatcttgatgcgattgacccgtcggactcgatgaggaatttcgttcacaacatgtcgttcaagaagaccgcgggattcgcgccggttaaggctcttcaggcgaaggattttctcaccgcgacactttaa

SEQ ID NO: 353013 - DNA, 357 bp, Pseudomonas aeruginosa
atgagcaaactagcggaattcaaacgtcttgaagcgcagctcgcggaacaactggccgcgctgaacagcctcaagaacgatgcagaactcaagcgcgaaattgagttcgaaaccaaactcagagcactgctgaatgagtacggcttcgggctcaaggtggtaatcaatatccttgatccaggtcgtgcacgagcgccaatgcctgctcagaaaggccgacggcgcgagcgcactgtcaaggtctacaagaatccacacaccaacgaagtggtcgagaccaaaggtggcaacaacaaggttctgaacgcctggaaagccgaatacggcgctgaggcagttaagtcctggctccagtga

SEQ ID NO: 353014 - DNA, 2820 bp, Pseudomonas aeruginosa
gtgagcgattaccagggcatgcgttggttcaaaacggattttcaggtccaaacgcccgaggacaacaagcattgggcggatgatgatctgcgcctgttgagccctcgacatccaatagtcaacggcgagcctgacgaagcggatatccagggcaaagccaagtgttttctacgccgctgccatgagctggagctggaagtcattggtatcaccgatcacaacttctccgagaaaacggagccgcgtgattggttcctcacccatctcgttgagcagaacaagactgttgcccgggagcttggacgccccccgctgtacatcttgccgggctttgaagtggatattggctaccacgttctctgcctgtttgatcctgccaccaaggtgagtcacctgcggcgcgtcaacatgatcttgatcaagctgggcttggcagagaatcagcgttttcgtggtgggatacccaccgcacttcgtcgcggcgacgagtcgatcagcctgaagacgttgttggacacggtgcagaaggagcatggcggtatcgtaatcgctgcgcatgccgaccaacaggatggtttgctgtcggctccacgcaacattgacgattacaagttgccgggtctgttggccctggagctgactggctatccgatgtcagagaagtatcgcgccatcctggaagggcgtaacaaggactggtcgcgtgttggacgacaaccggcctatgtgcagtcatcggatgcgaagtcgttaaaaactgatgcagagggccgcccgttgcaaaatgcgctgggctaccgacacacctgggtcaaatcgtcgaagccttcgatcacatcactccggcaggctttccttgatggcaagtctcgccttcggctgcagaccgtccgaccttcggacgagcagacacatcctcggatcgtctttctgaggtgtcgcggactcaagttcctcgacgaccaggaaattcacttctcgcccaacctcaatacgctgatcggcgggcggggtacgggtaaatccacagcgttggaactgctgcggtttgcgttcagtcgcgatcacggcgacgcgatttccgactcaacccggtcgaagttcgatcgggtgaaggccacctataccgacaatgcggagatacaggtcgggtgggagagtctgccgggtcaggtagatatcatttcgctgaagccacacgagggccatgccctgctgcaaggagaggtacacgaccttgccgtctatctccgacagctaccagtgcagttctacagtcaacagcagctcagtgaacttaccgacgcgcatggcggtggccgacttctggccatgatcgacgaatcgtgtgcggcagaactgcagggactgaagggacaagaagacacactgcgggccgagatccagcaactgtttgcggccatggatcagctcggagctctacacgaggaagtcacggttctgaagcaggagatccaggagctggatcgacagtggcaggcgcgaagtgaggttcaggatgaggcccagcgatatcagcgtgcagagggggcccggcggtactttgatcaggttcagactcaagtatcggaggacatcaatcggctgatcaaggtggtcggtgaactgtcgtcgcagggcgtgctcaacgatggaaaagttgaggtgtggcctagggcttcttggttcaacgagttgacgctaggggcgtcgcagctgcgagacgtttacaaaaccaaggtcgaggcgttggtggttgaaatgcgccaggatgcggcggagcttctggcacaaggcgatggttgggaacaggtactgaaggatctggaaggtaccaaagaggcgtttctcgtggcctgccgtgagcgtggtctacagccacaggatgtcacgcgcctccaagagatcgacaaggtacgccagacaaagctccattcgctcaaggaaaaagaagcgcggctgaacgttctcaggccgcagcgtgatcgcttgaatacagctttgaatgacatgaacctgttgtgggaacagcagtgtgcggttcggcagcttgctgcggcagaaatcagtgaaaaggctgacggttctattcgagtgttggtccaacctatggctgaaggtcgggactatttcaacgcttgggacgagatgattcctgatggacgcagtcgattggggcgagcgtgggatcacattggcaagctgctgttcgcggattttcttcggtaccagcacgaggttcaaccaaaggcggactcaccttggcttcacatccaacatgtggtggctggcacccgtgagttgccattggcacttctggaatacaaggctgagctggtcacctacttcaacgagcagaaggcagcgtggcgggtagcaaggttgacccgagtggaagagcgcgtagacattgaattgtaccgggcggaccggactctggtcgggagcgtgctgagcaatgctctgtcggaaggacagcgcaatacagcggtgttgaatttgctgctggccaagggagaggggcccattatcatcgaccagccggaagatgaactggattcgaacttcatctatcgcgagttggtacccctgctgcggaaggtgaagaaccagcgacagctaattcttgccacgcacaatgccaaccttcctgtaaacgccgatactgacctggtatatgccctggaggtagctcagggccgaggcgtgaaacttgcggtaggggggctcgatcgggcagacacgtcgactgctgtactggatatcatggaaggatccgccgaagcctttaagcgtcgattcgacaagtaccatttttaa

SEQ ID NO: 353015 - DNA, 855 bp, Pseudomonas aeruginosa
atgcgtgaacgttccgatccatcgtcatccgtactgctagtccgtccagtcgatcgcgcgctgctcgatgcggtgaccgctttggtgctggaggcgggacaccggatcgttgcggaactgctgcgaccgggtgggccgaggggggccggggacaaggccgagatcgacgtcgaggttgaggtcatgctgcgccagggactgacccggttgctggcctgcgactttgtcggtgaggaaactggcgtccttctgacgggccatcgttattgctgggtggtggatcccaatgatggcacccgcgacttcctgcaagggcacccgggctcggcaatctcggtggggctgctggatgactgtgtgccggtactgggtgtggtctatgcccccaggacggaccgcggaccggattgcatcgcctggtcccgggggctgccctccctgctgcgcaatggcgcattgactgcgccgaacgcatcagcaggcggcttgaaggaggggggccaggtctttgtcagcctcgcggcgcgtgctcgaccgatcgagaacgccgcgctctgtgcgcctgcgactttccacccgatgccgagcattgcttatcgcctcgcccgcgtggccgctggggatgggatagccgcggtgtccttgtacgcggtgtcgccccacgacgtggtggcgggccacgcgctgctgcgggcctgtggaggcggtctgtggaacgaacagggacaggccgtgggttacgcaacacccaccgcattcaatcaaccagtcaggttttgcttcggcggcacagaggctgcttgccgggagctggtcgcgcgcccgtggcagctcgctcttcgtgcctgcgattga

SEQ ID NO: 353016 - DNA, 207 bp, Pseudomonas aeruginosa
atgactagcagctacgacgtgcaatacgcccacatcttggaacatgcagagcgggtctttgggagtcgggagaaagctgagcgctggatgaccacgccggcgctcgggctggatgggcggcgacccgtcgacctgcttgccaacgcagatgacctggaactgctcgaggtgtttctcacgcgtatcgagtatggggtctaccactga

SEQ ID NO: 353017 - DNA, 411 bp, Pseudomonas aeruginosa
atggagctgttcctacccagtggcaagggcgaccgtgacaaccgcggtcgttcgttctcggtgccggcgttaacgcggctgtgcccggtggaggcgtacctcgactggatcgccgcgtcgggcttgcgccagggcccggtgtttcgcgcggtggatcgctggggcaacctggcggaggaggggctgcacgcgtacagcgtctcgcgcatcctccgtcgggtcatgttgtgcagtggcttggaaagcgagcggttcagcagccactcattgcgccgggggtttgcgacctgggccagtcgcaaccagtggagtgccaaggccttgatgagttatgtcggctggcgcgatgccaaggccgccctgcgctatatcgaaccggacatgccgttcggcgaactgcgccgctcctag

SEQ ID NO: 353018 - DNA, 141 bp, Pseudomonas aeruginosa
atgacagagaaggtggatcactatcggcaggccgcccggcgcgcgagtacccagcgtcgctatcagcaggcgctcgagcatttcgagggcacctggggcggcttcttgccctcctacagtgccggcgggatcgcgctctga

SEQ ID NO: 353019 - DNA, 1401 bp, Pseudomonas aeruginosa
atgacccgatcgctacgagactggcaattcagctgcatcaacatggcgttggagcactttaccgtcacgccgcacttcttttgtcaggcaacgccaggggccggcaagacgcgtatggcggcagagctggcccgcagactgcttgagcaggacaagatcgatctggtgttgtgctttgcaccatcttgccaggttgttgagggctttcgctcgacctttgcggcggtgctcggcagacgtctggacggccaaataggcgcagtgggagcggcgttcacctaccaggccatggaataccgagatgaggggttctggcagcttctcgatgactatcgagtgctcgtggtcttcgacgaaattcaccactgcgccggtcatgacctactgctcagcaacgcctggggtcaacagatactgcaccgaattcaagaccgggctgccttcaccttggcgctctccggcacaccttggcgttcggacgacagggccattgccttggcacgttattcaatgcccgagaggcagctgatctgcgactaccgttacggcctgaaagaatccattgccgacggcgtgtgccgttctcctcgcattgtcctgctcgacaatcagaaggtgaaactcaccgaggagctgggcactgatagcaccgtgacgatgtttcccagcattgcgaagctgttgggggagtcccccgtcacctacgaagaactgctgaggcacgacgaggtgatcgatcaactgctcgacctcagttgcagcaaactggatgagcttcgccagatcaaacctgatgcggctggcttggtggttgccaccgacattgagcacgcccaacaaattgctcaagccctgggcgtcaggggggaggcttgccgcatcgtgaccaacaaaacccccgatgcgcagcaggtgatcaatgcattcagacatggcgtctgccggtggattgtggcggttggaatgatcagcgaaggcacggacatcccccggctgcaagtgtgctgctacctcagccgcatccgcaccgaattgcattaccggcaagtgctgggacgagtgctccgacgcaccggcgaatccgatgatcaggcatggttgttcatgctggcggaactgaccttacagggttttgccgagcgcattgcggatgacctgccggatgacctggcggtactaaacgcggtacaggccccagccttcactgccgatgccaagcctggtttggttgatcctgtcggcaatctcaatgggctggatttcaatcctggaagtaacacggatcagacgattgcagcagtcgctaccagcatgatttcgcttgggggcgttacaaccgagccaagttatcaggtgagcttttcccagcattacaggcagcagttactagcttgtttttaa

SEQ ID NO: 353020 - DNA, 591 bp, Pseudomonas aeruginosa
atgaaatcggcctcgtttatcttcgacaggcgactgtatgagctgcttcaggaggaagggcgcgtacggttcacgactcgtgaactgcgtgatgcctatgccaagcgcctggaaggcatgactttccgtatcggcgatgtgcgtcgctacgtgtatgaccagattcgccgaatgctgcgcacggggtgggttgtactcgatgacgagcgacgttcgcggggacaggtctaccgcctgcaacccacaccggctcatctgcaactggagctgatcgataacgggttcgagaacagtttccaaactgcatccgagccaaagcagcagtcttcagttctggatgatgcgaccgtgccgctcgaaccgtcatccgatgcggagcagcacttggaagcgctccataacgaagtccggttggacttcctgtcgtcgatgggcgaggcggagcgatacaagctgctcctggatgatatgccgcatctgcgtgacaaggtcgaagccgagtatctggaggctagagaccgcagttcacgcctgctgggacatctccgcgctatcgagaagaccctcaagacgcttgccgctgcacgatga

SEQ ID NO: 353021 - DNA, 222 bp, Pseudomonas aeruginosa
atggataacttggcgaaggcgttagggaaacgcatccgaacgcagaggaaggcctgccggatttcgcaagaagctctagcgctggcctgcagtatcgaccgcagctacatgggccggatcgagcgtggtgaagtcagcatcaccgtcgagaaactgtatctgatcgcaagccagctcgcctgcgaaccgtcctgccttctgcctcaaatgtcagagctgtag

SEQ ID NO: 353022 - DNA, 171 bp, Pseudomonas aeruginosa
atgcaacctaaggatcgtcacgctctacccttggcaatcgagctgtatgaagctgaagcccgccgtttggccggacaagtttccgccaatcagcgtcgtttccttaaggtcggtttggagaagggcaaggagtgtgaacccactgggcggttggctggcccatacgcctaa

SEQ ID NO: 353023 - DNA, 1074 bp, Pseudomonas aeruginosa
atgagccgccgcacggactccgacgcaccgaccatcaccgctgcctacccccgcctgctgctcggcctgctggaggagcgcggcctggacggacgcgcgctgctacgggaaatcggtctgtcgacgctgcgactggaagagccggaagcacgcgtcacatcgcagcagtaccaggcgatcgccgccgcggcgctcgcgctgagcggcgaccccggcctcggcgcacagctcgccttgcgcacgcctcccaccgcccatggcagcctgggctacgcgatgatgacctcggcgacgctcggcgatgccttgtgcctggcgctgcgctacatgccgctgctgcagggcaacgtcgaaatcagcctgctgcgcgaggacgagcaggtgatcctgcgcatgctgccaggccccgcgctcccgccggcactgcaccggtacttcagcgaagccctgctgatcggcctgtatcgctccggcgcctggctgctcggcgaaccggccctggtcggcaggctcgacttcgactatcccgaacctgccgtgcctgtgccgctgccgcagtgccgctacgaccaggcccacgtccagctggtgttccccgccatcctgctcgcccgctcgctaccgatggccgatccggctgcgttgcgccgcgcccgcgaacactgcgagcgcgaactggcgctgctcgatgccggccgccgggacatctgcgcccgcgtgcggctggagctggaacgccaggaacagcgcttccccaacctggaggaagtagccgcgcgcctgcacctgtccagccgcagcctcaagcggcatctgcatgacgccggcaccagctttcgccagttgctcggtcaggctcgccagcgccaggccttgcgattgctgcggcgtcccgaggtgtcgttgcagcgtatcgccctgtacctgggttacagcgatccaaccaacttcacccgcgccttcaagcgctggaccggcgagccgccgagcgacacccgcgcccgcctgctgggcgggcaaccagtttcacgaacaaatgccaagcgctcgacaaatccctcgcgtttcccttga

SEQ ID NO: 353024 - DNA, 240 bp, Pseudomonas aeruginosa
atgaagggtaccgccagttcggagaagcgcgcgatggaacgcaggccgccgaagatgatcaacgcggtgaggatcaccacggcgatgccgctgatccaggtcggcacgccgaaggcgccctgcatggcaccggtgatggtattggcctgcaccgagttgaagacgaaaccgaaggcgatgatcaggaagatcgagaacaggatgcccatccagcgcgcgcccaggcccttctccatgtag

SEQ ID NO: 353025 - DNA, 195 bp, Pseudomonas aeruginosa
atgaccaagacccgcgcacaacgcaagccgaccgcagcgcctgacaaagcggcttctgctggtcgcgtcttcaagttctcgctcaagggcatcccggccgtggatgcggcgatggaagcccgcctggaagccgcagcgcggattccgcgcaaggatcggcattgcccggtcatggtcgaagcgccggacgcctga

SEQ ID NO: 353026 - DNA, 891 bp, Pseudomonas aeruginosa
atgaacgcctaccagcatgccttaaccgaccgcctggacattgcctatctcgaatggaatccgcagggcgaccgaaccgccatactgctgcacggctggccggacagccctgagtgttggaaggccgtggcacccgtgctggccgaagccggctaccgcgtgctggcgccggcgttgcgcggtttcgcgccgatccggttccgcgatgccgccacgccacgcagcggccagttgtccgcgctggggcgcgatctgctgggcttcatcgacgtgctggggctggagcgcccggcactgatcggccatgactggggcgcgcgggccgccgccaatgcctgcggcctgcgcgaaggtgcggcctcgcacctggtgatgttgtcggtcggatacggcaccaacgacccgaaccagccgctgtccttggcgcaggcgcgcaactactggtatcactggtacatggccacgccgcgcggcgagcgcgtggtacgggaagaacgcgaggcgttcgcccggcagatgtgggacacctgggcgccgaccggctggtatgacccggccgacttcgacgaggcagcgcgggcgttccagggcgaggactgggccgagatcgtgttgcactcttaccgccaccgctggggcttcgccgagggcgacccggcctacgcggaggacgaggcgcacctgaaccccgcgcccgtcctggccgtgccgaccctggtgctgcacggcggggtcgatacctgcaaccaccccgacagttccaagggacgggaagcgttcttcacgggccgctacgagcggcaggtgctcgatggcgtcgggcacttcccgcagcgggaagcgccgcaggtggtcgctgatgcggtttcgcggttctgcgcgtcggtgtaa

SEQ ID NO: 353027 - DNA, 903 bp, Pseudomonas aeruginosa
atggacactgcttcgcccgccgccgatggcacaccgctggacaccgtgctgctgcgcacgttccttgaaatcgtggacagcggcagcttcgccgcggccgccgagcgcctagcgctgacgccctcggccgtcagtgggcacatgcggcggctggagcagattgccggcgccagcctgctggcgcgcaccacgcgccgcctggagctgacccaggcaggcgacaccctgtacgcctacggccgcaacatcctcgatctggagcgcgaggcccgcgccaagctgcggggtacaccgctacgcggaaaactgcgcatcggtgcatcggaagactttgccggcgcctggctgccccaggtgctgcaccgctttcgccagtggcaccccgacgcaacggtcgaactgaaggtcggcatcaccgccgacctgctgcgccagcaggagcgcggccgcctggatcttgtcttcggcaagcaatgcagccgcgtcgagggcagcggcacgttgttgtgggaagaaccgctggtctgggcctatgcggcggatcagtccttgccggcgggccagccgctgccgctggcggtcttccccgagccgtgcgtctatcgtgagtccgccgtcacggcactgggcaaaacagatcaggcttggcgcattgtcttcgaaagcagcagcatggccggttgcctgtcggcggcgcggtcgggctttgccattaccgtcatcgccgacagccagcgcagcgacgctttgcgcgtgctgggcagcgaagacggtctgcccgaactgccggcggcgcgcttctacgccttcgcccgcgaggacagcgccgccagtgcggcgctggtcgaggcggcccgccgcgcaggccaaggccgtttcatggggcacggccttcgggactga

SEQ ID NO: 353028 - DNA, 843 bp, Pseudomonas aeruginosa
atgacagacaaggccaagacacgggagcgcacccgataccagcgcctcgacatgctcggcgggctggacatgctggaagcgcgctaccaccagcagcggttctcccggcacgtccacgagacgttctgcatcggcgtcatcgaggaaggtgcccaacgcttctatcgctccggcgcggagcacgtggcaccgaagggcgacatcatcctggtcaatgccgacgacgtgcataccggcagttcggaaatggaaggtggctgggcctatcgggcgatctatccccatcccgacctgttctttgcgatctccagggacatgcagagcgcggcggggacaatcccctggtttcctgatgcggtgctgcacgaccccggcctggcgcagcaactgcgcatgacgttcgacctgcttgcccgtccgggggacacgctgctcaaggaaacgctactgctgtcgtcgctgacctggctgcggctgcgccacggcaagacgcgccgcccgccacgagccttgccctgcgcgacgacgcagatcgccaatgtcaggcagcggatggatagcagccctgaacatgacttttccctgatcgaactggcggacatggccggtcttagcccgtggcacttcttgcggcagttcaaggcggtggccgggattccgccgcatgtctatctcgtccaggcgcgactgcgcaaggccaaggacatgctgctgcacggcagtcccatcgcggcggtttcgatggcctgcggcttcactgaccaaagccatttcagccgccatttcaagaagtcgctgggcgtgacacccggcgagttcgtgcgcgggatttcacgccagtag

SEQ ID NO: 353029 - DNA, 651 bp, Pseudomonas aeruginosa
atgctgccgctttgcctggccgtggtgccgtggggcctgttggccggctcgatggccatccagtccggcctgagcgtgtggcagagcgtcggcatgtccgccatcgtcttcgccggcgccgcgcaactggtcacgctgggtttgctggtgtcgggcgccaatgtcctgacgatcgtgatctcggtgttcctgattacgtcccagcacttcatctatgccctgtcgttgcgcggcttcgtctcccgcctgcaagcgcgttaccggcttccgatcggcttcctgctgaccgatgaactgttcgccctgagcagcacgaaagacagcacgcgcgagctatccgtcagctacctgctgggcgcgggcctagccttctacctcggctgggtggcgttcagcgtcgcgggcatcgtcatggcgtcgtccattcccgacctggatcgttaccacctcgatttctccatcatcgccaccttcgccaccatcgtcgtgccgatggtcaaggacaagagcacattgtcgggcgtcgccgtgtcgctgctgctgtccatgctgcttgtctacggccatgtcgagggcggcatcgtgatcgcgggactgtgtggcatggcgttctccgtcgcggtggcccggatgacgcaggtgcggccatga

SEQ ID NO: 353030 - DNA, 315 bp, Pseudomonas aeruginosa
atgagctggacgctgctgctggcgcttgccgccatcgtgttcgccaatcgctacgtgttccttgaaccgcggctgcccgtgcggattccgaaactgctgcatgacgccctgaaatactcggccccgtgcctgctgacggccatctgcggccccatcatcctgatggacaacggcgcgctccgctcgtttcccgacaacccctacctgtggggcagcctgtgcgcggtcgtcatcgccttcttcgtcaggcaaatggtcgttgcggttctagcgagcttgctggtgttctacgtgcttgtcttcgtgctcggttga

SEQ ID NO: 353031 - DNA, 1245 bp, Pseudomonas aeruginosa
atgaagtcatcccacgtttcgatggtgccggcccctctggagacgatgccaacccgaactgccgatatgccacgcggcctggtactgctgtttgccgctgccagtggcctgagcgtggcgaacgtgtactacgcgcagcccctgctcgatgcgctggcccgcgatttcggtatcagccatgcagccgtgggtggcgtggtgacagccacgcaggtcggatgcgccgtggccttgttgttgctggtgccgctgggcgatcgcgttgagcgccgccgcctgatggcggtgcaactactggcgctggtggcggcactggtgatggtcggcatggcgccgtctgcgccaatcctgctggcaggcatgcttgccgtgggcctgctgggaacggcgatgacacaggggctgatcgcctacgcggccagcgccgctgctccccgtgaacaaggccgcgttgtgggagcggcacagagcggcgtgttcatcggcctgctgctcgcgcgagtgttcgctggcggtgtcagcgatctggcgggctggcgcggcgtgtacttctgcgccgccgtgctgatgctggtgatcgcgctaccgctgtggcggcgactgcctgccttgcctccggcaccgaatccgatgccttacctccgcctgatcgcctcgatgctgacactgctgcgggaagaaaaggtgttgcaggtgcgcggcatgctggcgctgctgctgttcgcggcgttcaacatcttctggagcgcgctggtgctgccgttgagcgcgccgccctacgacttttcgcacactgtcatcggtgcgtttggcctggtcggcgtggtgggcgctttggccgctgcgcgtgccgggcaatgggccgatcggggacatgcccaacgcaccagcgcggcggcgcttgcggtgctgctgctggcgtggtggccgctgtcgctgatggaatggtcgctgtgggcgctggtgatcggcatcgtgctgctcgatctgggctgccaggcgctgcatgtcaccaatcagagcctgatcttccgcacccggcccgaggcgcacagccggctggtcggcctctacatgctgttctatgcggtcggcagtgggcagggtgcgatcggcaccaccgtgacctatgcgcatgccggttggcagggcgtctgtgcgctgggcgcggcggtcagcctgctggcgttgctgttctgggcgatgactttgcaacgcacggcgacgatcgcccgtcagcgctga

SEQ ID NO: 353032 - DNA, 447 bp, Pseudomonas aeruginosa
atgccaacccgcaaacctatgaacgacgcaccttgtcctgttgcgcgctccgtcgatctgataggggatcgctggtcgttgctcatcgtgcgcgatgccttcgacggcatgcgccgcttcggcgacttccagcgcagcctgggcgtcgctcgcaacatcctctccgaccgcctgcgcaagctggtcgatgccggcgtccttgaaacgcaggcggcctcggatggcaccgcctaccaggagtacgtgctgacagccaaaggggaaaacctgttccccatcgtggtggcgttgcggcaatggggcgaacaacatctgttcgagcgtggcgagcggcattcggtgctgatcgacacgcgcaccggcaagccgattccgcgcatggcacccacggcgagggatggctccgtgctggaaccggccacgaccgaagtacggaaggtcacatag

SEQ ID NO: 353033 - DNA, 681 bp, Pseudomonas aeruginosa
atgagccacccactcaccctggtcagccatgtgctgtgcccgtatgtgcagcgcgcggtgatcgtgctcaaggaaaagggcgtgcccttcgagcgccgcgatgtcgatctggcacacaagccagactggttcctggcctgctcgccgctgggcaagacgccggtgctgctggtcggtgatgcgccgatcttcgagtcggccgtgatctgcgagtacctggatgacactctgatgccgcgcctgcatcccgaggatgcgctgagccgtgcccgccatcgcgcctggatggagttcggttcatcgctgctcaacaccatcgccgcgttctacaacgccaaggacgatgcagcgctggacgcgcaagccgatcagctccgtgcgcggctggcgcaggtcgaggctgcgctggccattcgcaccggcaacggcgcctggttcgcgggggaagcgttcagtctggtggatgcggtgttcgggccggtgtttcgctacttcgacgtgttcgatggcctgggggatttccgcttcttcgacggcttgcccaagaccacggcctggcgtgctgcgctggccggccgcgcgtcggtgcgcgaggccgcgcatccagactacccggcgctgctgcgggacttcctgcgcaggcgggaatcggccttgtcgcgcaggatggtgaaggattga

SEQ ID NO: 353034 - DNA, 417 bp, Pseudomonas aeruginosa
atggcaatcacgccatcttcttcggcctatggcattgccttgctgcgcatcagcctgggcgtcatgtgggtggcgcacgcgttgctcaaatggttcgtcttcaccctgccgggtacggcgcagtatttcggcagcgtcggcattccaggctggctggcctatccggtgttcgccgtggagctgctgggcggcatcgcgttgttgctgggcttctatgcgcgccagatcgcgctggcactggtgccggtcatggccgtggcggcctgggtgcatgtgcccaatggctgggcgcataccaatgccggcggcggctgggagtacccggtgttcctggtcgcggcctcggtggcgctgtggttgctgggcgacggcgcacatgcgctgcggcgcagccatcgcttcgtgccggcagcttga

SEQ ID NO: 353035 - DNA, 882 bp, Pseudomonas aeruginosa
gtgattgcaaaaacgcaatacaaactgggcgcaggcgacctggaaatcgtcctggccctggtgcgtgccggcaacctggccggtgcgggcgaacggctgggcgtcgatgcctcgaccgtcttccgctcgatccgtcgcatcgagcgtggcttggggcaaaggctgttcgagcggtcacgcgcgggctacttgccgtcggagcaggcgcaggtgctggccgaacatgccgagcaggtggagtcgcggctggaacaggcgcgctccgccgtgcagctcacgcccgagcaagtgtcgggcacggtgcgcatcaccaccaccgacaccatcctgcacgggctgatcgcgccagcgctgcgcacactcgctacccgccatcccttgctggactatgagctacataccggcaatgagttgaccagcctgacgcggcgcgaggctgacattgcggtgcgcgccaccaagaaaccgccgcagcacctggtcggcaagcacatcggcccgatccgggtggcgctgtacgccagcaagggcagcggcatccggcgctaccaggatgttgaagccggcaaggccgcctggatcgcgcccgacgatgcgctgccggaacacccctcggtgctctggcgcaagcgccatcatcccaaggcagtgccgcgctaccgcgtcaacagcatcctgacggtgatggaactggtggccgccggtatgggtgtcggcgtgctgccggtattcctggcgcagccgcgcaaggacttgatcgcgctgaccgacatcctcgacgaatgccagactgaactgtggctgcttacgcaccccgagtctcggcatctgcggcgggtgtctacggtgttccggcatctgggggagcacttgaacctttga

SEQ ID NO: 353036 - DNA, 558 bp, Pseudomonas aeruginosa
atgaacgcatccgctgcacccgccgcgaacacggccacggctgccgcatcgcctgcggctgcgccgtcgctcgcggtactcgccggccaggccggcaacgtgccgctgacgcgcgtatcgctggcctacatcgaaccgcgattcaagctctacctgcgcttcggcgaaccggcgcgcacgcttcggctcgaccgctggcggcgctgtgcggagttcctgccaggcgcgatgttctgccgcatccgctggcaggccaatgactacggcacgatccgctggcagttgatggtgatgcaagccgccacgccgctggatgccttgcagcgcatccccggcgtgcggcccggtgcgcgcctgctgctgcacgccgagggtgacgccagcgtgcgcgccgtgctggaacgcatcgacgccatcgaggcgctgggcatcgccccgtctgccgtctcgcctgcgtactggcgcacgctgagcaaccggctagcggcgcgcctgccgctgcccgaatacagcatcgaacggcacgccgcttggctggccggaaggacattcccatga

SEQ ID NO: 353037 - DNA, 240 bp, Pseudomonas aeruginosa
atggtctggacgaccgaccgcgagacagtcgcagcggagaaaaagcggctgctggccctgcatcagcagctcaatgccgtggtgaacaacgcgcaccatgccgacgaatgcgccacctggcacatgatggccgaggcgtcgctgttccagttggatcaagacattgacgcgctgttcgactggctggaagccaatgagcgcggacaacggcgagagcgcccggacaggatgtacgactga

SEQ ID NO: 353038 - DNA, 279 bp, Pseudomonas aeruginosa
atgagcagccatcacgattgggtcatcgaagtttcggcacagcacgacgcgcacaagccgttcgcgccggagaacggccagccgctgcgcttcaagatcggcgacgcggtgatctacaccaacgacttcggcgcacagttccatcgccgcgtcaccgggttctatcagcctgccgggccttgcgggctgtacgcgctcggccgacgctacttcatcaattcgacctcgccctggatgccagtcgcggaatccagcctgcgccctgacgacgcggcttaa

SEQ ID NO: 353039 - DNA, 513 bp, Pseudomonas aeruginosa
atgtcgcaactgacccttcttccttccgtcgattctccgctcatggtgcgcgatggtcgcggccgctatcggccggcgacggccgaccagattctggaagctgcgcgccaggccatcgagcacaagatgcagcgcggggattcattcacgtcgccggcggccgtcaaggagtacctgcgcgccaagctggccggcttcgagcatgaggtgttcgcggtgctgttcctcgatacacagcatcgcctgatcgagtatgccgagatgttccgcggcacgatcgactcggccgaggtgcatccgcgcgaagtggtcaagacggccctgcgtcacaacgcggcggcagtcgtcatttcgcacaaccacccgagcgggaacccggagccgagcgccgcagacaaggtgctgaccaagcagctcaaggaggtgctggcgctggtggatgtccgcacgctggatcacatcatcgtggcgggcagcaagaccacttcatttgccgaacacggcctgctctga

SEQ ID NO: 353040 - DNA, 171 bp, Pseudomonas aeruginosa
atgagcccgttctggaacggagtcattaagggttacatgaaaaccatgctggtcgtcacggcccccattgttctggtgcttccattcatctacccattcttcaaatacaagcagcttctgctggtcgccttcgatgtatggaaagacctatgggaagaagcaagcgaataa

SEQ ID NO: 353041 - DNA, 486 bp, Pseudomonas aeruginosa
atggagcaagcaatgaacaggcgggaggtgacattcctctccgccgtggatgccagcaaggtcgagataccgagcaacgtgatcagcatcggcagcaagggcgattggtatgcctttgcctgcgatcacaaacgcgttctccggctggagtttgatgacgtcgacgggtacttgggaagcgatagctttcgggtattcagccacattgacgccaagcagatccacgacttcgtgaacgagtgcggcgatgagccgatcatcgtccactgccaagcaggcatgagccgatccgccgcagtcgctaagttcctggccgacaagcgcggctacaccctgaacctgtcgaagccttgcctaggcactacgcaattctacaaccgccatgtctacggaacgttgaatctcaacgatgccgaaagcatgagcgcctattacgccgagatggagttggccgaccggctgcgtggccacccaaaggagtcctga

SEQ ID NO: 353042 - DNA, 627 bp, Pseudomonas aeruginosa
atgctccagcagactgatacctggtgggccagccgactagggcgagctactgccagcagagtaaaggacataatggcaaaggggcgcaacggcgccccttctgctgtccggaccaactacatgatgcaactgctgtgcgagcgcctgacaggcacgcgagaggaaggctacacgaacgcggccatgcagcgggggaacgaccttgagcctatagcacgcgctgcctacgagatgtacgaggactgcgaggtgctggaggtaggcctaatcctgcatcccagcatagacggattcggcgcaagtcccgacggggtaatcatgctggaaggcaggcgacgcggactggaaatcaaatgcccgaacacggcacagcacatcgccgtgatccagtcaggcaagcacgacacccagtacgagtggcagatgctagcccaaatggcctgcgctgatctggagtcggtagatttcgtgtccttcgacgaccgtctgcctgatgaattgcagtacgtgtgcttccgctaccaccgcgacgaggaacgcattcgcgagatggagtccgaggttaaagcgttcctggaagagttggccgaactggaagccgacatgcgcgggaggatggcagcatga

SEQ ID NO: 353043 - DNA, 921 bp, Pseudomonas aeruginosa
atgagcaatcttgctgtcatcgagcaggatgtctacggggctcgaagctcctttgcgtccgtgctgaccgactcggcgctcaacttcgagcgtgaagccgagttcgctatccagactttccagaacaacgattacgcagcgaagatcgccgccaacaaccggcagtcggtcgtgaacgcagtgaccaatatcgcggccatcggcatcagcctgaaccccgcgaagcgtcaggcgtaccttgtgccgcgcgatggacgcatctgcctggacatcagctacatgggtctgatggacctagccatggcgactgggtcgatcctgtgggctcaggcagaactggtctacgcgcacgactccttcgccctgaacggtttcgacaagccccctacccactcctacaacccattcgccaaagagcgcggggatatcgtcggggtgtacgtggtggtgaagacggcagacggcgactacctgaccacctgcatgagccgtgatgacattgacgggatcatgaaccgttcacagtcggtgaagtccgggaagtcttctccctggaagaccgactacggcgagatggcgaagaagacggtagtgaagcgtgcctacaagtactggccgaagactgaccgcctggacaaagccatccatcacctgaataccgattcaggcgaagggctggcaagccttgcggccaacgcacaaggcggcgaactcgccgagaagtggatagcccaggtggtgaacgccgaatcgctagatgcgctgcaaagcgtgtggctcgccggaaaggcagagatgcagtcagcccgcgacgtgcagtcgttcgccaaattcaaagaggccgtgaagcagcgccaaagcgcgcttgccgtgcagcctgaaccgattgaagcggaggtggaacatgctccagcagactga

SEQ ID NO: 353044 - DNA, 210 bp, Pseudomonas aeruginosa
atgagtgagtggataaaggtcgaagaccgcatgccagcaccaaacaaaacggtgattgcttatcgcaaaggaaagaaaagttcgaatggcccattcttcgcagtcgcgaagaatcgtgagcatcatccatggcagtacctcgacggctcaacctgctacatgaacatcacccactggatgcccctacccgcaccaccgcaagacgcctga

SEQ ID NO: 353045 - DNA, 489 bp, Pseudomonas aeruginosa
atgaccaccattcaagattcgattcaccagaatgatcttcccgaaatcggccagcccctggctgatggaactttctttgcccgtcattggctcaatggcaaggaatacgcctacgtcgatctcggcaaaagcgccgagttcactggagaatggggcgagtatggccaggacgtggacggcaccgtcagctatcgagacggagcttcgaacacggtcgccatggctgaagctggaagcccgattgccaagcaagctatggagataggagaaggcgtattcattccctctgttctagaactggctctcctgttctccgccaagcaagcaggcgagctgtctggtttcgcagatcgttggtattggtcgagttcgcagtactccgcctacgacgccttctacacgtacttcagcgacggccacacgcacagctacggcaagggcgacgccttccgtgtccgccccgtccgcaagattctcatccttcagtaa

SEQ ID NO: 353046 - DNA, 219 bp, Pseudomonas aeruginosa
atgaagcatccgaaggtatgccgcgagtgcggcggaaaatcactcacatggatgaccaacaacgtgacgtattccggcggccagaacgggcgcctgaagaccagtgaggtgacttgcctgttcgtgctgggctgcgacgagtgttccgccaccgtgtgcgtagtcccagcagacaagatcgccgaggcgatgaatcaaccaaccgaggaaaggacatga

SEQ ID NO: 353047 - DNA, 357 bp, Pseudomonas aeruginosa
atgaacttctatcggcatcacatcagtgattttgatggtcagcggaggattagtcgtatgccgatggtttatgtgctcatgacttccaagtttgagtacatcaaggttggcaagaccaattctcctaagcagcgattcatcaatatccaatctggctgcccgttcgagctggccctctggatgtcaatccggacgccattggcccatgaggttgaaaaagcgattcatcgaaagcttgaacattgtcgtattcgcggcgaatggttcacgccaagcagccatgatctcgacgatctgagcgacttctttcgcctcaccaatgccaacgtgaaggagatcgccagtgcactactttaa

SEQ ID NO: 353048 - DNA, 270 bp, Pseudomonas aeruginosa
atgagcaagttcaaggcgggcgacctcgctctttcgctatccggtcccttcatgggccaggcagttgagttaatccgattcgttaaccctggcgatatcgtcacatcgattgatggccagcgctcatacgtgttctgtccatccgaaggcattggtggctggcacgttgctgcgggcaaccaatcatcagttgagtatgaaaagcacctcatgcccctccgcggcgacttccatcccgagcagcagaaggcgaaggaggtggaggcatga

SEQ ID NO: 353049 - DNA, 1545 bp, Pseudomonas aeruginosa
atgagccagaagacccaacccgacagcatgcccgacgccgaggtggtcgaccttccagagatcagcgtggagcactccaccgagtttctgacccgttccgcaccgtgcgccggcgtatcccgaccactgcccgccgcctggctaggccagcgcggcatctaccgctccagactcgaagccgtctgcaacggcgagcagttggtggacccgctgacgctgggggagttgatccagcgcgcctggccttccccttcgacggaactcgccgagcgcggcacgcagcaccgtttcagcaccaccgaacagacctgccggcacgacttctatggcgtctggtggaacgatagcggcgtgacaaagaccggccgggagtgccggcactgcgggttcttcgtggcggacatgaccgaggcggcggccgagcaggcagaggcggagcggccggaggtagtggcctatgccgatccggtagcgttcgccacgttcaaggagcgcggccatgaaggcggggttgcaggacgggaatggatgtgggcggagccgggtgccgcccttgttgcgatgagccgaactgatgagtgcgagcgcatcgtcggggcgctacgggcggagaacgcgaagctgagcgaagccctggaccgctggccgctcatccgcgacagtctgaagctgagactctccgacgccctggccagggtcgcggagctggagaggcaggagccggtagctctcgccaatcggggccttcatgccttctgggtgaagtggacggaggccgccgccgggctctacggcccaggcatcaagctatacgccgcccctgtagcccaggctcagcaactcaacgacctggacaaacagtgtcgcgatgacgtggcacgtgcgcttggtttgcgcccgaatcaggagcgcggcttcgcctggtcctacctgttggcgtcgatcaagtcatgcgtgaaggcctccggggatagcgcccaggctcagcacagcgcgggctatgccgaagctcgccagtgcgtgaactgccggcacatcggtatcaacgacgccgccgactacgccgcttgccacgattgtcgatggactggaccggaacccgatgaggacaagtgcccaggttgcgcgggcgagaactgcatggcggcagcttgcccagagtgtgggggccgttacgagctggtcgctgaggcgaaaatctccaccccagccgcccaggctgggcagatgccgcaggcatggctcgacgtgcaggcagagcgccgccgccagatcaccgccgagggatggacgccggagcacgacgacgagcacagccacggccagattgcccgcgccgccgcctgctacgccctggccggctccagcgctccgaacgacgaaaccgcagccctgctggtgtcgctggcgtggccctgggatgaacagtggtggaagccgagcaccgcgcgacgcgacctgatcaaggccggtgcactgatcctggccgagatcgagcgcctggaccgaacagcggcgacccagggagggccgcgcgatgcgtag

SEQ ID NO: 353050 - DNA, 366 bp, Pseudomonas aeruginosa
atgaccaccaacataatcgacttggacgaagaacggttacggcaagcaagggatatcctcgccaagctccagttctccgatgacatccctctgcaattcatggctgaccactgcgagccagcaagagctttgcttggctggagcgtggaggccttggccttcaggtctggcgtatcccccaaagcgatagccgcaatggaagcaggcaagcgcaagctccgccgggtcacgatgcaagcgctggcgtttaccttcgagaaggaaatgcttattttcctgccaggtcaccccccgatgatcggcagcaactgtagcggcgctacgccagatccacgagaaagggccgactatcacttgctggagtga

SEQ ID NO: 353051 - DNA, 756 bp, Pseudomonas aeruginosa
atggccaatgcctggacggaactggcggctcagggcgaatccaccacagcgtcatccaaatggctgctcgaacatctcctggaacaggagcatgccgaccgggctgtgcgctcagtaagccaccagatgcacatggccaagctccccatgcaccgtgacctggcgggcttcgatttcagcgtctccagtgccgacgctcgcctgatcaaggagctgtccagcttggcgtttacggagaccgcgcagaacgtggtgttcatcggtggcccggggacggggaaaacgcacctggcgacggccctggccgtgtccggcatcacgcagcacaacaagcgggtgcgcttctactccacggtcgacctggtcaacctgctggagcgcgaaaaacacgagggcaagacgggacggatcacccgggggctgctgcgagcggatctggtgatcctcaatgagctggagtatttgcccttcagccaaagcggtggcgcgctgctgtttcacctgctctccaagctgtacgagcacaccagcgtgatcatcaccaccaacctcagcttcgcggaatggtcgagtgtgtttggcgacgccaagatgaccaccgcgctgctggatcgactgacgcaccactgtcatatcgtcgaaaccggcaacgagtcctaccgcctgcaaaacagcagtctggcggcacagaccaagatccaggcccgggagcgcaagcggcagcatggggaagaaacggaggacgacccgttctga

SEQ ID NO: 353052 - DNA, 363 bp, Pseudomonas aeruginosa
atggagcaactactgcccgctggcgtcatcgatttcgcgaaccccaccattgcggaggctcgtcgagagatcagcgatcccgcgctggtggacacgccttacagcagcagcagctggagacatttcacctcggacgatcaaaaagccgcggccggattctgggaagcacctgcccaccttcaccgctgtgaattcgcctacgcggaactctgccatctgctgaaaggggacgttcgactcacggacagtaatggcgtcgcaaaaacttttgggccaggggattcgttcctggtgcagaaagggttcaagggtgtttgggaaaatctcagcgatgtgcggaaggtttacttcattctcgcatga

SEQ ID NO: 353053 - DNA, 1446 bp, Pseudomonas aeruginosa
atggatacctacaccctgaaaaacgcacagcggttctatatcaatggcgaatggatcgaaccgcagagcaaggcaacgcttgacgtcatcaaccccgccaccgagcaatccatcggcctggtagcgatgggggcgggtgccgacgtcgagcgggcagtcgcggccgccaaggcagcctttccaattttttcgcgtaccagcaaggaagagcgactaacgctgctgcaacgggtgctcgagtcctaccagacgcggttggtggctgtcgccgaggccctgacgctggaaatgggagcaccggccaagttcgcgctggagtggcaagcaggcataggcactgcgcacatcaagcagatgatccgctcgctggagcaattcgagttcaccgcgcaacgcgggacgacacgagtcgtgaaggaacctgtcggggtggtcgcgcttatcacaccgtggaactggccgatcaaccagatcgcctgcaaggttctacctgctctggccgtgggctgcactatggtactcaagccgagcgagctcgccccgttcaatgcggtgctcttcaccgaggcgctgcacgaggcaggagtccctcctggagtcttcaacctggtgcaaggcgatggcccgtccgttgggcagccgctggcgagccatcctgatgtggacatggtgtcgttcaccggctcgacccgtgccggcgtgatggttgcgaagaccgccgcggacaccgtaaagcgtgtccaccaggagctaggcggcaagtcagcgaacatcctgctgcccgactgcgatttacccagagccgtggagctgggcgtgctgggttgcttctctaacgcaggtcaatcctgtaacgcgcctactcgcatgctggtgcctgctgatcggcatgccgaggtcctcgaaatcgcacgacaggtcgccgagcatgtcagcgtcggtgatcctcatgccgcgggcacggatatgggcccggtcatcagcgaggtgcagttcctgaaaatccaggacctgatcgccaccggcatcgccgaaggtgcggaactgatcagcgggggcctgggccgccccgacttggtggagcacggatatttcgtgaggccaaccatcttcggcaatgtccagccgagtatgaccatcgcacgtgaggaagtcttcggaccggtgctggcgatcattccctacgaatccattgagcaggctatcgccattgcaaacgacagcgttttcggcctggcgggatacgtccaagggactaaccaagaactcgcgcgtgaggtagctgggcaactgcgggcgggcacggtctacatcaactatcccgcctgggatcctgctgctccgttcggcggctacaagcagtcgggtaatggtcgcgaatacgccgatttcgcgctacacgacttcgtggagatcaaggggatcgttggctacggcacgccgtaa

SEQ ID NO: 353054 - DNA, 717 bp, Pseudomonas aeruginosa
atggtcgccgacgacctgcggcgctggatcgcccaggaaaacctgcaaccaggcgaccgtctgcccaacgagcgtgccctgcttgaacactacagctgctccaagggcacgattcgtgaagcactcaagtcgctggaagtccagggcctggtgaagatggtcaccggccccaacggcggccctgaggtctgcactgtctcgctggacgtcatcatgcagcagctgcggaccttcctgcactttcagaagttcgacttccagcaggtctacagcctgcgtcagagtctggaggtcatgctggcgaaaagcgtggtgggccgtctcgacgagcagcacctggcgaaactccaggcgaacatcaccgaatacgagctcctgcgcgcccagggcgatcgccagggcgcgcggcgcaccgagctggagttccacgacatcctcaccctggcctgcgataacccgatcctggccttcatctgtcgcttcatcaacggcctactgcgcgacctggtcgagtatcgcagcgaccagtacgacgaccacgaagccttcggcaaccacaacattgacagccaccgtcaacttttggatgcgtaccgcaagggcgatgggaaggccgtcgagaaattgatggaagagcacatgcattgcgctgctcggtttatggcacggctggatgcgcaattcagttctgacctgctgagcggcgcctccaactga

SEQ ID NO: 353055 - DNA, 1488 bp, Pseudomonas aeruginosa
atgcgcattgtgattgctcgtatgaaccacgagaccaacagtttctcgccggttcctactcccctctcggcgttcaatccacgctggggggatgaggccctgattgcaggtatcggatcggctacggccatgggggctttcatcgcattcgccgagcgcgttggcgcttcgatcaggacgccggtcttcgcacatgcaaaccctagcggcccggtcgaactggccgcatgggaacgcatggccgccgccatcgtggacgaggtcgccaagggctgcgaggtcgttctgctagatcttcacggagcgatggtcaccaccgacggtggcgatggcgagggcgcgctactggccagggtcagagcggccgccccgcacgcgaaaatcggcgttgcactggacctgcataccaacctgagccagttgatggtcgacaacgcggatgtgctggtggggttcaagacctacccgcacatcgacatggtcgagaccggggagcatgtggtccgggtgatcgagggtatgctcgaggatggatgcggcacctacaaatcgaaggtacatccgcctttgctggcgcataccctgcaaatgaacaccgaggtgccgggcgcaatgcgtgatgccatagcagctgcgcgggccgctgaagcccagcccggcgttctggcggtgagcgtgttcggcggtttccccctcgcggatatagccgatgccggcatgtcggttctggtcgtcgcccaggagcagcgattggcagatgaaaccgccagaaagatcgcacggcagctctggcaaacccgagaggcattcgtgttccatgaggacgagctgtctgactcgttagctcacgcgcagcagctggccgatagttcgggcaacggcccggtgctcctgctggaccacggcgataactgcatgtccggcggaacctgcgacaccatggatgtgcttgccgcagcgctggatcgggggctgaccgaaatcatcactggccctatctgcgatcccaccgcggttgccgtgatgcacgacgccggcatcggtgcgcaggtggaactgcagctcggtaatcagatgctgcgcccgaacggcacggtgtcgccgattgccgtgaccggcaaggtggttgccgtgagcgatggacagtatgtggtcagcggcccgacctacaccggaatgcgctgctctatggggcgggcggcggtgatcgatctgggtaccgcgcaggtgcttgtcagtgaggagccccacgagccttgggacctcggtgtgttccacagcgtcgaactcgatccgacccgctgccgttacctcatcctcaagtcacgcatgtactatcgtccggtgttccagccaatatcccgagccacggtgcattgcgccagtcctggcgttaccagctcggattacaccctgttcccctaccgacacgttccgcgaccggtgtttccgatcgaacccggcactcgttgggatgccgacgcctga

SEQ ID NO: 353056 - DNA, 1047 bp, Pseudomonas aeruginosa
atgaccttcaccttcaaacgcatcgcgctttccagcttgctgatctcctcgtccatcatgtcgactttggccaacgccgaatcggtcacggtcatttccttcggcggcgctattcagaaagcacagaagattgcctactacggtcccttcgagaaaagcgccgggacccgtgtaatcgccggggaatacaacggcgacctggccaagatcaaaaccatggtggacacccaacatgccacctgggatgtcgtcgagatggatggaaactcccttgcgcgcgcctgcgacgaggggctgatcacccagctggactggtcaaagattccatccaaggcagacctgatgcccgaagccgtcagcgattgtggcgtcggtaccctggcctggtccgccggcattgcctacaacgcggacaagctgaatggggcaccggccacctgggcggatttctgggacgtgaagaaattcccgggcaagcgcgggctgcgcaagagcgcggtgcacaccctagagttcgcgctgctcgcggacggggtgccgaaggacgaggtttacgaagtactcagcacgccccaaggcgtcgaccgggccttcgccaagcttgaccagatcaagcccaacatccagtggtgggagtccggcgcccagccccaacaatggctggcggcaggcgacgtggtcatgaccagcgcctataacggccggatcaaggacgcccagcaggaaggcacgaacctgaagttcgtctggaaccagagcctgttcgatcttgaccattgggcagtggtccacggcgcgaaaaatctcgaccaggcctacgcgttcatcgagttcgccagcaacacggagaaccagcgggtcttcgcccgcaccatcgcctacggaccgacgaacgtgaacgccgtgaagggcctctccgccgcagagttgcacgacctgccgaccgcgccggcgaacctcgatgccgcgctggctaccgacaacgtcttctggctggaccatgccgaggacctagaagtgcgcttcaccgcctgggcgtcgcgttga

SEQ ID NO: 353057 - DNA, 1341 bp, Pseudomonas aeruginosa
atgtacgatccgctgcaatcgcttcaccccggtcatggagcgccacacgcgccctcctattgggtggccagcgctggcaaccccacgccggacgacggccccctgaaagggacagccgaggaagacgtagccatcatcggctcggggtataccggtctgtgcgcggcgtactttctcgcccatcagcatgggatcaaggcgatcgtgctggaggccaatcaagttgcctggggctgcagcagtcgcaacggtgggttcgcacgggtatcgggcgggcacttgtggccttccgagttgatctcccactacggcctggatgtcgcgcgtcgctatttcgacgacacccgcgaagccctggcccagctccgcaggctaatcaccgagggctcgatcgactgcgatccgcaactcgatggtgtaatcaagctcgctcaccaccccagtcgactggcggggttggaaagcgaagcgaatctgttcaaccgccacttcaatttcccagtagagattctttccgccaaggagctgcacgattatcaccgcggcggcgaagtccacggaggcatccggcttccggagggattcggtcttcacccgatgaagctcgcgatggggctgctgcgcatggcgcgcaacgctggagccagagtgcattcgtcctcgccggtgatctcgctggaacgtaaagcagggcactacctgcttgaaacgcccgagggcgccatgcgggcacgcaaggtcatcatcgccaccaacggctataccgcccccgggctccacccgttcctgcgcggacgctacatgccggtccactcaaggatcctggttacacgcccgctcaccgagcacgagatcgggctgaccttgcccagtatggacagcatgatcgacacgaggaatctgctgtattactaccgccgtcttcccgacaacagactgctgttcggcggccctggcgccgtatccggcaacgatgccgaacatccccgccatcgcgacgcactgctggaaggcctcacccgcaaattccccgaactggccggtatcgccgtcgaatacgactggggtggctgggtgtgcatgagccaagacggggttccgcacatccatgaactggagcaaagtccaggcgtctttgcagctctgggttactcgggaagcggaatctcctacgccaccctggcgggcaggcgcttagcggcgatggccgtaggcactccggagacgcctcccacccaggtcacatcaagccctttgccgcgcttcccgttcgctcgcttcctgcggcttggccagtacttcgcctaccacctctaccgctatcaggatcggcgaccctga

SEQ ID NO: 353058 - DNA, 336 bp, Pseudomonas aeruginosa
atgtccttccaacaacagttgctggatctgggcgagctgttcaacttctctgacttgagcacctttacccagaacatcccgatcgaatgggtggcgttcgcgctggatctttccacccaagcaaccattcgtcgtcgccggctaccgaccgatccggtgctctggctggtactgggcatggccttgttccgcgatgaaccggtccatgaggtagccagacggctgaacatctgtgcgaaggggctggcctctcacgatcttttggccaggagtggcatcagcgaagcccgcaagcggctgggtgccgagccagccgggcgatcagtgggggagtga

SEQ ID NO: 353059 - DNA, 309 bp, Pseudomonas aeruginosa
atgaacctgtcgacgctgctcagcagtctgtgctcccgggtcccgggcgaagacctgaccgataaacagattctctccatcaagtcggatctggggtcggctcggaatgctgctcagaacatggcgcttggtgtcgccgcagtcgggaatctgctggcgaacgttggcgctgaaggcgaagtaggccaggaaacctcagagcgtctcggctggtttctggaggagatcgtgggggccatcttcatgttggtggagctcgagcaggtctgcacggatcgcatcaaccggcagaaggaggctcagcaatga

SEQ ID NO: 353060 - DNA, 1419 bp, Pseudomonas aeruginosa
atggtgctgactgtcatctcgcgtacggtgcgcgaggtgagcgaggaagaccagacgttcatgtccgctgttgttgatcttggcgcaattgctgtcgagcgggcacatcgtcgtcgtgcgcagatgatggcgaacgaggagctccagcggatacttggttcgcagcgttccttgcttcgcgatgtactcgcaggcgaatcactagaggccttaacctcgtcgcttggtgaactactaaacggcccagttctagtagccgatttctcggctagccatttgcttggttctggttctccggcgtctgcaatttacgatgacgtcaaatggcaacgttggctttccggcagtggtgggcgtgagctggtgactttcgtgcgggatgcgatacagctgcatcaaaaaacagcggtcatgctgcccatcgggcctgatactaaagtggctgcaacgattgaaccgcttacggtcgatgaggagttggttggggccttgctgacttttggcgaagatcaaccatcaactctgcagaagcttctgctggagaatgcgtgtttcgctcttagcgtgcagctcatgcggagcgtggtccgttaccgcttcgagacacgcacattgaccgagttgtttttcgagattgtggagcgccgctttcgtgatgaggaggatgtgctcagtcgagcgcgtcgcttagggttgtcgatatctgcacccctacggatgatcgtggtggatttttcaggccatgttggccaaagcagtaatttagcccttgaatcccatagagcggtcacccagcttgccaggcagcagagtgtctcgatgcacgtagtcacggtaggtagtggttttgtttgcctagtgcctcatgaacacgaacaagaggttgtcgcagaagctcggctagcacggcgcatttcggatgcattaggacgcttgcttggccatgagcctattgttgtgctcggtgaagtcttcgagggaatagaaccattggctagggagtgggagcgatgctggcggatgatccgcgtcgcgcgcaattttgggcgaagtggcgttctggaaatgcctgaccttggtcccttgcctgtcctaatcggtgctgcggactctgcggatgtgcgtagtttcgtcaccggaacaattggcaagttggtcgaatatgatcagcgcaacgcctctccctatctggagacgcttgcggcctacctgcgttcaggctgccgcagtcaacattgtgccgatgccatgggtttgcatgtcacgacgctgcgctatcggctgtcacgtatccaggaactgtttggcattgaggtggagttacccgagcgtcgcttcgccctcgagctggctattcaccttcatcagctgaccggaaaccccgtgaatcctgatgcatcctccaaaaagagaccttaa

SEQ ID NO: 353061 - DNA, 156 bp, Pseudomonas aeruginosa
atgcatggctactggcagcccttaagggctgcattcgatagctgccgcggcaacctctgcttggctctgctgcgggtgaagcggcagagtcattggctgggctgcatgctttccttgcttcacgggaagacttgctccgaagcggagaatatttaa

SEQ ID NO: 353062 - DNA, 981 bp, Pseudomonas aeruginosa
atgcaaattgacgtcgaggacgacctgaaggccattgacccaatggctttgcgtcgggcatttggcaccttcgttacgggggtgacagtagtcacaacaaacgacgagcaggggcgtccgagggggatgaccgctaactccttcacgtcggtttcgcttgatcctgccttgctgctggtgtgtatcggcaaaggcgcatctagctaccccgtctttcaggaaacctcaaactttgccgtcaatctgctgcacgacgggcaaactgatatctccaatctgtttgcttccaaggcgatcgataagttcgggtcggtagggtacgacgcggtgcacactggagcaccggtgctcactgactgcctaacctggttcgactgcaaggttcataactgtatcgatgctggcgatcacatcattctgatcggacgcattcttgcattcggtacgagcccggtagcgcctctgggtttttgtcgcgggagatacgcccaggtcaaggatccgctaccgccaggttggctgtccgcgaacgacatgattgtgggctatctcatcgaagcagagggaagcgtcctgctggcacaggacggtaagggcggttgggtactgccgagtgcttcgcgtcgtctgagggaggatcgactcccgcttgctggcggcaatgaactcgcactcgtaccgcacgataccttcctgtattccgttttcgatatcgccgacaacgatccgggctacctgatctatcgagccaaacttgggcaagcactctcggtgtgcgcactacctgaacagttccgcttcttcccgctcgatcaacttccctatggcgacatcgcatcccgcgaggttcgcgcaatgctgcggcgttatgcccatgaaaccgaaaggggaagttttggaatttacatggattctcaagatggcgggcgtgtcgcgatggtgggtgatgcgcagtcgtgggatcaggcaagtaaggtttga

SEQ ID NO: 353063 - DNA, 1512 bp, Pseudomonas aeruginosa
  misc_feature (1132)..(1132): n is a, c, g, or t
atgaaaacaactatagaaaatctgcagggctcccggcagaagctgttcatcgacgggaaatttacggattcgcacagcggcgagttcgtaccgagttacgatcctacaactggtgaaccgtggtacgaattctctcaagctgacgccgtggatgttgacgaggctgtgcattctgcacaaaacgcgctcaagaatccggcgtggcgtcgaatgacgcaaactgagcgaggaaaacttgttcgccgactcggcgacctagtggcagcccatgcggatgagctcgcgcagatcgagtgtcgagacaacggcaagctgcttaaagaaatggtcgcgcaaatgcgcggacttccggactcattttattacttcgccggcatggcagacaaactccagggcgacacaataccggtcaacaaactcgattcgctaaatttcaacgtccgcgagcccatcggcgttgtcggcatgattaccccatggaactccccgctgatgctgctcacgggaaccctggctccgtgccttgcaattggcaatacggtcgtaatcaaaccgtcagagcacaccagtgcctctacgctcgcactggccgagctagccatcgaggccggaattccgcctggcgtgatcaacgtggtaactggcgatggcccgaccactggcgaagcgctgagccgtcatcccggggtagcgaagcttgtttttaccggcagcacggtaactggacgcaagatcgccactaatgccgcccagaacttggtgtcctgccagatggagctcggcggtaagtctcctcacgtagtgtttggcgacgttgatattgaccatgccgtgaacggcgtcgtagccggtgtgttcgccgccgccggtcaaacgtgcgtagccggttctcgctgcttcgtcgaagcgtcggtgtatgagcagtttgtggaagcactggtcgagcgcactagccggatcaaagtcgggcacccgactctagaagataccgacatcggcccactcgcattggctgcgcaattggacaaggttggctactacgtgaattccgctgtccaggagggggctaaagtcgccatcggtggcaagcgcccggagcgcaatgagcttagtggtggctggtactacgagncgacggtcataacccacgcccgaaacgacatgcgcttcatgcaagacgaaatctttggccccgtggttggtgtaattccgtttgaaaccgaggaggagctgatcgagttggctaatgcgactgattacggcctggcagctggaatttggaccaaggatatcagtcgcgcaatgcgatttgcgcgtgaggtcgacgccggcaccgtatggatcaacacatatcgttccacagcgtacatgtccccaaatggtggggtgaaacatagtggttacggcactcgcggcggtttcgaagtaatgcgggaattctcacggttgaaaaacgtgctcatcgactactccggtgcgatgcaggatcccttcgttattcgtctgcgctaa

SEQ ID NO: 353064 - DNA, 1068 bp, Pseudomonas aeruginosa
atgaagttcgcagtttcgatctatatggaacgattttcgccgcaagacctgatgagcgataaggttaagaactttctaaaattggctcgcatcgctgacgagggtggtttcgaaactctctggaccgccgagcaccatactctcgagtgctgtgtttcgcctaaccccttcatgacccttacctggcttgctcagcatacagagaacattcgcctgggaaccggaacgctagtggctccgtattggtcgccacttcgcctggccggtgaagcagccatgtgcgatcacctgaccggtggccgactggagttcggtattgctcgtggcgcctaccaatacgagttcgatcgcatggctggcggcatcccccagcaagagggtgtggcctacatgaaggagctggttcccgcggtgaaaaaactgtgggaaggggactacgctcacgacgggcattattggaagtttcctgtcgctacatccgtacccaaacccctgcagcagcctcatccacccatctgggttgctactcgcgatcccggcagcttcgattgggccgtgagcataggggcaaacatcctctccactccgctgtccgcgcctgcgtccgaagttgcggtgctgggtgagaaattccgcaaggcggtagcagaccaccccgaagtcccccgtcctcgcttcatgatgcagcgccgtacctgcgtctacgaccgtgaacaagactgggaggtggcggttcggcacagcatcgattacggacgcgcgttcgagaatctcatgcagaacgtcgggacggtgacgaatggtttcccggaagcggtgccctatgaaaaagtggctaaccgggatagctacaacccggccgcgattcgcgaaaacctcatgttcgggactccggacgaggtgatccgcaagctggagatttacgaggcccagggtgtggatcagttctgcctcgggcttgcgttcaacctgccgtttgaactgcaggagaagaccctccggctgttcattgacgaggtcatgccgcatttcgccgatcgcgcacgcaaagcgcgccacgtcggctga

SEQ ID NO: 353065 - DNA, 840 bp, Pseudomonas aeruginosa
atgctgactccagccaattctgtgctctcaacctggacgcagggcacattgatcgtaggaggcgtcgagctcaattatcggttgcagggacaaggtccacgtccgcttatttgtattcacggtgtgggttcctatctggaggcttgggacaacgtcgcaagccgcctgagcgatgacttccgtatcttgagctttgacctccgcggacatggacgctcgtcgcgggtacgcggtcgatatgagattgacgactttgtcggggatacgctcgccctggcagagcacgtgggattcgaaacgttcaacctcgctgggttctcactgggcggtttaatcgcacagcgtttggtgctttcgcatccgcaccgcctgcagcgcctagcgctgctcgccaccgtatccggccgtactcgcgaagagcgtgcccgtgtgatgcaacgtttggcggctctgcagagtggcgatcgcggatcgcattatgatgcttctgtatcgcgttggctgtccgaggctttccaggccaaaaaccctgagttaattgcctatctgcggcaacgcaatgccgagaatgatccggattgctacgccgctgcgtatcgagtgctggcggaaaccgactacggcggttttattgatcagatcaaggttccgacactgatcgccactggtgaggaggactccggatcaaatccgcgcatggcgcgcttcatgcacgaatgcattacagactcgaaactggaagttctccctggccttaggcactcaatattgcttgaggccccggatctggtcgccaacttaatgcgtagtttcttcactgaagataagttggagaaataa

SEQ ID NO: 353066 - DNA, 1185 bp, Pseudomonas aeruginosa
atgactgatcgcttggtagtcgaaaatctctataaaattttcagtgacaagccggggcccgcgctggagttgcttcgtcatggaaagggcagggccgaagtgtttgaagagctcagccaagttgttggcctggacaatgtgtcgctcaaagttccttccggcgccatttacatgatcatggggctttcggggtcagggaagtcgactcttgcccgttgtatcaaccgcctaaatgaaccaagcgcagggaaaatcctgcttgatggagaggatatctgcgcacttggtgaggcggctttacgcgaagttagaagaaatagaatctcgatggtttttcagcactttggcctgctccccaatcggcgtgtgatcgagaacgttgagtttggattgaagatgcgaggcatgccggccgcgcaacgtcgccagcgtgctgaagaggttctcagtgtagtaggcctgtctaagtggtcgtatcacatgccgcatgagctcagtggcggcatgcgacagcgtgtggggcttgcgcgagcgttagcgaccgatgccgatgtcctgattatggatgaggcattcagcgcgctggatccgctgatccgaaccgaaatgcaggacgaactccttcgcctccaacgcacactccagaagacgattctcttcatcacgcatgattttcaagaggcgctgaaactcggtacgcgcatcgcgatcatgtctgaggggcaggttgtccgtgagggtaccccgcaatccattgtgctcgacccaagaagcgactacgtagccgggttcacgcgagaggttgaccgcgctcgactgttcgatgcgggctctgtgatgaccgttctttcgcctgtctggcaaggggccggtcagaccctgatgggggtcggtctaggtggggaagatcctggcttcctgctcgatggggaacaacgggtcctaggcaccctaactggtcaagaggttgcgatgacctgtagtggtcagggaatacctgttccaaacaagcaattcgcttgtgtcccgacaacgacgcgcctcgtagatgttgccctccaatgcatccacggtaaccccatcggggttaccgatgacaacggcagactcgttgggttcttggacgcggggcatatcctcgcacgaatcggcgctggtagtggcgcagaggtacatcatgcttaa

SEQ ID NO: 353067 - DNA, 936 bp, Pseudomonas aeruginosa
atgcttaatgccgaccaactcgcagtacttccggtagctcagtggattcaaggcggtgttgaatggattgcgcagaactttcgtccattgttttcaacgattaagtggccagttgagcagctgctgaatttcattgatggagtgttccacgctacgccatttccagtcatggtggttatgacgttcttgttcttctggcgcttggccagtttgcgcgtcgcgcttttcagtttcgttgtctatctctcgatcgcaatgctgggtgtgtggtcggaagcaatgacgacgctatcactgatcacgacagccatcctgttctgcgcggtcattggtattccgattggcatctggtgtgcgcaaagtcagcgtgcatggatggtagttaggccgttgttggacatcatgcagacgacgccgaccttcgtatatctggttccagttgtcatgctgttcggtgtcggtaatgtgcctggtgaagtggcagtggtcacagctgcgatgccgcctcttatccgtttcactcaactcggtatttccatggttgagccagaaattgtcgaagcaggccagtcgttcggcgcgaacaagtggcagcttctttgggaagtacaacttccgctcgcgatgccgacaatcctcggaggtcttaaccaaactgtgctgacagcgatggtgatgtcggttgtgatttcaatgatcggtgcagaaggcctggggctgctggtacttcagggtattggacggttggacgttggtggcgcagcgattggtggtattgcaattgtgttgctagcaatgatgcttgatcggttttcccaggagctgggaaaaacacgccctaaaaaacatatgactttctgcgcagtgcttaaacgttgttttcgcggagagagcgtgatttcgcaaacgtctggagagaaactgaaacagctatag

SEQ ID NO: 353068 - DNA, 1023 bp, Pseudomonas aeruginosa
atgaaagtgttctcaaagattgtaattttaggtgcggcggtattttcgatagcaggcgcggtgcacgcgcaggcgcttccgggcgatggaaaaacgattcgctatgcgcaagatagtagtctgggcgggaattacgtagttgcgcaaattgtttccgatgcttttaaggcgcttgggtaccaagttaggcttacgacattggataatactcttttcttcccggccgtggcccaaggggacatggatatctccaccgatatcaccctcccgcagcgtgagcctggatttaaagccgtcgctcaacaggccgagttggtcggcgatggcatgattgtcggtggaggaatcaacggttacctcatcgataagaagactgcacttgctcacaacatcactagcttggagcaaatgagtgatccaaagatcgccggtatttttggacaaaatggcaaggccgatctgaccagttgtgacccatcgtggagttgcagtacggttatagattatcagatggataaattcggcctgaaacaaaacgtcaagcaggtgcgcggcaaatatgaagcactgatggcggatgttgttgggaaggttagaagtggaaaaccagcatttttctatgcctggagtccatcttggatgaccaactccttggtaccgggtgttgacgtcgtatggctgccaacgccaaaggatgctctcccgccaaatattccgaatcagggctctgcgttggttaacgacgttcagggttgcgcaggtggagcgaatccttgccgcatggcgatggcgtcctggaactatcgcaccgtagtgaataaggagttcctggcctctaacccagcagtcaaagcactgattcagcaggtcaattttcccacaaatacctggtcgcactgggaaagtaccattagcaaagacggtggctctgctgaggtgattagaaagctttcagatgagtggatcgctagcaacaagtcccagttcgatcaatgggtagatgtggcgaagaaggccaattga

SEQ ID NO: 353069 - DNA, 1005 bp, Pseudomonas aeruginosa
atggaataccgttacctaggccgaagtgccttaaaagtatccccgctatgccttggtactatgatgttcggtggtgtgactgacgagctgacctcccagcgcatcatcgacaaggcatatgatcagggggttaatttcattgacaccgccgatgtttacaccggcgggcgctcggaagagatcgttggccggtccatcgctgcgcatcgcgacaactgggtgcttgctaccaagttcggttccccttcttccgtggggcccaacgctcaggggcagtcgcgcaaatggatctatcaggccgttgaagccagtctgaaacgactgggcaccgactatatcgacatcctctattttcaccgagcagtacccggcgtgaccctggaagagggcgttcgggctgtcggcgacctcattcgtcagggcaaggtccgttacttcgctgtctctaacttccgcggctggtacatcgccgaggtggcgcgtttggcggatcagataggtattgaccgccccgtggctagtcagcccttgtataacattgtgaaccgcactgttgaggttgagcagttgcctgcggcgtaccactacggcctcggtgtggtgccttacagcccgttggcacgcggagttctaactggaaagtatgatgctgaattgacgccgcccgcagacagtcgagtcggtcgtggtgataagcgcatccagcagaccgagtggcgattagaatcgcttcacatcgcgcaagctattgcctcgcacgccgcagcgcgcggcacttcttccgttgctttcgccttggcctgggtgcttaacaaccagatggtcagttcaactatcgctggaccgcgcactgagtcgcaatgggacagctatatggacgcgctggaggtgaagatcagcaccgacgacgaaaagctggttgataacttggtgcccccgggccactgttccacgccgggttacacggacccaagttatcccgtcgagggcaggctgccgcgctaa

SEQ ID NO: 353070 - DNA, 474 bp, Pseudomonas aeruginosa
atggctttggatcgcatcgacgtcagcattctcaatgccgtacaacgcaataaccgcatgacttccgacgagctcagcgaactggtggggctttcgcccacggcatgccagcgtcgcctcaaatcattgcgaggcactggggtgatcgagggtgacgtgtcgatcgtgtcgcctaaggcagtggggcggcacgtattcatgttggtgttggtgtcgctggagcgcgagcgcgccgacatcatcgaccgcttcaagagcgcgattcgaagtacgccggaggtgatgaacggcttctatgtcaccggcgacgcagacttcgtcctggtgatcaccgctaagaacatggaggactacgaacaattcacacgccgattcttctacgaaaaccgcgatatcaagagcttcaagactctggtggtaatggaccgggtcaaggctggctttatgattccgatcgagccaatggacagctaa

SEQ ID NO: 353071 - DNA, 1473 bp, Pseudomonas aeruginosa
atgaagaactttgctcaagctgcgctggcaaagctgagccgtcctgatttgctcgaaacgcgtgcctatgtcgatggccagtgggtcgctggcgaaggacgcctaccggtgttcgatccggccaccggcgggacaatcgcccaggtcgcacattgcgatgtgcgctggatcgatgctgccgtggaagctgctacccaggctttccatacctggcgcgaccgcctaccagtcgagcgtggcaccatcctgcgccgctggggagctctgatgcgctcacacagcgaagatctcgcagtgatcatgactgcggagcagggcaaaccgctcaaagaggcacggggcgaaatcgcttatgcggctgctttcctcgactggttcgcagcagagggcgaacgttgctatggggagaccattccgagccatctgagcggcagtcaattagccgtacgccagcagccaatcggtgtgaccgcagccattacaccgtggaacttccctagcgcaatgattacccgtaaggcgggcgcggcgctggcggctggctgcacaatggtggtcaagccagcgccggaaacccctttgtctgcacttgcgctggccaagctggctgaggaagccggtattcccaaaggagtattccaagtggttaccggcgatgcgcccaagctttcggcgcggctgatgcagcgatctgaggtccgcgccttcagctttacgggctcgacagaggtaggccgaattctgcttcggcagtctgcggataccgttaagaaggtgtccctcgaactcggcgggcatgcgcccttcatcgtgttcgaggatgcctcgatcgatgaggcagtggccggctgcatcggtgccaagtttgccacctcggggcaggactgcctggcggccaaccgcatctacgttcaccgctcgctttatgagtccttcgttactgcatttgctaaggctactaccgagctgcaggtcggccacggattagcggaaaacgtcgacatcggtccgatgacacgcgtaacggttgccaacaagtgccgcgatcacatcggcaatgccatttctcttggcgcgcgcgtagtgaccggcggtatggataacgccctaggcaattgcttcgtcaccccgactgtcctggctgacgtgactgaagaaatggacatcgccactgaggaaactttcggtccagtagccgctgtgatgccgttcgataccgaagacgaagttattcgtcgtgcaaacaacacagagttcggcctcgctgcctacgtgtacaccaatgacctgcgtcgtgcttcgcgaatgtctgatcgccttgagtacggaatggtggcgctgaacacccccaaatttaccggcgcgccgattccttttggcggctggaaacaatccggcctcggccgggaaggctccacgcacggtttggcggagtacatggagcttaaatacgtctgcgtcggcggcctttaa

SEQ ID NO: 353072 - DNA, 1392 bp, Pseudomonas aeruginosa
atggataagcaaactcaagatctgatcgcagctcaggaccgcggcgcggtactgcacccttttactcacttgaaggatttcgcgagcggaaagctcggtgatccaaccatcgtggagactggtaaaggcatttgcatcaccgatgcgactggccgtgagtacatcgacggctttgcaggcttgtactgcatgaacgtgggatatggtcgtaccgaagtggcggaagcaatttcccgccaggcccacaagctcgcctactaccactcctatgctgcccacactacggaggagttggctcgcctctccgatcgtctggtgcgcatggcgcccggcaagatgagcaaggtgttttacggcctgtccggttctgacgccaacgaaacccaagcgaagatcgtctggtactacaacaatctgcgcggcttgccaaagaagaagaaaatcatcgctcgtgatcgcggctaccacggttgctccgtagtgtccggctcgatgaccggcatgagcttctatcacgactacatggacctgccggtgtcgggcatcctgcgtacaggtgttccgcactattactggggcgcggagccgggcgagaccgaagagcaattctccgctcgccgcgcccaagaattggaagagctgatcctgcgcgaaggcccggacaccatcggcgccttcatcgccgaacctgtcctgggtaccggcggcattaccccgccgccggctggctactgggctgcgattcagccggtactgaagaagtatgacatcctcctgattgccgacgaagtcatcaccggcttcggccgcaccggcgccatgttcggttgcgagaagtatggcatcgagccggacctgataaccgtcgcaaaagggctgacctcggcttatgctccgctctccgcgtcgatcgttggcgagaaggtgtaccaggtgatggaagagggcgccgatcgcgtgggcgccttctcccatggttacacctactcgggccaccccatcggtgtcgccgcggccaacgcggtcttggacattgtcgaacaggaagacattcccggtcacgtcagccgtgttggtgcgtacttccaaaaatcgatgcaggaaaccttcgccggcctgccgatcgtgggtgaagtccgcggtgtaggcatgatggcggcaatcgagttcgtcgcggatccggcaaccaagaagcgattcgatcctgcactcaagatcggcgcccgtgtctccaaagccgctcgggatcgcagcctcatagctcgagccatgccgcacggcgacatccttggcttcgctccgccgctggttacttccgagaaggaagtcgatcggattgtagatattgcctataaagctgttctcagtgttatggacgaactgaaggcctaa

SEQ ID NO: 353073 - DNA, 267 bp, Pseudomonas aeruginosa
atggcggcccggtgcagcccctacaagcagttgagcaaacgcagtgccctgtacaaggccaagcgcaaaatcgagaagaccaaggcgcaggcacgggccaaggtcgaacacccgtttcgggtgatcaagcgccagcttgggtacgtgaaggtacgcttccaggacctggccaagaaaaccgcgccgatggtcaccttgttcgccctgtcgaatctctggatggtgcctcgacaattgctggctgatgcgggcgaagcaagcctgtaa

SEQ ID NO: 353074 - DNA, 348 bp, Pseudomonas aeruginosa
ttgacactgatcgagccgttctaccccaaggcgggcactggccgtccgccgtatccgcaggacaccacgctgcgcattcacctgccgcgaaactggttcgccctcagcgatccggcgatggaggaagcgctgtacgagatcacctcgttgcgtcagtttgccaagctgttgctgacccacgggagcatcccggacgacacaacgatcatgaatttccgccacctgctggagcagcacggattggcggcgggcattctggcagtaatcaatgaccgcctgggtgagcgcgggctgttgctgagccagagcaccactgtcgatgcccccatcatccttgcgccgagctag

SEQ ID NO: 353075 - DNA, 756 bp, Pseudomonas aeruginosa
atgcaaaaatgcttgctgctagccctagctgcccccctgctgctggtcgccggaatcgcccgcgccggggttgatgaaaactacagtgtggtcctgctgacggagaactacccgccctacaacatggcgatcaacgggaagaatttcgcccaggaagacaacatcgatggcatcgccgtcgacatcgtccgcgagatgttcaagcgcgccggggtcaagtacagcctgactctgcgcttcccctgggaccgcatctacaagctggcgctggagaagccggactacggtgtcttcgtcaccgcgcggctgcccgagcgcgagcagtccttcaagtgggtcggccctattggtgtggatgactgggtgatgctggcccgcgctgacagctcaattgccctctcaaacctagacgaggcgcgcaaatacaaggtgggagcctacaagggcgacgccaccgccgagtacctagtacaacagaagctggagccgatcaccgccctgcgcgaccaggaaaatgcccgaaagctggagaagggccagatcgacctctgggccactggcgacccggccggccgctacctggccaagcaggaaggcgtagagggcctgaagactgtactgcgcttcaatcagtcagagctttacttggcgttgaaccgcgacgtgccggatgagatcgtgcagaaactgcagggcgctttggaccagatgcgcgcggaaggctacgtcgacgagatcctcaacagctatctctaa

SEQ ID NO: 353076 - DNA, 243 bp, Pseudomonas aeruginosa
atgaaagctcaggttaatcggctaatgcagagcaaaggagctagccgcgaaccagaaaacgtcattgttacgccaggctcactgcaagcgttcgaccttctcatgcgcgtgctcgttagcgctggcaatcgcgtgctcattgaacaaaccatctacacgaccaacatccaagtcctaagtgcctatcaagcgcgaatgacgcccgtaacgcccagcctgtttcctttccactgtgcaaggtag

SEQ ID NO: 353077 - DNA, 465 bp, Pseudomonas aeruginosa
ttgcaacttgtgacaaccattcgacgggcgactgtggcggacgtcgacgccatcaccgcgctggtcagcgaagcctacacgccttacattgccaggatcggcaagaagccagctccgatgcttgatgactatcggcaagtcatcgccgacgcggatgtctacgtcgtcctgcacgactcggtattggtcggggtagtggtgatgtgcaaggaagacaatgagatgctgctggtcaatgtcgccgttctgccacgctgcaaaggtcaaggcatcgggaaaatgctgatgacgttctgcgaggattacacgcagcgcgccggatgtactgcggttcggctctacacccatgagcagatgaccgaaaacatcgagatctacaaaaagctgggatacctggaagcccatcgagcgatggaaaacggtttcgcccgagtcttcatgcgcaaggcgattccggtggtttga

SEQ ID NO: 353078 - DNA, 429 bp, Pseudomonas aeruginosa
atgaaacccaaggaaaaggcggccaactacaaaccagccgaggatcgggagaaggatctgaagttcgccctcctccgtatccagaaaggccgtgccaaaacaggggaaacgaaggttaccatcgccgcagtcgcccgcgaagcgggcgtatcgacggcactgatccacaactactacccaagcattgccgaagctatccgccaggttcagggacgctccagtcgcgccatgcgagatgtgaagcaccaagacttgcttgccgagcgcaaaaaatccgctggctaccgtaaggaaatcgaggagctgcgagcgaaggtcgccaatctcgcctccatcaatgaggtgctgttggaagataaccgtgttctgaaggagaagatgaacgaccgcaaagtcgtcgaactggcttcaaggaagccgcatggatag

SEQ ID NO: 353079 - DNA, 1905 bp, Pseudomonas aeruginosa
atgagcgacacccccctggcgacgctcctctgggcacctcttgcagcccagccgggcgatgtgcgtgggctccccgagtctgaacgcgacgccctgatcatcagcgctattcaggtcgatgggcagtgggtcatccgcagccgctacggtgacgacatctggcacctcgagggcttcaccagcaacgtgaaggccagcggtaaacggctagacttcggcactgtgccgcccgcgtttcgggcggtgatgaaggcgatgctgtaccgctacctacggcgtggacgtcttggggcgaagcggcctaaaggcgtcgcgctgcatcaatgtttctctaatgcgaggccatttctacgccacctggaagcgctcaaacttgaccacttgggtgcggcgacaccccagatctgcaaggcctatgtagatgcctgcaaagcgcaccggcaaacccaccgaaacaagggtaaaccgctatcgccgcgtgcgttgcaagttcgattcggtgccatcgaagcgcttcatgaactgagccagtacaccgacgacccgatacgacagcatccctggctcgatacttccgcgatggcgatggcggggctcaccggtcgcggcgctcaaggcagccagactccgctaatccccgatgaggcgttctgcattcttttccagcgcgcttaccagcaggttgaatgcggccagcatctgcttgaccagcgcgatgcactggatgccctgacggctcagcgaaaggaactgcgaatggggcaaagtaatgtggctctcactaatgccaagaaccgccacctggacgcccttgggtgggagggcggtctgaagctattccacaaggcgctcatcaacctgcgcacggcctgctacatcattctggccagcacctccggctgtcgcaaccacgaactggccaacttgcaggcgggtgcgcaccatcgcactcaggacgatgagggcagcatctaccactggatgagctcacgatcggagaagaccgatgcaggtgcgcatgactggatgatccccgaggcagccgtgcgcgctctgcgcctgatggaacgttgggccgcaccctaccaggccatgatcgccgccgagattgtgcagcgccgccgtgccaacccgcatgatccgcagattgccgaggcgcaaaagcaccgtcatgcgctctttctgggcgtatgtcggaatgagggcaatcagatacacacgctttccaataatgcttggaacaacaacctcagggcattcgccaaggggtgtgggctgagctggaatctcgccagccaccagtttcgccgcaagttcgccaactacgccgcacacagccgcttcggtgacctgcgctatctgaaggagcattacgcgcattggtcgctggacatgaccttgagttatgccatggatgacagctggggacagcacctggacctcgagttgtacgacgagattcaggccgagctggacgacatcaagctcgacgtcgtcgatagctggctgggtgacgcccgcctggctggcggctatggccgtgcgttcaagcagtggcagcgggaaccgcagaacctgctgatcttcaaagatcacgcctcgatgctgaagtccattgccgagagcaccgcgattcgcagcaatggccatgcctggtgtacagcggacgatggcggctgcatcggtaatacccttgagcgcacccgctgcggcaacggctgcaacaatgccgttatcggacgcccccacacgcccttttacaaacggctctacgaggatctgaaagagctgctgcactgctcggatattggcgagggcggccgccagcgcgttgagcgcgatctgaagcgctgccgtgacgtactgacccagttgggcatcgacccggagatcctgatcgcatga

SEQ ID NO: 353080 - DNA, 1680 bp, Pseudomonas aeruginosa
atgggtaagcgcaaggtatttgccaagaccgacctcagcgtcccgctaatcgagcacagactcgacgcaactggcaatgtggtcattctgcctgaggccattccgccgacgaacaccacggtcaagttcgggcgtaacacgtcaaacagtcggagtttcgacttttcccgttggtacggcgccggcatcgaccccatcacctacgcctgccaacgccagatcgagcgcttcctcgccggccaggacgacaccgtcacgaccaccaccgtagcttgctactgcacaggtgggctgcgccatttcctcgactgctgcgtattgcgggcgacggctttggaacgtgacctggccctggccgatgtgaatcgggacctgatcgacggttatctcacccatctggccgggctgggcttggagaccaacagtcaaagaagccaatactcgaaaaccaagcccgtgctgctcgccttgggacggcgtgggctgatccccctagtcacctccggcgatgcggccaccttcccgaccaatcccttcccgaacagcaagtccaaggccaagggagagacggcgctgtccaagcgcgagcggcaagcattcgccgtggcgctcaggcaggccatcaagccgatctgggccgacgatgtgcctgtgaccggcgatctgctggccttcgccctgctggtcgtggcgctgcataccggacgcaatgccacgccactgctggaaatgggccgcaactgcctgcgcccgcaccccaaggacaacaccgtgttcctggtgctgtggaagcggcgcggctacaccagcagcaaagtggcgctgcgcgccaactcagacaccgggcgcgttctggagtctacaccgagcgtgcgaaccaacgtggaacgcctcatccgccgtgtgatggcactgaccgagcctctggatgttgaagccccggacgacctcagaggccgtgtgtggctgtatcgcaatcgccacggcacggctgccggtcaagtcacagcgttgagtgcagcaatgttacttcaagcgtcaatccgtctcgtagccgagcatggccttactgacagcgacggacagccactgcgcatcaatgtctcgcgcctgcgcaagaccttcgctaatcgcatcttcgagctgaccgacggcgacctggcgaccaccgccgcggcccttggcaataccctgcaagtggccgaccaacactacgtggcgcccggcgaggatgcccgtcgcaactggaggttcatgggcgagatactggtgcaggagttgctgacccagaccatcggtgcgacccacaaggacacccctttgggccactgcgccgaccaggagcacggccaatacgccccgaagctcgagggcgcaacttgcatgaacttcatgaactgcgtgcgctgcaagcactacgcggtaactgctgaggatctgtacaaactgttcagcttctactttcgagtgctggccgagcgctcgcgcatggacaaacggcgctgggcgcgggagtacgcccacatcccccgcttgatcgaccactacatcgttgccgaggggctgcgacagggaaccttcaaggccgcagccgtggaagccgcccgtgagcgcgctcgtacccagccgcatccgttctggtcggttgatctgatcgacagtctggaggtctttgcatga

SEQ ID NO: 353081 - DNA, 1149 bp, Pseudomonas aeruginosa
atggagcttgtctgggctactgaggatttggtgatcgctgggcaaccctatccggagttccctattctgctttgggactcaatggagagttgcataccagccaatcaattttttcgtcactacctgcttcgcggagccattcgctccaagcgatcctggcccagcacaggacgcgctctgtacgacttctttagcttcatccaggcccatgacctagactggcacgacgttgatcgaggcgaggccaagtcccttgtggctgcctatcgggactactgcctggactcatgcgaactggcatcgaacaccacctaccagcgcctgcattacatctgcgagttctacgaattcgcactagagcaggggtgggtgaggcgcctgcccttcacctatgaagaacgcaccgtgaggcgccaaacaggtttccttgcgcataccgatgccagcggcggcaaggccatggcgaacgatgtgatgccgcgtaaacccaaggtcctgcccaagtacctgagcatggccgaggtcaaggcgctcctggctgcagtggagaacccccatcaccggatgatgatgcgtctgacgctccatacgggcctgcgccgcgaggaaatcgccacgttcccgctggcctatgtcttcgaccccgacaagaagggaggaaccgagcggaaccacctccttcacctcgatccgttcgacgggagcggcatggcgaccaagggcagcaagccgcgagacatccgcgtcagccgcaagttcatggccgaactctatcgctatgtgacgaaggtgcgaggcgaacgtgcctcgctgagcgaggccccgcaaaggccgctgttcctcaaccagttcggggaaccctatagcgaggacggcaagagcctcaaccggatcatcagtgagactggtaagcgcgctggaatcaaggtccatacgcacatgctccgacatacctacgccacccagatgctcgtcagccttcaacgcaaccctgagagcgggctggatcctctggtattcgttcagcggcaactcggccacagctcgattcagacgaccatggtgtacctgcatctggtcaacgaaatggccgaccaggcggtgttggcctatgacgacgagttgaacgccctggcggaggcggcctaa

SEQ ID NO: 353082 - DNA, 1224 bp, Pseudomonas aeruginosa
atgagccggatcgatgcgctgatcgctgagctttgtccggagggcgtggagttcctggagctccaggagctttttgacacgaagaatggctatacaccctcgacgaccaataagtcctactggactgagggaaccgtaccctggttccgaatggaagacatccgtgaaaacggtcgaatcttgggtgagtcgctccagcaaatcaccgaagaggcagtgaaaggtgggaggctctttcctgccgactccatcatcatcgcgacctcagctaccattggtgagcatgcgctcatcactgttccacatctctcgaaccaaaggttcacttcgctcgcgctgaagcctgaactctcttctctcctggacatgaagtttgctttttactactgcttcgtactcagtgagtggtgtcgcaacaacacgacgacatcgagttttgcatcggtcgaaatgaatgggttcaagagatttcggtttccggtaccgccgctcgaaattcaacgcgagatcgtaaaagttcttgacgctttcacggagctggaggcggagctggaggcggagctggaggcgcgtcgcggccagtaccagtactaccgcgacgccttgctcgctttcagcgatcaggatattcgctgggccgcgatggccgaggtcggcgagttcttccgaggtcgccgcttcaccaaggctgactatgtggatgccggcgtgccgtgcgttcactatggcgacatctacacgcagtacggcaccgccaccgagacaaccgtttcacacgtgcgcaccgatatggcgccgacgctccgctttgcgcagcctggcgatttgataatcgctggcgtgggcgagacggttgaggatgtaggtaaagccgtggcgtggctcggcagtggcgaggtggcgattcatgacgactgctttgcctttcggcattcgctgaacccacggttcgtttcctattacttccagaccacggcgtttcacgctgagaagaacaaatttgtcgcccgagccaaggtgaagcgcttgtcctcagagagcctggccaagctgaccatccctgttccctcgcttgaggagcaggcacgcatcgtcgccatcctcgacaagttcgatgcgctggtaaatgacatctccgtcggcctgcccgccgagattgtcgctcgccgccagcagtacgcgtattaccgcgaccgtttgctcaccttcaaggaagccctatga

SEQ ID NO: 353083 - DNA, 894 bp, Pseudomonas aeruginosa
atgcgagcactctctatatcactttctataatttctatgctggcgtcgcactccgccattgcggggtgtcctgatattaggccggctccgagaaccataaacgacacggcagaaaattattcaaagtctcctggatttagcctaaatgaagaaggggttcttcagtttgactatggcgcacatcatggcggtctaggtaagtgggctaatccatttttcgattcgaattatgcgctggctctgtatcgggactggctaaacagcgagtgcaaagacgatgccttgaaagagaattttcttcatcaagcaaaatggctggcaaataccgctaaggttgatggagatatcgcatcttggccattgccattcagagatcagaacttcgatctagatccaggctggatctcgggtatcgggcagtctcgtattgctggcgttttgttacgagcggaatcaatcactgacgaccccgaacttcgtgagattgcaagaaaggcactccatgcgtatgacgtggatatcaaggatggcggggtagttactgttgacgaccaagtaacatggattgaagagatggctgacccaaagggtcgatcatacaaagtccttaatggtcacatcactggactgtcgggaatcttagatttctatgagattacccatgagcagaagtggaaggatctgttcgaccgtggcgtggctgcggttaagcgggatattcccaaattcgatgctggcttcagcagctattatagtctgctcatgccttcgcagaaaagaccgatagcacctctgggcgactacaacccacttcacgtttcgcagcttctttggctgtatgataagtcgagtgatccggtctttctcgactacgctatggatggtctgaagtag

SEQ ID NO: 353084 - DNA, 372 bp, Pseudomonas aeruginosa
atgcatggcgaggcggcccgccaccaggctcgcctggtggagtgcgcggggatccaaggcggcgctaaagcattctggagcgctatcgatgcgatcttcgctcagtcggccggcaacgggggcgggctgcctggcggcacattggactttcctgatctggaccaggctcgactggagaaatgtgcgaaagacatggacctggtggaccagttgattaagacggacatcgacactgcacggtcgaacggcattacagcgaccccgaccctcgtcatccaggacaaccagacgggacgaagcgtgaagcttgaaggcatggccgacgagaccacgttgctgtcggcgatagactggctagccaaggatctctag

SEQ ID NO: 353085 - DNA, 198 bp, Pseudomonas aeruginosa
atgaagaaaaccaattgcgccgcgatgctatcggcactggtgctcgcgtcgtgtacatcaaagcccgctgccccacaggcggagtgcaccaggctcccggagcctccggcagcgctgatgcaggaagagccgtccttgctgccgctgatggacaagttgtttctgatctccgagccggagtcgagcgacgcgaactga

SEQ ID NO: 353086 - DNA, 633 bp, Pseudomonas aeruginosa
atgtactctaggtcgcgcggatttacccttgtcgagctgatggtcattgtcgtccttttgggtgtcatggtcgctttcgccattccgtcttttgtgaatctcataaaaggcaacagcatggcctcggcgcgcaatgatttgcaaaagagtctcgattatgcgcgtgctatggccatgacaaataagaccggggcgcaggtatgcgtagctgatgggacaataactatcagcaatgcacgtaaggccgagagagtcatagcaagcacgagtaaaggtgggggattagtcaagtacgggtttaagtatgagtgggaaactgtaagtaaactttcctctcgcgaatataatagcattggctctaacgggcttgactctggctgtgtcgtgtttgcttccaatggaacaattccggcgctagagaaggtgaagaaaccaccgatagggcaggatggaaaatgcaacacaagtggcgggctcagttcatttgtatatacgaacgggttcttcggtaagtctgatggtgctacagacccagagtggcagattatattcaacagtgctgggcactatacggtgaagcctaaaggggcggacctaacaggagaggaatcctgggatacttttgactgctag

SEQ ID NO: 353087 - DNA, 378 bp, Pseudomonas aeruginosa
atgaaatctggcatcacggcccgtcgcctgttcatcaacgacaccaaggctttggtgcataccgtcgacgggaccgccatgctggtcacgccaggaatcttcaagcgttatgtccaggagcatccggaggttgaaaagctggcccaggccaaggagaccgccggctggaagctggtgcagcgcgcgttcgagaaacagggtcttcaccgaaagaccagtaagaatctgaacatctggaccatcaaggtttctggtcctcgcaagacgaaggagctcaaggcttacctgctccaggatcccaaactgctgttccctgtgcagcctctggacaacccaagcctcacggtcatcaccgatgccgaaggaggtgtggaatga

SEQ ID NO: 353088 - DNA, 195 bp, Pseudomonas aeruginosa
atgatgcggctgattttgggccgcgcgctgacggtcatctcgtcctttttcagcatggctcctctgtgggcgcccagctccggctaccaacaagcctggccccaggcgagacccggcaagtctggcgtagctgctgcccgccgtgccgcccgcaaggctcgcaaccgccggaggcagcgccatggccgtgcttag

SEQ ID NO: 353089 - DNA, 618 bp, Pseudomonas aeruginosa
atggccgtgcttagcatcctgcgctccaactggttctggatcgcgctgagcgctgtgctgtacagcgccgctgtggtgatccacggctccgtaagctacgaccgagggtatgccaccgctcgcgccgagggtgacgctgcgctgctcaacctgcagctgcagcacgccaacgaacgcgcccagtccctccaggacagcctggttcagtacaagcaacaggtcgctcgcgccaaccaggccgaggagcaactgcagcaggtacagcagcaactgaccgacacccgacaccaactccaggagcgaatcccccatgtcacgaccgtataccggccggcacctgatgtcgcgcctgttgctattcctcgctgtgtgttcactcgtggttggctgcacgactacaacgccgccctcggcgccgatctgcccgccgctcgaacctctggtagtacctccgtcgctgaagaagcgccccgcgccgcccccggcgctgacaccgaactactggaaagcggcatcactcccgccgacctcctggctcacgcccaggactacggccgctgggcgctcggcaacgccgcccagctccaccagttgctcgatctgcaggaagggaagtag

SEQ ID NO: 353090 - DNA, 972 bp, Pseudomonas aeruginosa
atgctcaagcttcacgatttttgcaacagagccgttgatgtcgcggatgatctcgaccaggtctggcgagaaggccttggcgatcagcgtggcgttgcgcggtacgctgccctggcggtccttgccgaggatgctgccgcccagctcctgccagatgccgcgcaccgcgccggcggtgtagccggggtggtcgagcagcgacatgtaggtctgcgcgctacagccctggggaatctgtccggtggccagcagggtggtgccgtcgaactgggtcaccgggctgaagcgcagcttcggccaggccgggcaggtggccggcgcggtcatcttcacctggttgtcgatgcgtacgttggccagcggcgggtccatctgcacgttgaccttgttgccgtcggtgcgcaccaccatgcgcacgctcttcaggttgaccagcagcgagtccggaccgaccaggaacggcttggtgtcgtcgccgccgtcgtcgttgaataccggcaactgcgggatgttgaagtagctgcggtcgagtaccaggtcaccggtgaccttggtcacgccattggcgcgcaggtcgcgcatcagcagccagagcttctccatgttcagtttcggatcgccgccgcccttgaggtagaggttgccgttgagcactccgttcttgagctggccgtcggtgtagaactcggtcttccactggtaggtcgggccgagcatttccagggcggcataggtggtgaacagcttcatggtcgaggccgggttcaccgatacgtcggcgttgtagtaggtggggttgcccgggccgtcgagcggaatcagcaccagcgacagatcgttgccggtcagcttgttggtctgcagggctttctgcacgttggccggcagggtggcgttgacctgggcgagggtgggaagggcgaaaggcaggagcgtggcgaaggcaagagtacgcagcgacttgaacattaa

SEQ ID NO: 353091 - DNA, 210 bp, Pseudomonas aeruginosa
atggagaagaacgacgcagtggacaccctgattgccgcgatgaccgatagtcgccttccggtgccggtcaggatcggtgccgcgcgaggcctggcgcatattggcagtgcccaggtgcgtgccgaactggtgaaggtgatgacgaaccaactatcccctatggatctgcgggccgccgctgctgaagcgctggggcaggcctcggcctga

SEQ ID NO: 353092 - DNA, 255 bp, Pseudomonas aeruginosa
atgacccaactggaacaagccctggttgcccaggcccgcgcggcccaggcgcggacggcccggtatctgtggcaaaccacggccggccagactcccgacgatgaccgggaagaattcctgatgcagcacggggccctgaccgccctgctgtccctggcgcatgagaaggccagcggcctgacgccggaggcggtggagcagctgtgtcagatcgaggcggccgatgcgcaggccaaccgggccacacgcggctga

SEQ ID NO: 353093 - DNA, 180 bp, Pseudomonas aeruginosa
atggccgacttcgtgatcagtgacgtgaagaaggtgcgcgaggtgttcgactgggtgagggtcaacgagcatttggcgcgaggctgggtgctgctgagcatctcgaccgggcaggacgacgtgaagtccccggccgtccgctacatcctcggttggaccaagggcgagccggccgactga

SEQ ID NO: 353094 - DNA, 264 bp, Pseudomonas aeruginosa
atgaacaacgcggcagcacgcatagtccaggttgaacacccggccgcattcctcatgaccaagctgcggcgggacgcactgatccgccggcgccgcccgccagtagcggccgacgtccttcaggtcgcaggccgtcgcctgctggtgatggccgacatgggggcggtaccacagttcacctggtcgctcgacggtactgtcgttcctcctcagcaggtgcttgacctgctgaccagcaccgagcagggcggagttcagccatga

SEQ ID NO: 353095 - DNA, 159 bp, Pseudomonas aeruginosa
atgattctcctttgcaccctgtatatgcttcataaccagcgcctgattaagcaagcgtttgtgcgattgtttaacaatggggtgaaggagtccagtcaaaatttcggccagccggttagcctgcccctcatcaagtttcttaacggttcccgtagttga

SEQ ID NO: 353096 - DNA, 1923 bp, Pseudomonas aeruginosa; identical to SEQ ID NO: 340913

SEQ ID NO: 353097 - DNA, 819 bp, Pseudomonas aeruginosa
gtgcgcgatgcgctctacgaggcctccaggagcgatggctccgcgccagaacggcgcgcgcgcctggccgaaatggcggaagccatgcagatgttctgcatgggcgccgacggcgagatgttcaatcgcaaaggcacgccctggcctgaagccgacctcaccgtggtggatttcgcgacttacgcgcgcgaaggctacgccgcccagctcgggatcgcctacatctcgctgctgaacaccgtaaacaacatcgccgaacgcgaccaattcaagggccggcccatcgtcaagatcaccgatgagggacacatcatcaccaagcacccgctgctgctgccctacgccatgaagatcaccaagatgtggcggaaactgggcgcctggttctggctcgccacccagaacatcgacgacatcccagcctccggggcgccgatgctgaacatgatcgagtggtggttgtgcctgaacatgcccccagacgaggtagagaagatctccaggttccgcgagctgtcgccggcgcagaagtcgatgatgctctcggcccgcaaggaaagcggcaaattcaccgagggcgtgctcctggccaagggcaaggagtacctcttccgtgtggttcccccgagtctctacctggccctggccatgaccgaaaacgaagaaaagaaccagcgctacaacatcatgcaagccaccggctgcgacgagctcgaggcggccttgcaggtcgcagcggatctcgacaaggcgcgcggcctgccgcccttcccaattaatttcccagaccaaccggcagtggagtgccaggacgaatga

SEQ ID NO: 353098 - DNA, 270 bp, Pseudomonas aeruginosa; identical to SEQ ID NO: 324403

SEQ ID NO: 353099 - DNA, 957 bp, Pseudomonas aeruginosa
atgaacccactgttcaccaacctcacccaggaaaccctcgcctacctcgaggatcaactgtccaacaacgacgtcgccggcgacgacgagctcatcgacctgttcatcgaggagctgtcgctgaccttggagcaggcggaagcggctgtcgcgctacgcgatcagtacctctgccaggtcttcctgaacggccaagggccgctgcaccgtccaagacgatgggctgagcttcgaccctcacaccaagagcgttcggtaaccaccacgctcccctgcaccagttggactacacccccgaggggcttcaccgcccctcgagggcggcgtggctcctccttccaggaggttcctatgcccagtcccaccccgctctaccagatcgaagagtgcccagacctgtacgtcgacgcctgcgtgtgcgacgagcagcgcaacctggtctttctttcggcctggggccgcgacaccgtgacacaagagttcctggccaggctgacgctgggccgggaagaaaatggcatcgaccatttccacatcatcgtggacggccgccgcttacctgtcttcccaaaccaggatctcctggagaaacgcaccacccgccagttccgcggcacgttgttcggcagcctgctcaatctttggctgttcgatcggcgcgcctcggcgcccgaccgaggcaatcacctcgccttcgcactcctgcagcgcgatgaggatccacaccagaggctctggccgctggtgatggagacctgtccgctccccctcctgcagcactggcgcgagccagtgatggaggtcctcacccagcaccagatgttgaccgccctgccagggacgatcggcaacgtctgcgcctggcgactcgccctgcgggtcgacgtgctcgagcccactctcggtgagctgatccgcgaaagcattcttaccaccgatgctcaggcgcaagcctga

SEQ ID NO: 353100 - DNA, 1179 bp, Pseudomonas aeruginosa
atggttcaggtaacactgttggttatcttgggtctaggcagcgtttccgcatttctctccgccaatccttcctgggcattcaaggaatggtcggtattcgccggcctgatgctgttttccttcaatatatccgccagcccagagtgggttcgccgtatcgccctctggggggtggtcgtgttgggagggttcttctgctaccagttcctgctttcctatctcgcggccttcgtcagcgggctccgtgagttgaatcccagggttctgctcagcggcttttccaacgtccggaccatggggcagttccaggccatgctgctgccgctgatggctgcgctggggttgtacctgcgagagaccgggcggttcagactgtcctggcttgtcatgctgctgctggccatccaatggtgcatctccttcgccttggctggacgcgggctctggttgggtttcgccgtcgcgcatctcgcgctttgctggatcggccccgtggggcgccgctttttgatcgtccagttgtccgcggcattcgtcgggttggcgctctatttcctgttaatggttgccttgccgacctggctaggtatcgacatgaccctcatgtccggtatgcgcagtggtctgtctctgcgcgacgtgttgtggcgagatgcctggggcatgttcgtagcccatcctttgcttggggtcgggcccatgcatttctcggcggtgccgaacagcgtcggtgcccacccgcaccagatgctgctgcagtggttcgctgaatggggcggggtcgctggccttctggtggttggactgatgacccttggtctgcttcgcggcgcgcgttacctgcgtgaacagggcgatccgatggatgccggactgtggctggccctcgtttcggtcctggtcctggcccaggtggacggcgtgttcgtcatgcccttcacccagaccgtattggccttgctggtaggcatcgccatggcacgctggtcgaagccggtcgcgccgtcccccgcacagcgctggctctgtcggggcctggctgtcgttgtcattgtcgtgctggggcgcgtgctgctgctcgaggtgccggggctgaccgcggccgaggagcgctacctggaaatccacggcggcggtgaggcgccacgtttctggattcagggttggattcccatgtga

SEQ ID NO: 353101 - DNA, 393 bp, Pseudomonas aeruginosa
atggcgggcatcatcgcggcggttctcggcgtcatcgccctggcgtggttcctgcgccgactgttccctgccctgttcgctgcggtgttcgtcctggccgcgccggcgtggctggtcggcggcctgctgctcgatctgctgcggcggccgctggccttcctgcggccgctcggcctcggcctggcccgcctggtcggcttcgtcctggtgctgccgctgctgcccttcatcttcgcctggtcgttcttcgcggagctgtggcggcagttccggccgaaggccagcccggcaccggccggggtcaagccgcccacgccgatgcaggcggccgccaggcgcacggcggacgtaatcgacctggccgcgtttcgccagcggcacaaaaaagagtaa

SEQ ID NO: 353102 - DNA, 2526 bp, Pseudomonas aeruginosa
atgatggacgttagagaatttttggcgagattgtgggccgctgtcgtagcggtattttttggagcattcgtgctgtcgttggcgaacacggcgcacgcccgcgttttccctgaatgcaacccagcggcagaggccgcgaagttctacggcgcggaagatgcggatgcctgggtgaagcgcgtttgtgatgcgcaagaggcggcattccagaagtgggaaaacagcctgcaagccctggatgttgggcagcaggatttggcgatggcgacgaatgccgggaactggcaagcctaccgcgacaagtgggccgaattgctgccagtgctgaaagagctggaagccgctgcactggcgaaccggaacgcgccaggcgcggcaaacatccttagcttgtatcgcaatgacctgggcttgttcttgcagaatgcgggcctttcctcggccggtagcttggacgatttcagcgaccggattctggcgggcctggacggcgagcggccagcggcggcggcaacggccggcgtcaatgtcgtgcagcagtccgtgacgcgaggcgttgagttcggcaagggcatcggaacggcccaagcggaaacgattcttgcggagtatcgcgcccaagtgcagcagcgcggcgcggaacgcatggaacagctcggcggctcgaccgtgagcggctatttcggcggcttcggcgagcgcatcaaggcggctttcggcggctggttgttctacctggtcacggtctgctttgtcggcgcgtggctggcgcacaagcggcggcagaaccctgtgacggtcggcacggccgttggcctggccttcctcgttccatcggtcggcatgttgcttctgttcgtgttcgcgccgttcattccgggctggttcatcctcgccgcgacggtcgccggaacagtggcaacgtatctgaacgcgggccgggtgttcggctggctcgcgggcctggtcggcgcggagtctccgacaggaaagcggctgcgcatcctcggcgggacaatcgaaaacctgcgcggccaggtgcagccctccgggccggtcacggctgccggtgcggcggtcgctgcggtcgataacagcagcacgcatccgctcggttcgcatggctcggcacggtggggaacggtcgatgaaatccgccagggcggccaccttgtcgcgcccggcaagccgggcggcttcgccctgggccgggtgtccgatgcgcccgccggtctcgatcagcgtttccgctttaccggccatgttgtgacggtcgcccctaccggctccggtaagggcattggcgcggtgattccgaacctcttggactatcccggctcggcccttgtgctggacgtgaagggcgaaaacgcggccgtgacggcgcgcgcccgccgggcgctcggccaggcggtctattcggtcgatccgttcgcggtgaatggcgacggcggcgcggccttcaacgtgcttgaccggctcgacgtgtggaacccggattgtgtgagtgaatcggccatcctggccgatgccctggtgatcgctgaaagcaagggcgatgccgtgcatttcgatgaatcggcaaagaacttcctgcaaggcttgatgctgcacgttgccggactggatgacacggaacgccggaacctgggcgaactgcggcggctgctgacggcgggggaagcggaatttttcgacgtgttgggcgcaatggcggccgacgatacggcggccttcggcatcccggccagggcggccaatacgctcatgggcatggccgacaaagagcgtggttccgtgctttcgacggcccgccggaatacggcatttctcgatgacccgcgagtgtcggccgcgctgtcgcgctcggacttcgacctgtcggaaatcaaggccacggccatgacggtttaccttgtcatgccggcaaaccgcatcggcccgaatgcccgtttcctgcgcctgttcatcagctcggtgattgccgcgatcacgtccagcaacgtgcagcccgcgcaccgggtcgccttcctgctcgatgagttcggccagctcggctacatgaagcagattgaggatgccgtgagcctgcttcgcggctacggcctggccttctgggtgttcattcaagacctgtcgcagctcaagggcacctatccgaagtggcaaaccttcctggctaacagcgccaagtcgttctttggcaccgacgactacgacacggccaaatacatcagcgacagcctgggcaaagccacgattgagtttgagacggaaaacaccggcaagaacagcggtagcggcctatcgggcggcggcggctcgatgaaccggggcaagagcaccggcaccagccagcaattcaccggccgcgagctgctgacgccggatgaggtcatgcgcctggggccggagcatccgattgtcctggtgcgcggcgaacggccctacttgctcgaccggctgaactacctggccgatgccgaatatgccgggcggttcgatgcgaacccctaccatagctaa

SEQ ID NO: 353103 - DNA, 222 bp, Pseudomonas aeruginosa
atgaacgccaggagagaagatgcccgccggaaaatccagctcggcggcttggtcatcaagtccggcatggcgggctatccggtttccgtgattttgggcgctttaaccctcgcggccggtgcgctcaacgggccaaatgctgacgccacaaaagcacgctttgaggcggcaggcgatgaggctttttccgatgatggagaggacggcggcaaccgttcctag

SEQ ID NO: 353104 - DNA, 252 bp, Pseudomonas aeruginosa
atggcacgcaagacgttatccgaacgcaaggccgacaagctggccgaactgaaccgcatcaaggcagaactggccgaactggaaagcaaagcggctgagcgcatcggcaagattgccctctccgctggcctcggcgatctcgacattgaagacgccgaactgcggaaggagtttgaggctatcgcctcgaaatttcgcaaaagcgaaggcaagcaagctgccccgatggcggcaacgcctagcgcagattga

SEQ ID NO: 353105 - DNA, 3348 bp, Pseudomonas aeruginosa
atggcgatctaccacttgaacacgcacacgataggacgggcggccgggcatagtgccgtggccgctgccgcctatcgttccgcgtcgtcgctggtagatgagcgcaccggcgaagtgttcgacttcaccagaaaaggcggcgtgttgtcgtccgagatcgtcacgcccgcaggcgtgccggttcccgaacgcgccgccctatggaatgccgccgaggccgccgagaaacgaaaagatgcgcgagtggcccgagagtggcgggcagccctgccgcatgagctgaacgaagccgaccgtaaagagctggcaacgcagatggggcaggccatcgccgaccgctacggcgtggccgtggatgtgtgcattcacgcgccagacaaggagggcgacgaccggaattttcacgttcatatgctggcgaccacgcgaaccattggtgcggatggaacgctaggcgcgaaggccgtcattgagctggcgaacaaagacaggcagaaggctggcattcctggcacaagccagggcgacatcatcgagattcgccaacagtgggccgagctaacaaacgaggcgctagagcgggctggaatcagcgcccgcgtagatcatcgcagctatgcagatcagggcgtggaactcacgccaaccaagcacatcggcagcgatgccgtggcgatggataggcgcggcctggaagccgaccgcatcgacattcacaacgccgaccggcaggagcaggcgcggcagattgtcgagcggccggagatcatcctagacaagctcacggccacgcaagcggtattcacgcgccgcgatattgccgcagagctgaaccgctacattgacgatgccgaccagttccagggcttgcttgccaggctggaacaatcgccgctgcttgtcgagctggaaccggccagcggacgcgacccggcgaagttctccacccgcgaaatgatcgacaccgagcgcggcatggtggacagtgccgagcgcctggcgagaaccggcaggcatggcgtttctagccccatcacgaacgcggcaattgacggcgcaggcaccctatcggcagagcagcaaaacgccgttcggcacgttctcaagccgggcagcctggccgtggtcatcggcgacgccggcacaggcaaatcgttctcgatgaaggttgcacgcgaggcatggcaagcgcagggcttcaacgtgcgcggcgcggccctggcgggcaaggcggccgacgaattgcaggcgggcagcggcatcgacagccgcacgcttgcatcccttgaatttgcttggaagaacggaaaggacaaactcacttcccgcgatgttctggtgatcgacgaagcgggcatgatcggcagccgccagcttggccgcgtcctgaaagccgccgagcaggccggggcaaaagtcgtcctgctgggcgacgacaagcagcttgccgccatcgaggcgggcgcggctttccgtggcgtggtgcagcatgtcggcgcggcagaaatcaccgaggttcgacgccagaaagaggcatgggcgcgtgccgccggccaggagcttgcgcgcggttctgttgccgatggcttggcggcctatgccgagcgcggctacgtcaaaatccacgatagccgggacgccgcccgcgacagcctggcggccgcttatgtcggcgaccagggcaagggtagccagatcatccttgcgcacagcaataaggacgtgcaggcgctcaatgaagccgtgcgccaggcccgcaaagaacgtggcgagctgcgcggcacggcccgctttatgaccgagcgcggcggccgggagtttgccccaggcgaccgcatcgtgttcctgaaaaacgaccgcgaccttggcgtgaagaacggcactcttggcaccgtcgagcattcggaagatggaagcctggccgtgcgcctggacagcggcgaagcccgccggttccaggccgcgcaatatgccgccgtcgatcatggttacgccgtcaccatccacaaggcccagggcgtcacggtcgatagggcctacctgctggcgacccccggcatggatagaagccttgcctatgtcggcatgactcggcaccgcgaggcggcgaccttgtttgcaggagccgacgacttcaccgaccgccgcgtcggccgcctggtcgatcatggcgcagcgccctacgagaacaagccggagaacctagccagctactttgccactctggaaaacgacaagggcgaacggcacaccatttggggcgtcgatcttgaacgcgccattgcggccagcggcgcgaagcgaggcgaccgtatcggcctggaacatggcggctctgaaaccgtccgcctgccagacggcaccacggccgagcgcaacacctggcacgttcgcggcgcggccgagctggccgccggcaagctggcccaggtgctaggccgtgagcgtccgaaggaaagcactttggactttgccgaccggcgcggcttcgacggcgagagcgtcatgcgccgttggctggaacgcggccgggcgaaggtggccgagctggccgggaagatgcgcgacggcctgcgccgcaacctggaacgccacggccgccccgacctcatgcccgcgaccgacattgccggcacgccgaccgtgcagcggccgcagcagatcgagcgcacgccagaggacgagaagaagcgccgggcggccgagatcgcggcgaagttccggcagcaggtcagcgaggaacgcggcgagcaggtagcgccgcagcagcggccccaggccgaacgcccggcacccgacccgctggccggattccgcgccggtgtcgagcgtgccgaggcggcaggcggcggcctggccctggacgtggcgaaggcacagcttgccgtcgcccaggagttccacgcggccgggaaagacccccggcaccattcggcggccatcatgcaggaaggccagcagcgggcctttgcgggcctggcgcagccgtcccaggccaaggccgagccggagcgcccggcggccgtccaggtcagcgaacaagaccgcaagcgggccgaggcgcacgccaagatggaagtcagccagttccgggcgctggcggtgaagcggcaggcaggctttgcgggctactccgaccgcaacccgagcgcctggcgcgagctgccggacgagctgcgcgggcgcatcgagaggttcaacgcaatgcccaaggagcgccaggccgtcgagctggacaagatgcagcgcgagcttgccgacaggtatgcacgcaatccgcaggaaatcacgcgcagccgacagcggcagcgtgagcaggaacgcggccgcgatggtttcagcagatga

SEQ ID NO: 353106 - DNA, 363 bp, Pseudomonas aeruginosa
atgagcagcaccgaaccgacgaacgaagaacttgccaagggctacgccaagcagatcgaacaggcccaggagcgccgcgaggcgaaagaccttgagcgcctggaacgccacggccgggcggccgcgcagcaatcccaggctatcgaagccgagcagtcgggccagggcgtcgagctggacgcaagccagaaagtcgagctgaacgagatcaacggccagcaggcaaaggcgctggcaaaggaattgaaccgggacaacgagaacggcgaccaggtgaagcaagccagggcgcgggagatcgcagaacggttcaaggagaaggcggcgaaagatcgggagcagtcccgcagtttcagccgctaa

SEQ ID NO: 353107 - DNA, 222 bp, Pseudomonas aeruginosa
atggctacttgcaatgttactggcggcacccgccgcgacctaacgaaatatcggattacctttgccgtttcgctggccgtcctgatcggcactggcggcatgttctggcacgcctaccggacgcacgccggttggctcaattccggtgatgtcgccgtgcgcgatgccatcatggacggcactatccagccgccggccgatggcaaggggggcgcacgatga

SEQ ID NO: 353108 - DNA, 906 bp, Pseudomonas aeruginosa
atgaaggcgcagacttggcgccgcacagccctggcggcctacatcctggcgggcgcatccctgaccgtggccggctacaccgtcgccacgaccgaggcgaacgcaaacgccctttaccgcttcgccgaacatgacaacgacgcctattcagcccggagccggagcattgcggaaggcatcaccgccgccgccttgcgcggccagggcgacggcgtgccggatgccgccgactggccgcgcatcattccccaggtcatcccgtccgccgtgaacgtggccgccctgccctttgtcaccaggccggacgatgaaagccgcgtctggcttgttcctggcgttcaatccaacccggcgacggccgcccttggcgctgtccgcttctggctgaaaagccgcgaccaggagccgcgccactggcagaccatcggcagcggcgcgtttatcgcagatggccggtatgtcctcaccgccgcccacgtcatcgacggcaagagcggctatcgcgtgcagacggccgccgggcgctggctggatgccgagctgatcggccttgacctacggcgcgacgtgggcgtgttgcgcgtcagcgaacccggccagccgatcaagacgggagccatgccgattcagggccagccggtattgaccatcggcgcacctggcggccgagggttcagcgtgagcgtgggcattgtgagccggtatgcagaaagcgcccggttttccgctgatgaagccttgcagatcgacgcgcccgtgactggcggcaactcgggcgggcttgtcgtcagcgcgagaggtgaagctgtcggcgtggtcagccattccgatgccgcctttacccaggccgtgccgatcggcacggcgctggccgtggcaacagagctgatcgagcgcagccggtaa

SEQ ID NO: 353109 - DNA, 792 bp, Pseudomonas aeruginosa
atgagaaagtctcggtcgggcgtcgtgttttttggtgatgcggcccgcatcactctgccaggtcctgacctcggcgtcggcggcgagctaggtgattcggcccgaatcacttcgccaggtcctgacctcggccccggcggcgaactgggtggttccactggagccactccaccaggaactgacttcggcgccggcggcgaactgagtgttgcggcccgcaacactctgccaaggaacgacctcggcgccgagggcaagatgggtgtttccactggaaacactctgccaaggaaagacctcggcgccgacggcgaactgggtgttgcggcccgcaacactctgccaaggaacgacctcggcgccgagggcaagatgggtgtttccactggaaacactctgccaaggaaagacctcggcgccgacggcgaactgggtgttgcggcccgcaacactctgccaaggaacgacctcggcgccgagggcaagatgggtgtttccactggaaacactctgccaaggaaagacctcggcgccgacggcgaactgggtgttgcggcccgcaacactctgccaaggaacgacctcggcgccgagggcgaactgagtgattccactggaatcactctgccaaggatcgccctcggcgccgccggcgaactgggtgccttgctccgagtcgccatgggaaattccccagcgacgaaccatgtatttcctactgcgcgctcctaccccgatcagcacgatgtggccgaaccccttccctatataggaacactgcaccatggctga

SEQ ID NO: 353110 - DNA, 666 bp, Pseudomonas aeruginosa
atgaaagacaagccgatgatcggttacgccagggtatcgaccgacgaccaggatttgacgaaccaacgcgcagagctgcacgccgccggctgcacgcgcatctttgccgagaagatcaccggcgcccatgccaagcggccggagctaggccggatgcttgaccacctacgcgccggcgatgtggtgacggtcacgcggctggacaggctggcccgtagcacccgcgacctgctggacattgccgagcagttgcaggcgaaaggcgcgggcctgcgctcgctggccgaaccgtgggccgacaccaccaccccggccgggcgcatggtgctgaccgtgtttgccggcatcgccgagttcgagcgttccctaatcatcgaccgcaccaggaacggccgcgaggcggccaaggcgcgaggcgtgcagttcggccgccgccctaccctcacccccggccaggtcgaacatgcccgcgagctgctgggcgctggccgcacggcggccgaaacggccgagctgctgggcgtgcatcgggcaaccctttaccgggcgctgcgcggccaggaaaccagccgggccgaggcccgccggcgcggcgcgtttgtagaggacgccttgaccgaggccgatgcgctggcggccgccgaccaggagggcatgaaggcatga

SEQ ID NO: 353111 - DNA, 294 bp, Pseudomonas aeruginosa
atgagaaacggacactaccccctgcccccgctccggccggagctgcaagccgcgcacgacgagatggacgccaagggcgattactttgcctatgccgtgtgccgaacccatgacggccaggcgtgggaagtgacgaccaggcagggcggcatgtatggcgcgctcgatggccgctatctcgaccacgacgaagcggccgccgccggcgtggcctggctgctggaacagctcgaccgcgaaccgacagcagacgaggcaacgtatcgggcgctatgggaaagtatgggcaaatga

SEQ ID NO: 353112 - DNA, 633 bp, Pseudomonas aeruginosa
atgaaagtcattgccgtgctgaaccagaagggcggttcaggaaagaccaccatcgccacgcacctagcccgcgccctgcaactcgatggcgcggacgtgttgcttgtcgattccgacccccagggcagcgcccgcgattgggctgccgtgcgggaagatcaaccgctaaccgtggtcggcatcgaccgaccaaccattgaccgggacgtgaagaacgtggcccgcaaagtggatttcgtcgtgatcgacggagcgccccaggcggccgacctggccgtgtcggccatcaaggcggccgacttcgtgctgattccggtgcagccatcgccctatgacatttgggccacggccgacctggtggagctggtcaagcagcgcatcgaagtcacggacgggaagctgcaagcggctttcgtggtgtccagggcgatcaagggcacccgcattggcggcgaggttgccgacgcgctggccggctacgcgctgcccattcttgatgcccgcatcacgcagcgcgtgagctatcccggcaccgccgccgctggcacgaccgttcttgaaaccgagccggacggcgatgcagcggccgaggttcgtgccctggccgccgagatcaaacagaaactcaattga

SEQ ID NO: 353113 - DNA, 225 bp, Pseudomonas aeruginosa
atgagcaagcccacaaccgcactcaccgccggccgcccgagcgcacgcaccgacaaggcgcgggccgcgacccttgccagcctggccgacgacgccggcggcatgaagcgcgtcaatttcgagctacccgccgaacagcacgcgaagctgaaaatctacgccacgaagcagggcaagagcatcaaagatgtgctgtccgagtatgtcgccagcctgccggattga

SEQ ID NO: 353114 - DNA, 1119 bp, Pseudomonas aeruginosa
atgaacaacgagcgcgggaaggggccgcagcagatcggcgaggccctgggcgacctggacaaatcacttgcgaggttgaaggccgcgcacgacgcgcagcgccagaagcgcatcgaggcggccgccaggccgggcgaatcctgggagcaggccgccgccagactgcgcgaggaagaagctagggccgagcgtgagcgcagttccggctccgttaaatcgcccccccccgcatcaagcatccgcaagccgccgaggggagacgaacagccagacttctttgtcccgacgctctatgacgtgggcacaaaggattcccgcagcatcatggacgtggccgtgttccgtctttccaagaaggaccggcgagcgggcgaggttattaactacaccctgcccgatggtcatgtcaccgtgtcggcaggcgcggccggcatggcttcggtgtgggattacgacttggtgttaatggccgtgtcccacctcacagagtcaatgaaccgctacagggaagggaagggagcgaagcctggccgcgtgttccggccgcacgttgcggacgtgttgaagttctgccgacgagcggacggcggcaaacagaaagatgacctggtggaaacctgcatccggctcaacaccacgcacgttgcggttcagcgcaccaggaaggccaagaacggccgcacggtgacggtatccgagggcgaggccctgattagccgctacaaggtcatcaagagcgatagcggcaagcccgaatacatcgagatcgagctggccgattggatgtaccgcgagatcacggagggcaagaacccggacgtgctgaccgttcatcccgactacttcctgatagacccaggcattggccgtttcgtctatcgcctggctcgccgcgcagcgggcaagagcgccgcaaagtgggccttccagacgatctacgaccgcagcggcagcgcaggcaagttcaaggagttctgccgcatcttgcgcaacatcatccaggccaacgacttgccggagtacgagctgcgcgaggaagccgggcagggcggcccgctgctggtgatgacccatcgcgaccatgccgatgcagagctgccaccacctgccggtgtgtaa

SEQ ID NO: 353115 - DNA, 2958 bp, Pseudomonas aeruginosa
ttggcgagacggcgactggtgagcctggaaatctgggcgaggcattatggcgcgccgctcgatgagcgcgagatcgcgcgtcattatacgctgaccagcgacgacctggaaattgtcggccgccgtcgcggcgatgccacccggctcggctatgcgatgctcatgctatatatgagatggcctggccgtgcgctggaagcgggcgaagtcccgcccgctcctgtgctcgcctatgtggcgcagcaactcggcgtcgcgccggcagccttcgcggattatgcccatcgggaccagacccgtcgcgagcatctcgtcgaaatccgacgatcgcacgggttcaggatttttgaccgcaacgctttccgtgaagttgtcgccttctcggtcccaatcgcgcagaccatcatacaccccggccagatggcagacgtcatcgtcgatgaactccggcgcctgcagatcctcctgccttctccgtcgattctcgaagcggtgctgcggcgggcgcgccagcaagccgaacagcttacctatgaagtgctcacgaatggcctgctgcctgacacccttcagggcctggacgatttgctggcccgacgaccggggcaggtcgcgacatggctatcctggatgcgcaatgcgccacaatcgccggcagcgcgcaacatcctgcgcctgatcgaacggctcgcctatatccgcgcgctgggcctcgatcgcgcccgtgccgacatgatcccggctttgacttttgacaggctggcggacgaaggcagccgcatcacaccccagcaccttggcgaactcaatgccctgcgccgccatgcgacgctggcggcaaccggcatccggcttgaggaaagcctgaccgacgccaccctgacgatgttcgacaagctgttgggcagcatggcgcgccgcgccgagaaccggacccgcgacaaagccctcaagacggtgcgcgagttgcaaggccacctccggacgctcacggggtcttgccgcctcctcatcgacgcgcgcagcaagggcgtggattctctggcgcagatcgaggcgctggactggcagcacttcgccgtggccgtcgagcaggccgaagtgctcgggcgaccggaaaccgtcgatcgcaccgccgaattgatcgagcggcatcggacggtgaagctctttgtcggcgcttttctcaacgccttcgagtttcgcggcgccggcgcggttcaggggctcctgtcagcgctggccatcatcgcggagctatatcggaccggcaaacggcgcttgcctgatcgcgtgccgctacgctttgtgccgcccgcatggcgcccgttcgtcctgcgggatggcatcgttgatcgtgccgcttatgaactatgcgccttgtcgcaactacgcgagcggttgcgagccggggatatatgggtcgcgggaagccggcagtttcgcgatttcgacagctatctcataccgccggcgacctttgcggcgctgcgcgagaaggggccgttgccgctcgccatcgaaacggatttcgagcgccatatcgaggaacggcgcaccaggctcgacacggcgatcgagcaggtaacggtccttgcacggcaaggggagctgccccaggttaagcttgacgaaaacggtctcatcatctcgccgctgaaggcggcaacaccgcccgccaccgagattgcccgtcgcgccgcctatgatcgactgccgcgcgtgaagatcaccgatcttctgctggaggtcgatgcctggaccgggttcagcgaatgcttcatccatcgtcgttcgggccgggaagccgacgatcgcaatgcgctgctcacggtcatcctcgccgatggcatcaatctcggcctcacacgcatggcggaaacctgccggggcgcaagtctgcgtcagctcgcccatcttcacgactggcacatcagcgaagccgcctatggcgaagcgttgggaaggctgatcgacgcccatcgcgccatgccgctcgccgcgctgtggggagacggcaccacttcgtcgagcgacggacagcaatttcatgccgggggccgtggggccgcgatcggcgacatcaacgcgcgcagcggcaacgaaccaggcgttgccttctacacccatgtctcggatcgatatgaccccttcgcaagtcgggtgatcgcggcgaccgctggcgaagcgccctatgtgctggatggcttgctgtatcaccagaccggcctgacgatcgaggagcactacaccgatacgggcggggcatcggaccatgtgttcggcctcatgcccttcttcggctaccgcttcgcgccgcgcctgcgcgacatcaaggagcgtcgtttacacctccttcccggccaagaatccggccccttgcttcccggcatgacggccgaaccgatcgcattgggtcatgtcgcggcgcattgggacgaactgctgcggttcgccacgtcgatccgcaccggcaccgtcactgcttcggcaatgctgcgccgcttgtccgcctatccgcgacagaacggactggccctcgcactacgcgagctgggccgcctcgaacgctccattttcatgctcgactggctgcgcgacatcgacctgcgccggcgcacccaggcgggcctcaacaaaggcgaagcccgcaacgcgctcgcccgcgcgctcttcttcaaccagctcggcgaactgcgcgatcgtcggttcgagaaccagacctatcgcgcctccggcctcaacctgctcgtcgccgccatcatcttgtggaacactcgctatctcgaaatggcgctggcggacatcggcacagccgacgaaatcgcacgccacatcgcgccattgggctgggagcatatctcgctgaccggtgactatagctggaatgttgaagatcaacccgatccggacgccttgcgaccgctgcgcgccgtcaactccctacttgccgcgtga

SEQ ID NO: 353116 - DNA, 552 bp, Pseudomonas aeruginosa
gtggcgctgatcggctatgcgcgcgtctcgaccgcagaccagaagctgtcgctccagcttgacgcgctgaacactgccgggtgcgaccgtatattcgacgatcacgcatccggggcaaaagccgatcggcctggcctaaccgaagcgctcgcctatttgcgccccggcgacacgctggtggtctggaaactcgaccgcctcggccgctcgatgagccacctgatcgagaaggtcggcgagcttgcggcgcgcggcatcgggttccgctcactcaccgagaatatcgacaccaccacttcgggcggcatgctggtgttcaacatcttcggctcgctggcccaattcgagcgtgacctgatccgtgaacgcactcatgccggcctcaaggccgcacgcgagcggggcaacaagggtggtcgccggcctgtcgttacccccgacaaactacgtaaagcgcgggcgcatatcgcagcgggcctcactgttcgtgaggcggcggcccggctcaagatcggcaaaaccgccctatacaaggctctggaaaacgcgtga

SEQ ID NO: 353117 - DNA, 786 bp, Pseudomonas aeruginosa
gtgaaaccgctggcgatcaagaactcgtgggtgctggtcacaggggcttcgaccggtttgggcagagcgtccgccctccgcttggcggcatcgtaccaggccaagcccctgattgttggacgaaggctcgacaacttgcgggagctacagaccgaaattgacgagcggttcaatgtgccgtgcgagattatagtggctgatcaacgtgaaatcgagggcagggagaaaatcgcggctaaggttgcagaattgcaagtaacagccgctttgttggttgccggaatgacgagcgttggttcatttgatgcaggccgtgccgacacttatgccgaggtaattgaaacaaacatactcggtttcacggatttgctggctcgcctgattgcgattttcagggagcagccgtttgaatcctcagtaatcgccgtgtcgagcctggcgggcgaaacatccgtgcccttccaagcggtctacggcgcgtcgaaagcctatgtgagcaccctcatgcgagcgctttccgtggagcttgccgggacgggagtgagtgttgggtcttttgcacccggtggaatcgacacagacatggctgccctcagcgatttgaagtgggggaggttgggtttgatggacgttgaccggtgcgcggcccatgcagtccacgctctggtttatcggcaatccttcgccataccggggatgggcaaccagctcacatatttggcgagcagggttctacctcgatcgttggtcaatcggattgccgccctcccatatcggcgcccgtag

SEQ ID NO: 353118 - DNA, 177 bp, Pseudomonas aeruginosa
atgaccaataaagccgccaccatcagcgccgccgttcctgcgaacgtgaaagccgaagctgccgccgtcgcggtagcgcacggcatgagcctggccgccctggtgcgcgagctggtggcccgtgtagctgcccatgacgccgaaacactggcctggctcgatgaggcccgccgatga

SEQ ID NO: 353119 - DNA, 207 bp, Pseudomonas aeruginosa
atgagccgcccgcgctacacgctcgatgagctgctggccgaatccgactattcacagccgctaccgcccgaagaacgcgaatgggtcgatgcgcccgccgttggccgcgagtggccggcctgcgaaaccctggaaggcgaggggctggccaacatcgccagtcccgacgatgacggccgcgacggtggatctcatcgccagaagtga

SEQ ID NO: 353120 - DNA, 291 bp, Pseudomonas aeruginosa
atggcttcgaccgcgcacgccggccaggatgccgatgcgtcccgcttttcgatcatggcccccgtccaggcggcttatgacgcctaccaggtcacggcgagccgggcgcagaacacaatggacagcatcgaggccgagctacgcgaacctggcttgtcggccgagcggcgcgagctgctggcggtatcgcttgccacccttcgcgcccgcgaggcggccgcattggagaggctgcacgctgaatcggccctggcgcagttgaagatggcagactggaacgcgagccggtaa

SEQ ID NO: 353121 - DNA, 1137 bp, Pseudomonas aeruginosa
gtgatccggctgggctcgcacgccgtggtcagcaatctcctgccgatcctggagaatggcgagcgtaccggcctggtgctcacctgccaggacatcaccgccgtgcagcgcgcggatcaacgcatccgctccactcgccgtccaggtgccttcaccgcgcgttaccggctcgaacaactcaacggcgcgagcaaggccaaccgtgagatgttgcagctggccaagcgctttgccgccagccattcgaccatcctgatcactggcgaaagcggcaccggcaaggaactgctcgcccaagggatccataacgagagccctcgccggcacgggcctttcgtcgccatcaactgcgcggcgtttcccgagtcgctactggaaagcgaactgttcggctacgaggaaggcgccttcagcggttcgcgcaaaggcggcaagcccggcctgttcgaggcggctcaccgtggcacgctgttcctcgacgagatcggcgacatgcctgtgtcgctgcagactcgcctccttcgtgtattgcaggagcgagaggtcttgcgcctgggcggcaccgagccgatctccatcgacgtgcgcatcgtcgccgccacccacaaggacctgggggccgccatgaaggatcgcgagtttcgcaccgacctgtattaccggctgaatatcctgcgcttgcagaccactcccctgcgcgagcggcccgaggacattcctctgatttgccagggaatcagccagcgcctgctggtccagggccagccaccgggtgccgcaggcataacgacgctcctgctaccctacctcgtccgccattcctggcccggaaacgtcagggaactggagaatgtcatcgaacgggcgatgctctccgccagcgaaatcttccatgagcacggcgtggatgagcattacctggctcgcgtgctgcccgagctattcgaaggccagcctcagcccaggtcccggaaagagccatcgcgcacaaaggatttgcacgccatcggcaaaaccgcgcagttgcgctacatacaggagacgctggacagctgccagggcagccttgacgaggctgcgcgtcggctcgggatcagccggaccacgctgtggcggcggcttcgctcggcacgctga

SEQ ID NO: 353122 - DNA, 984 bp, Pseudomonas aeruginosa
atgcaatcgagcttttccgaccttgaatatgcagccaagaagaagttgacccgtcgtgatcgcttcctggccgagatcgatgccgtcaccccttggtctgctctggccgttgagctggagcccttttatcccaagggcaagggccgtggtcggccgccggtcggtcttgaacgcatgctgcggatgtatgtggctcaacagtgcttcggcctttccgatgaagggatcgaggatgccatctacgacagccagtcgatccgccgtttcgtcggcatcgaccagggacgtgaagatgctcctgatgctaccacgctgctcaagtttcgacgcttgctcgagacccgtgcactgacgcacaagattttcgaggtgatcaatgggcaactggccgagaaaggcctgctgatgcgtgaaggcaccatcgtcgatgccaccttgatcgccgctcccccctcgacgaaaaacaaggacaaggcgcgtgatcccgacatgcaccagaccaagaagggcaaccagtggcacttcggcatgaaggcgcacatcggcgtcgatgccgaatcgggcctcgtgcatacggtgcttgcgacggcggcgaacgtggctgatgtgacacaggctcatgcgctgctgcacggccaggaaacggttgcgtttggcgatgcgggctaccagggcgttgagaagcgcgaggaaaaccgggactcggatacggactggcatgtggcgatgaagcgcggtcagcgcaaggcactgccggacgacgagcgcggagcattactggaattgttcgagcaggccaaggccagcatgcgcgccaaggttgagcatccgttccatgtggtcaagaacctgttcaggcatcgcaagacccgctatcggggtttggcgaagaatgaggcgcagttgttctcgctgttcgccctggcgaatctggtgctggcccgccggcgtttgctggcctgcgacgcccaaggtgcgtcctga

SEQ ID NO: 353123 - DNA, 150 bp, Pseudomonas aeruginosa; identical to SEQ ID NO: 324378

SEQ ID NO: 353124 - DNA, 150 bp, Pseudomonas aeruginosa
atgacctttctcctgctgtggtccgcctgggcgatgtacagcacctggcgcggctgggccaccaacaacctcgacagcgccactgccggcgcttccgcgatacggatcgtggtcctcctcggcatcacctctttcttcctcctcagctga

SEQ ID NO: 353125 - DNA, 1275 bp, Pseudomonas aeruginosa
atgagcacagcaatcagtcagactgcttataactataaggtggtccgccagttcgccgttatgacggtggtctggggggtcattggaatgggtctcggtgtcctgatcgccgcccaactggtatggcccgaattgaacttcgacctgccgtggacgagcttcggccgccttcgccccctgcacaccaacgcggtgatcttcgccttcggtgggtgcgccctcttcgccacctcgtactacgtggtgcaacgtacctcgcaagcccgactgatttcagacacgctggcggccttcaccttctggggttggcaggccgtgatcgtgggcgccgtgctgaccctgccgcagggtttcaccacctccaaggaatacgccgaactggaatggccgctggccatcctcctggcgatcgtctggatcacctacgcgatcgtgttcttcggcaccatcgtcaagcgcaaggtcaagcacatctatgtgggcaactggttctacggtgccttcatcctggtgacggcgatgctgcacatcgtcaaccacatgtcgctgccggtgagctggttcaagtcctactccgcctactccggcgccaccgatgcgatggtccagtggtggtacgggcacaacgccgtgggcttcttcctgaccaccggcttcctcggcatgatgtactacttcgtgcccaagcaggccgagcgtccggtctattcctatcgcctgtccatcgtccacttctgggcgctgatctccctgtacatctgggccggcccgcaccacctgcactacaccgcgctgccggactgggcgcagtcgctgggcatggtgatgtcgctgatcctcctggcaccgagctggggcggcatgatcaacggcatgatgaccctctccggcgcctggcataagctgcgcaccgacccgatcctgcgcttcctggtggtatccctggccttctacggcatgtccaccttcgaaggcccgatgatggcgatcaagaccgtcaacgccctctcccactacaccgactggaccatcggccacgtgcacgccggcgccctcggctgggtggcgatgatctccatcggctcgctctaccacctgatcccgaaagtcttcggtcgcgcagatgcacagcatcggcctgatcaacgcgcacttctggctggccaccatcggcaccgtgctgtacatcgcctcgatgtgggtcaacggcatcacccagggcctgatgtggcgcgcggtcaacgaggacggcaccctgacctactccttcgttga

SEQ ID NO: 353126 - DNA, 291 bp, Pseudomonas aeruginosa; identical to SEQ ID NO: 340256

SEQ ID NO: 353127 - DNA, 735 bp, Pseudomonas aeruginosa
gtggccatccttggccggtgcggctggggggagcacagtggtggattcaggcttcttggccggagcgggactggttgtgattggcgccggtgtcggcaccgaggcgaccacgacgggcgactccagcgtgctgactttttccgtggaagaaggttgcgctaccgccgccggagttggggcagcgagcttcgcatacagttgctggaccggtttcggcctcggcgccgggggaagttgatagcccgggcgcagcacgaagcagacctgccgcgcgacctcgtcgaccttaacctgccaagctgggccggagaggacctggagggtgttgcgcagggtcatcgggccgagcttgtactgagccgccggcagtggccgggtgtagaggatgttcacatgaccggcgtctgccgggcacagcgagtaacccgagcggctcatcacgtactgcatggcgtccttgacgctcgggttcatgctcgacgggatggttacgtcgatgatctgggccatcaggtcgcgttgaccggcatcaggctgggtgctgaccagggtgtagcgcccgtagcgcacgacgggctctttctccggctgcacgccgtttggatacaggtccggggagagcaggtctggattgcggctgctgtcgaaggctggcctggccggctcagccttgtgggtcgtgcagctggcgagcagcaggcacagcgtgagagtggtcaactgcctggtcattga

SEQ ID NO: 353128 - DNA, 1179 bp, Pseudomonas aeruginosa
ttggccgcgaaggacgccccgtttgacgtcgtgacggtgtcggaagcgatcgaagaccttccagaagccggcgggctggcctacctcggccagctcgctgacaacacgccctccgtggccaatatcgaggcttacgcgcagatcgttcgcgatcgggcgcacctgcggcagttgatgtctctcgggcaccactgcaccagaaccgcctcgaaccaccaggcgaatccccgtgaggttcaggaggagatcgagcagaagctgttcgccctcggccaagatcagcacaagtccgactttgtcgatatcaacaagggcctcgcgaagatcgtcgacaccatcgattaccgcttcaacaacaacgtgacggtaacgggggtcccgacaggcctgaaggatctcgacgagctctccggcggactacagaagtcggatctcatcatcgtcggtgcccgtccctcgatgggcaaaacgtcgtttgccctcaacttgatcgacgccgcgctacagagcgaccaacagaagtctgtccaggtttacagcatggaaatgccagcagagcagctgctgttcaggcttgctgccctgctcggccacctggaccttggcaagctgatgaagggccaactgcaagaagaggattggcccaggctgaccgtcgcgatccagcgcataaacgactatggcagccgactggtcatcaacgaccagggcaacctgacgccgacagagctgcgcgccaaggttcgccgtgcagccaggaagtacggccaccccgtactgatcctggtcgactacctgcagctgatgcgctgcccaggcctggaaaaccgagccaccgagatctcggaaatctcccgctcgctgaaagcactggccaaggaaatggattgccccgtcgtggccctgtcccagctcaatcgcagcctggagaaccggccgaacaagcgaccgaacaacgcagacctgcgtgagagcggcgcaatcgagcaggacgcggacgtgatcatgttcgtgtaccgcgacgaggtctaccaccccaacaccgaggccaagggcattgccgaaatcatcatcggcaagtaccgcaacggcccgatcggcaccgtccgcgccgccttcatcgccaaccagacccgcttcgccgaccttgcaccaacttggcagggagctcttgcatga

SEQ ID NO: 353129 - DNA, 474 bp, Pseudomonas aeruginosa
atgatcatcgtgctgatcatcatcgccatcggggtcggcctgggcctggccgcagcggctgggatgttcagttcgtccaacgccaacgaggaacagcgcaacatcagcgttatcgcggctaacgcgcgggccctgaagacctcttcgggctacggctccagcggcaccaacctgatcccgagcctgatcgcaatcaacggcgtgccgaagaacatgagtgtctcctccggcgtcgtctacaacgtctacggcggatcggtcactgtctcgtccaccggcatgggcttctcgatcaccaccagcaagttgccccaggacgcctgtatcacgctggccaccaagatcgcgaagaacaccttcgagcagaccaagatcaacagcggatccgcgatcacgggagaagtgaccaccgcagccgcgacccaagcctgcagcagcgacagcaacagcattacctggacctatagttcgtga

SEQ ID NO: 353130 - DNA, 240 bp, Pseudomonas aeruginosa
atgcagaccagcggggactccaaagcccagttcccgagctacgacatacaactgttcgaccagaaggtacgcctgcgcagcggcgagaccttggtactctccggcttcgaccagaccaccgaggacaccaacaaggtcggcaccggcgacgctgggttcttcgggcttggcggcgggctgacccgcaataccaagcgcgaggtcatcgtggtgctgatcacccccgtcgtgctgggctga

SEQ ID NO: 353131 - DNA, 225 bp, Pseudomonas aeruginosa; identical to SEQ ID NO: 340270

SEQ ID NO: 353132 - DNA, 591 bp, Pseudomonas aeruginosa
gtgctgctgcgcctgtatccggatatgccgaacgaggtcctggcagccaggttgaacaaaacgctccagcagatctgctccaaagcgtatcggctcgggctgaaaaaaagccccgagttctccaagaagatccggcaggactggggcagcgcaactcggttcaagaagggaaacaccccatggaactgcggcatgaaggggcttcccgcgcgaggacgctcatcggaaacgcagttcaagaaggggcagaagccccacacatggctcccggtcggcagcacacgggtaagtgccgatggctacctgcaacgaaagatctcggataccggctatcccccccgggactggaagagcatccacatcctgctctgggaagaacacgtcggccccatcccaaccggccattgcgtctgcttcaaggacaacaacaagcagaacgtcgtcatcgacaacctggaactcatcacccgggccgaacgcatgcgccgcaactccatccatcgctatccacctgagctgaagagcgcaatccgcgtcatcagcaagctcaagcgcaccattcaggaggtcgagcatgaaaaacaagattga

SEQ ID NO: 353133 - DNA, 234 bp, Pseudomonas aeruginosa
atgcgtagtttccttcgcggcacccgggaaagcgttcgccggctggtggccttcgctcaagccgaaggctggagggtcgaccgctccgcaggcggccacttgaagctcagcaagatcggctgcgcctcgatcttcatctcttccacgccaagcgacgcacgcggcgagctcaatgcccgcgccctgctccgtcgagccgacaggcagcgttccctgaaccaggagtctttctga

SEQ ID NO: 353134 - DNA, 210 bp, Pseudomonas aeruginosa
ttggaagcctgggcaaagcgcgcacgctggaccgtccgctgggagccgcaggatctcaactatccgatcgaggctcctctgaccttccacggctccttcgaggacgcggtatccgagctgttccccctgtatgacgctgccgaacggcccttcctggtgaacgccagccgcccgcagtccctgatcatcatcaaggagcgcaagaactga

SEQ ID NO: 353135 - DNA, 240 bp, Pseudomonas aeruginosa
atgcagaccagcggagactccaaagcccagttcccgagctacgacatccagctgttcgaccagaaggtacgcctgcgcagcggcgagaccttggtgctctccggcttcgaccagaccaccgaggataccaacaaggtcggcaccggcgacgccggattcttcggccttggcggcgggctgacccgcaataccaaacgcgaggtcatcgtggtgctgatcacccccgtcgtgctgggctga

SEQ ID NO: 353136 - DNA, 444 bp, Pseudomonas aeruginosa
atgcaacagcagacctggactaacccccttcttcacttctgcgccggcctggcctgcgcgctgaccctctcagcgtgctccaccagcaaggaggagatgctgccccacggcgaggccaacatgctcgacgtctgggaacaaggtgcaaccagctcgttaggcaacagccgtggccggctactcctcgatgccaggcaaacgctgcggcgcccgatcgatccgcagcaggttgcctccgcgaacgaccaggccgactacacccgcacggccagcaacgagatccacagccagttcaaacgactgcccaatcccgacctggtcatgtatgtgttcccgcacctggccggcagcgatcccgccccggtaccgggctataccaccgtgttccccttctaccagcgagtccagtacgccatgccgggcgagcgcacggaggactactga

SEQ ID NO: 353137 - DNA, 210 bp, Pseudomonas aeruginosa
ttggaagcctgggcaaagcgcgcacgctggaccgtccgctgggagccgctggatctcaactatccgatcgaagctcctctgaccttccacggctccttcgaggacgcggtatccgagctgttcccgctgtatgacgctgccgaacggcccttcctggtgaacgccagccgcccgcagtccctgatcatcatcaaggagcgcaagaactga

SEQ ID NO: 353138 - DNA, 753 bp, Pseudomonas aeruginosa; identical to SEQ ID NO: 340259

SEQ ID NO: 353139 - DNA, 651 bp, Pseudomonas aeruginosa
atggtgtttctcctgcaggttgagggtgcggagaaaacactggccctggcggggaagtggattccccgctgggttgcggaagggagcttctatcgaccgaggccgaccgaccgtgctaccagaagctatacggtcttgggttggatcaacacggtgggctgtgctgcagcatttcggatccgagctgcatggggcatgtcgctgacaacgtcagcagatcacgcgctcatcatcgaagcggggggcgaaagtgtcaaggtcaagcaggagggggagcggatgcaggatgcagcgggcggagagcgagggcggaagagcgcggctggtagaaaccctgtcaaaggtttccccagccgtgtctggaaggggagtcaagtgagccacctgtggttgaatcgtcgatccctgggcattgatcgtctcgatcccatcacccggccattatcgtggcttggccagcaaacagtaggcacgcatccgcgtacaaagggagccctgcgtatcaccggcgggccaccggcagggagaaggatcccgatgggtagcctgatggtcctggagcaggagcatcaggctacccatggagaggggaaaaggaggggccgtaacaccagtacgacccttaaatcgaggaaacaccgaacctcttga

SEQ ID NO: 353140 - DNA, 549 bp, Pseudomonas aeruginosa
atgcggcagctcgataaggatcagcaaggcgctctgcaacaaagtgccttccggccactgcaacaaagtgccttccgctcactgcaacaaagtgcctcactaaaaggccttttaaagccttttaaaggtaatagggagctggcccagttggcggaacagtgcgaagccctggagcagggactactggaacttgcccagggactgctggcccaggttcgtcgcacgcccttcactcttctgcccgcccgactcatcgagcagcgcacatccgcccgcaccacctttcttcgctggcagcacattgcaacccggcggatgggcgtcggggtgtgggcggaaatgctgcgccaggacaagaccccggaatacctgctgcaagacctctacgagatggagctgcagcgcatcaccctcaacatgcaaatcagcctgatccactccatcggcaagcaggccgccgagtgtgcggaaaagatgggccaggccgaggccgagttcatgggccgactgcagcagagtcagaaccgccccggttccgtgggcatgtag

SEQ ID NO: 353141 - DNA, 270 bp, Pseudomonas aeruginosa
atggaggtctggctcgacgaaggcgcgtcggtgctgcgcagcctctttggtctggcccagagctaccagttctcgggcgccactcgcgacgacttcgccgcgaacaacgctcgcgccgaagccgcgcggaagatgtacgagaagttcggcgagatcccgcaggacatcctggagggcacccgacgctcgaacttcgctccgccgatcactcggggccgctctaacggtgatgccgatgatgacgctgaccgtgtcgagctcgaggactga

SEQ ID NO: 353142 - DNA, 549 bp, Pseudomonas aeruginosa
atgcggcagctcgataaggaccagcaaggcgctctgcaacaaagtgccttccgcccactgcaacaaactgccttccaggcgctgcaacacagtgcctcactaaaaggccttttaaagccttttaaaggtaagggggagctggcccagttagcggagcagtgcgaagtcctggagcagggattgcttgaactcgcccagggactgctggcccaggttcgtcgcccgcccttcactcttctgcccgcccgactcatcgagcagcgcacatccgcccgcaccacctttcttcgctggcagcacattgcaacccggcggatgggcgtcggggtgtgggcggaaatgctgcgccaggacaagaccccggaatacctgctgcaagacctctacgagatggagctgcagcgcatcaccctcaacatgcagatcagcctgatccactccatcggcaagcaggccgcagagtgcgcggaaaagatgggccaggccgaggccgagttcatgggccgactgcagcagagtcagacccgccctggttccgtgggcatgtag

SEQ ID NO: 353143 - DNA, 528 bp, Pseudomonas aeruginosa
atgaacactgaagcccgctttccgagtatccacgcctcggccgcgttcaccgactcggcggtggttcatgccaatcaagttggggtcaatccgatcgaactggacgccctcagccaagtgatctcgcgcctttcgcgggacgagagcacggtcgcacccagttcgatggagcgagagcttcgtgagctggaggaactggggtacatcgaaatctcgaccacccaggccgggaccctggtggtcactacgcgcgctccggggcaactgctttcggcttacttctggtcggtatggatcccgcgacacctgttcagttgctcgctgaaagtgagcctggtgccgcacctctgctgcggcactcaggactcccagcacctcaccgccgtattccgcattgcaggcagcaaggacgccgcgcgtgagttcctgcatcagttggccaacaactatcccgggcatgagccggagttgcccgaactggtggccgttcagatcggtgatgcactcagtaaggaggccgaatcatga

SEQ ID NO: 353144 - DNA, 411 bp, Pseudomonas aeruginosa
atgcgcgaccacaccctcggcgagccggtccgacccaggacagaacaggtcgtatgcaactacctggccgtcgagtccttggacgcggcgaatcccgagcagatcaagcaggccctgaacttcctccagggtcagatcatcggtgaaggtgtggccgccaagtccttgcccagcgtggccggctcttccatcgccaaggatctgctctacggcttgctgcgctccgctcatgacgcggagctactgttcaactccctctacgacagtggcgtcgaaaagctggccagcgaagtgttcaaggagcacatggccaacaccttggctgcaacgtctcggcaaacccgtgaactgctcgggtacgtggccagccgcgccactcgctcccccttcaaaccacgctccacccactaa

SEQ ID NO: 353145 - DNA, 255 bp, Pseudomonas aeruginosa; identical to SEQ ID NO: 345506

SEQ ID NO: 353146 - DNA, 264 bp, Pseudomonas aeruginosa
atgacctcccggccgacgttcgaaatgcagaccagcggggactccaaagcccagttcccgagctacgacatacaactgttcgaccagaaggtacgcctgcgcagcggcgagaccttggtactctccggcttcgaccagaccaccgaggacaccaacaaggtcggcaccggcgacgctgggttcttcgggcttggcggcgggctgacccgcaataccaagcgcgaggtcatcgtggtgctgatcacccccgtcgtgctgggctga

SEQ ID NO: 353147 - DNA, 240 bp, Pseudomonas aeruginosa
atgcctgacgtcaccgcttaccggccggctgaggacgagctcgctcaactgcgcacagaggtccgcatgctgcgttccgcgcatgacgacctggcctgcagccgacagaacgatcgtcgcagccttcaggcgctggtgaaacgcctcctggatgccgccgccaccgatagccttccccgctcccttgcagagatggagacctggctgcagctcaacagcgaggagaccacggatgcgtag

SEQ ID NO: 353148 - DNA, 489 bp, Pseudomonas aeruginosa
atggctacccccgtcttctgggaaggcaacatcggctcggcgccggagcaccgcagcttccccaacggcaacaatcctccgcggcagttgctgcgactgaacgtgatgttcgacaactcgattcccgatgggcaaggcggctacaaggatcgcggcggcttctggtgcagcgtcgaatggtggcatcaggatgcccagcgcttcgccgaactgttcacgaaaggtatgcgcgtcaaggtcgaaggcagggcgatcatggaccgctggccggacaaagagtcaggcgaagaagtccaggcgctgaaggtcgaagcctcgcgcatttccatccttccgcatcgcctggccgaggtcaccctgttgccgtctaccaacggccagtcgacacaacatcagcagtctcggcaggtgccgcagcaacctgctcagcaggatgcgcaatcgcagcaggactacgacagcgccttcgacgacgacatccccatgtag

SEQ ID NO: 353149 - DNA, 363 bp, Pseudomonas aeruginosa
gtgggcaatgactcgctcaccaaacggcagaaagcgatcgatcgcttccagcaggatcccgactgccgggtgttcatctgcaccacggcggccgccgggacgggcaacaacctcactgccgcgaactacgtgttcttcctcggtctgccctggactcccggtcagcaggaacaagccgaggaccgcgcgtaccgcaacggccagctccgcatggtggtggtgaagatcccactggtcgagggcacgatcgacgagcagctgtggcaactgctcaacgcgaaacgccaggtcgcccaggacctcatcgagccagagcaggttgacggaaaccgtgcgcttttagccgcaagcctaactggataa

SEQ ID NO: 353150 - DNA, 159 bp, Pseudomonas aeruginosa; identical to SEQ ID NO: 324424

SEQ ID NO: 353151 - DNA, 225 bp, Pseudomonas aeruginosa; identical to SEQ ID NO: 340271

SEQ ID NO: 353152 - DNA, 225 bp, Pseudomonas aeruginosa; identical to SEQ ID NO: 340270

SEQ ID NO: 353153 - DNA, 264 bp, Pseudomonas aeruginosa
atgacctcccggccgacgttcgaaatgcagaccagcggagactccaaagcccagttcccgagctacgacatccagctgttcgaccagaaggtacgcctgcgcagcggcgagaccttggtgctctccggcttcgaccagaccaccgaggataccaacaaggtcggcaccggcgacgccggattcttcggccttggcggcgggctgacccgcaataccaaacgcgaggtcatcgtggtgctgatcacccccgtcgtgctgggctga

SEQ ID NO: 353154 - DNA, 222 bp, Pseudomonas aeruginosa; identical to SEQ ID NO: 340273

SEQ ID NO: 353155 - DNA, 429 bp, Pseudomonas aeruginosa
atgatcgacggattgctgcgcagtctcggcctcgaccccaatgcttttcgcgatggcgagcttgccgtgcatacccccatcgacggcagtcgcctggctgcggtgcgactggaggggcgcgccgccgttgccgccaaggtcgagcgcgccgaacaggcgttccgcgcctggcgccaggtgccggcgccgcgccgtggtgaactggtgcggctgttcggcgaggaattgcgtcggcacaaggccgaactcggcgaactggtgtcctgggaggcgggcaagatcacccaggaaggcctcggcgaagtccaggaaatgatcgatatctgcgacttcgcggtggcctctcgcgccagttgtacggtcttaccatcgcatccgagcgtcccggccaccacatgcgcgagacctggcacccgctgggcgtggtag

SEQ ID NO: 353156 - DNA, 192 bp, Pseudomonas aeruginosa
atgcaacgttccgccacggtacacgtccacccggcctgtacctcctccccccagcagatccaacgcctccaggccgacactggctgccttgtcgtcatcttcaacggcaaagcccagcttgtagccagccgcaccccgggccgccgtcattcggtaaccgccacctccccgtttggaggtgacgcagcatga

SEQ ID NO: 353157 - DNA, 1059 bp, Pseudomonas aeruginosa
atgaataccctgttgatgcactgccggccaggcttcgaaggtgaagtctgcgccgaaatcgccgagcatgcagccactctcgagattcccggctacgccaagagcaagccggccagcgcccacgtcgagttcgtctgccaggacgccgacggcgccgagcgcctgatgcgccgcctgcgtttcgccgacttgatcttcccgcgccagtgggcgcgcggacccggcttcatcgaattgccggaaagccagcgcatcgaggtgctgctggcggaactggcgagttatccggtctgcggcagcctctggctggaggtgctggacaccaatgccggcaaggaggtctcgaccttctgccgcaagttcgagaaaccgctgcgcgcggcgctggtgaaggccgggcggttgcaggaggacccggcgctgccgcgcctgctgctgaccttccgctccggccgggaagtcttcgtcggcctcgccgagccgcgcaacagcgcgctctggccgatgggcatcccgcgcctgaagtttccccgcgaggcgccgagccgttcgacgctgaagctggaggaagcctggcaccagttcatcccgcgcagcgaatgggacaagcgcctggcgccggacatgctcgccgtggacctcggtgcggcgccgggcggctggacctggcaactggttaaccgggagatgcgggtgaccgccgtggacaacgggccgatggcggagaacctgatgtattccgggctggtcgaccaccagaaggtcgacggctaccagtaccgcccgcgccaacgggtcgactggatggtctgcgacatcgtcgagaagccggcacgcaccggtgcgttgatcgagacctggatcggcgaagggctttgccgcgaggcggtggtcaacctcaagctgccgatgaagcagcgctacgccgaggtgcgcaagatcctccagcgcctgcgcgagagcttcgacgcgcgcggcctgaaggtagcgatcggctgcaagcagctgtatcacgaccgcgaggaagtgacctgccatctacgccgccttgaacgctga

SEQ ID NO: 353158 - DNA, 240 bp, Pseudomonas aeruginosa; identical to SEQ ID NO: 347148

SEQ ID NO: 353159 - DNA, 1311 bp, Pseudomonas aeruginosa
atgaacgcagcaatccatccccgtccggccgcggaacgcgcgccgtcctactacgccgccacgctcaacgaggaaaccgactatccgaccctgctgggcgcggtgacggtcgacatcgccatcatcggcggcggcttcaccggcgtcgccacggcggtcgaactggccgagcgtggctacaaggtggccctggtcgagacccatcgcatcggctggggcgccagcgggcgcaacggcggccaggtcaccggcagcctgtccggcgacgcggcgatgcacaagcagatgcgccagtggctgggcgccgaggtcgaggacttcatctggcacctgcgctggcgcggccacgagatcatccgccagcgggtggagaagtacggcatcgcctgcgacctccgccatggccacctgcacgcggcgatgaaggccagccacatgggcgagctgcaggcctcctacgaggaggcggtgcgccgcggcatgggcgaccaggtgctcctgctggacaaggccggcgtccaggcccacctggagaccgagctgtactgcggcgcgctgaagaacacccgcaacatgcacctgcacccgctcaacctgtgcatcggcgaggccagggcggcggccggcctcggcgcgctgatcttcgaacattccgaggtcctggatatcgtccacggcccgcggccggcggtgatcacccgcgagggaaggatcgaggcgcagcagatcctgcttgccggcgatgtctaccacaagctcgaacgcaggcagctcaagggcatgatcttcccggccatgggcggaatcgtcaccacccgcccgctgggcgagctggcacgggagatcaacccgcaggggctggcggtctacgattgccgcttcgtcctcgattactaccgccccaccgccgacggccgcctgctgttcggcggcggcgccaactactcgggccgcgactcgcgggacatcgccgccgagctgcggccatgcatcgagcgcaccttcccgcgcctgaagggcgtggagatcgagttccagtggagttgcgccatgggcatcgtgatgaaccggatcccccagctcggcaagctctccgacaacgtctggtactgccagggctactcggggcatggcgtggccaccagccacatcatgggcgaaatcatggccaaggcgatgagcgggagcctggagcagttcgacaccttcgcccgttgcaagcacctcaaggtgccgctgggcgacctcttcggcaatccgatgctggccgccgggatgtggtactaccagctcatggagaagctgcgctga

SEQ ID NO: 353160 - DNA, 1365 bp, Pseudomonas aeruginosa
atgaacttcgcctgcgaacaagaagcccaggatttcctggccgccaaccccgatatcgaactcttcgaactgttcattctcgacgccaacggcgtgccgcgcggcaagctgctgcaccgcgacgaactgctggccgtctaccgcagcggccggccgctgccgagcaccatcctggggctgacgatgaacggcgaggacgtcgaggactccggcctggtctgggacgtcggcgacatcgactgccgcgcctaccccctgtccggcagcctggtgcgcctgccctggcggcagatcccgacggcggcggtgcaggtcagcatgcacccgagcgagggcctgcccgccagcgtcgccgatccgcgccacctcctggtgcgcaccatcgacgcgctgaagagcgagggctatcacccggtgatggccgccgagctggagttctacctgctcgaccgtgagcgcgacgccaacggccgcccgcaaccggctcgcgacgccgatggcggccgcccgcgggcgacccaggtctacggcctgcgcgaactggagcagatcgagccgttcctcgccgacctctatgccgcatgcaaggcgcagggcctgccggcacgcacggcgatctcggaatacgccccgggccaggtggaaatcaccctcgaccacggcgacgccctagtcgccatggaccaggcgatccgctacaagcgcctggtcaagggcgtcgcgcacaagcacggaatgctcgcctgtttcatggccaagccgttcgacgacctggccggcaccggcatgcacctgcacgtcagcctggccgacgaacaaggccacaacctgttcgccagcgacgaccccgccggcacgccgttgctgcgccaggcggtcggcggcatgctcgccagcctgctcgactcgctcctgctgttctgtcccaacgccaactcctaccggcgcttccaggccaacagctacgcgccgctggcgcagacctggggcgtcgacaaccgcaccgtgagcctgcgcgtgccgggcggcccggcctccagtcggcatatcgagcaccgcatctgcggcgccgacgccaacccctacctggccgccgcggcgcttctcgccggggtccaccgcggcatccgcgaaggcatcgatccgggcgcgccggtggagggcaatggctacgcccaggccggcaagcgcctgcccaccgactggctgaccgccctcgacgccctgcaaggctccgagtgggcgcgggaagccttcggcgagccgttcctcggcgtctacctggcggtgaagcgcgcggaataccggcaattcatgggcgaggtcggcgagcaggactggcgctggtacctgacccaggcctga

SEQ ID NO: 353161 - DNA, 1398 bp, Pseudomonas aeruginosa
atgaccttccgacccttctggctggaccaggccctacgctccgaacatgcggccccctgcccgccgctggccggcgatacccgcgccgacctgtgcatcgtcggcggcggctacaccggcctgtggaccgccatcatgctcaaggagcacgatcccgggctcgacgtggtgctggtcgaggccgacctctgcggcgccggcgccagcggccgcaacggcggctgcgcgctgtcctggtcggccaaattcttcaccctggaacggctgttcgggctcaccgaggcgatccgcctggtcaaggcctccgaggacagcatccgggccatcggcgccttctgccagcgctacgacgtcgaggccgactaccggctggacggcaccctctataccgccaccaacccggcccaggtcggcagcaccgacagcgtgatcgccgccctggaacgccatggcatcaactcctttgccaagcgcccgctggccgacgtgcaacgcctggccggctcgcgccggcacctggaaggctggttctcgccggctgccgcgacggtgcagccaggcaagctggttcgcggcctgcgccgggtcgccctgcaactgggggtacgcctgtacgaaggtacgccgatgcgaggactggagcacggccgcccggcggaagtggtcaccccccacgggcgggtcgtcgccgaccgcgtggtgctggcgctgaacgcctggatggcgagggccttcccgcagttcgaacgcagcgtggcgatcgtctccagcgacatgctcatcaccgagccacgaccggacctgctgcaggagatcggcctgaccagcggggtcagcgtgctcgactcgcggatcttcgtgcattactaccacaacaccccggacggccggctgatgctcggcaagggcggcaacaccttcgcctacggcggacgcatgctgccggtgttcgaccgcccctcaccgtatctcgggcaactacgcggcagtttgcgggagttcttccccgagttcgccgaggtcgccatcgaagccagctggaacggtccatcggatcgctcggtgaccggcctgccgttcttcggccggctcgacggccgcgacaatgtgttctacggcttcggctactccggcagcggcgtcggcccatgccacatgggcgggcagatcctttcttcgctggcgctcggcctggacaatccctggacccgttcgccgctgatccagggaccgctcggtcgcttcccgccggagccgatccgctatgtcggttcgctgatggtgcgcaacgcgatccgccgcaaggagcgcgccgaagacgtcggccggcgcccgcgtcatctcgacgtacgcctggccaggttcgccgccgccgcgggcaaggccgacaaggggtga

SEQ ID NO: 353162 - DNA, 354 bp, Pseudomonas aeruginosa
atgcatatcgaacgcttcgaagtcgtcaaacgccgggccgaaatggccctgcacggcaacaccctctacatcggcggccaggtcgccgacgatcccagcggtgacatccaggaccagacccgccaggtcctggagaacatcgaccggctgctccagagcgtcggcagcgaccgcggccaggtgctctcggtacgcatcctgctcgcccaccgcgaggactacgccggtctcaaccaggtctgggaccagtggtttcccgaaggccgggcgccgacccgcgcctgtagcctggccgagttgatcgacccgcgctggcgggtggaaatgatcgtcgtcgccgcccgtccgcagtga

SEQ ID NO: 353163 - DNA, 1380 bp, Pseudomonas aeruginosa
atgaatcaacgtcccgggacggcgctgccgtcctctcccgtgtccagcttccagcgctggcgcctgcagatattcgcgatcacctggctggcctacgccgccttctatttcacccgcaaggccttttccgtcgccaagctcggcatcgccgaagatccgggcttccagttggacaagatggcgatggccgatctcgacgccatctacctcgccgcctatgccgtcggccagttcacctggggcgtgctggccgaccgcttcggcccgcgcatcgtggtgttcggcggcctgctgatctccgcactggccgcggtggtcatgggcaccttcgccaccctgccgatcttcgccacttgcatggtggtccagggactggcgcagtccaccggctggtcggggctgtgcaagaacatcggcagtttcttcgccacccacgaacgcggtcgggtgctcggcctgtggagcacctgctacgccttcggcggactggtcgcctcgccgttcgccggctggtgggcgtacagcgtgttcggtacctggcacgcggcgttctactccagcgccgcggtggtcggcggcgtggccctgctgttcctgttgttgcagcgcaaccgcccggaggacgtcggccatccacccgtcgaaccgcaggtcgcgagcgaggccgtgcgctatgccggcttcaggccggaaggcggcaacggcggcaacggcggcaacggcggcagcctgcaggtactcgccaaggtggtgcgcaaccgcacggtgctctgcctcggcctggcctacttcctgctcaagccggcgcgctacgcgatcctcctgtggggaccggtgatcgtctacgaacgcatgccggcgctcggcaaggtcggcgcggcgatcgttcccaccgccttcgaggtagccggcctgctcggcccgatcctgatcggcttcgcctcggacaagctgttcggcgcacggcgcatgccggcctgcgtgatcagcctgctggcgctgaccgtctgcctggcgctgttcgtcccggcgatgaccaccggcagcattccgatagtggtcggcctgctgttcatgatgggactgaccctgtacggcccggactcgatgatctgcggctccgccgccatcgacttcggcaccggcgaggccgccggcaccgcctccggcttcgtcaatggctgcggttcggtgggcgcgatcctcggtggcctgctgcccggctatttcgacacctacacggtgttcatcggcttcaccgtcgccgccctgatcgccaccgcggtgctcctcccgcactggaacagccgacccgacggtgttgtgaaaggccacaggaacatccccagcctgggggacttccgcccgatccgctcctga

SEQ ID NO: 353164 - DNA, 882 bp, Pseudomonas aeruginosa
atgtcggtatcccatgcgcagttgaaggctttccatgcagtcgccgtgtacggcagcttcacgcgcgccgccgagcgcctgtttctcacccagccggcggtttccgaccaggtgcgcaagctggaggagcgttacggcgtgctgctgttccaccgtaacaagcgctcggtgcgcctgagcgaactgggcgagcgcctgctcgcggtgacccagcggctgttcgcgatcgaggccgaggcggaggagctgttgtccgcctccagcgccctgcggaccggcaccctgaccctggcggtggatgcgccggtgcacgtattgccgcagatcgcgcgtttctgcgagcgctatccgggtatcgcggtgcgggtggagaccggcaataccgacgagtctctgcagcgactgttcagctaccaggccgacctggccctgttgggccgggacgtcagcgacgagcggttgctttcgctgaccctgcgcaacgacccgatcgtcgccttcgtttcgctcagccatccgtgggccgggcgcgagtcgatccgcctcgccgatctcgacgacatgccgctggtgctgcgcgagcagggctcggtgacccgccagaccctggaggaggagatgagccgcgccggcctgcggatccgcccggcgatccaggtcgaaggccgcgaggcctcgcgcgaggcggtggtggcggggatcggcgtgggggtggtgtcggccgcggagttcggcgccgacacgcgggtccatgcgctgcccatcgtcgattgccagcgacgcctgaccgagaccctggtgtgcctgcgcgaacagcgctcgcggcggatcgtcgagaccttcctcgacctggtcggcgaggacctgtcggcgccgagctag

SEQ ID NO: 353165 - DNA, 180 bp, Pseudomonas aeruginosa
atgaattcgcaacacaccgataccgccaagcgccgcgtgatccccttcaatacgcagcagcacagcggtggcgccatcatcgacgcccagggccgggaaatcccgatcaccgaggtgatgatccagcgcgcctgccgcgagctggacaggtccctggagcaggaacagaagcaggcctga

SEQ ID NO: 353166 - DNA, 597 bp, Pseudomonas aeruginosa
atggacaaggacgtatccggcgcgctgcgccgcctgttgctgctcgccatgctcggactgccgctggcggcggccgctgcggtcgaaccgcagcgactggtggatgcggcgcgtgcccaggtgggcgtgaccctgggctacgacccggcctaccggcaactggactatccgggcggcgacgtgccgctgcagaccggggtctgcaccgacgtggtggtccgtgcgctgcgtggacaggggctggacctgcagaaggcggtgcacgaggacatgcgtcgccacttcgcggcctacccgcagcaatgggggatgaaaggcaccgaccgcaacatcgatcaccgccgcgtaccgaacctgatgacctggttcagccgccagggcctggcactgacgccgagccgcgacgcctccgcctaccgggccggagacatcgtcgcctggcgcctggacaacggcctgctgcatatcggcgtgctttccgatcgcaggctggagggcaggccgctggtgttgcacaacatcggtgccggcgtgcgggaagaggacctgctgttccgctaccaggtcatcggccactaccgcttcccgcagggctga

SEQ ID NO: 353167 - DNA, 282 bp, Pseudomonas aeruginosa
atgttcaaggtcaacgaatacttcgacggcaccgtcaaatccatcgccttcgacatgaccgccggcccggccaccatcggcgtgatggcggcaggcgaatacgaattcggcaccagccagctggagatcatgcatgtggtcgccggcgcgctgacggtcaagctgccgggcagcgacgagtggcaggaatacgccagcggcagccagttcaccgtcccggcgaacagcaagttccagctcaaggtcgcccaggacaccgcctacctctgcgaataccgctga

SEQ ID NO: 353168 - DNA, 846 bp, Pseudomonas aeruginosa
atgactgcggtcgcatttctcggcctgggcacgatgggctacccgatggccgggcacctgcagcgcgagggctatcacgtctgcgtctataatcgctcgtcggccaaggcgctgcgctgggtcgaggagtacgccggacgatacgccgatacgccgcgcgaggcctgtgccggcgccgaactggtgttctgctgcgtcggtaacgacgacgacctgcgtgccgtggcgctgggcgagcagggcgccttcgccggaatggcgccgggcagcctgttcgtcgaccacaccaccgcttcggcggaagtcgcccgcgagctgtcgctgctggctgccgagcgtgagctgggctttctcgacgcgccggtctccggcggccaggcgggcgcggtcaacggcgccctgacggtgatggtcggtggcgaggaggccttctatcgacgcgccgaaccgctgctgcgcagctatgcgcggatggtccggcgaatgggcgacgtgggtagcgggcaattgaccaagatggtcaaccagatctgcgtcgcggggctgctccagggcttggccgaggcgctgcacttcgcccagtgcgccggtctcgacggcgaggcggcgatgcaggtgatcggcaagggcgcggctcagtcctggcaactggaaaccgccaccagagcatgctggccggagagttcgacttcggcttcgccgtggactggatgcgcaaggacctgtcgatcctgctcgccgaggcgcgacgcaacggcgcgcagttgccggtcacggcgctggtcgaccagttctacgccgaagtgcaggcgatgggcggcggtcgttgggatacctccagcctga

SEQ ID NO: 353169 - DNA, 342 bp, Pseudomonas aeruginosa
atgcctgtctggctgcaaaccgccttgttgctagcctgctccaacctgttcatgaccttcgcctggtatggccacctgaagaccctcaacagcaagccctggatcatcgccgccctgatcagctggggtatcgcgctgttcgaatacctgctgcaggtgccggccaaccgcatcggctacaccgaactctcggtcggccaactgaagatcatgcaggaagtcatcaccctggcggtcttcgtcccgttcagcgtctacttcatgcagcagccgctgaaactggactacctctgggccggcctgtgcctgctcggcgcggtgtacttcatcttccgcgcctga

SEQ ID NO: 353170 - DNA, 756 bp, Pseudomonas aeruginosa
atgcggttgcacaagcgctcgctggtctgggggctcgcgctgagcgggctggccgtcgtgctggcggccgcctggtgggcgagccaggcgtcgcgggagccggctctgtggagcgagctgcaggtgccgccggcgtttgccatcccgcgcgatttcgacctgggcgaataccgcttgagctggggcggcaagagcctcgccctgtcagtggcgggtagcgctcggccgccgttgtgggagagcgagggcggttttctcggggccgggcgggaaagcgccggtcgcctgcagttgcgctgccaggagcagagcctggagagcttcgaactggtcggtcgacgcttgtccctgaaggggcacctgcgctgcgccgatggccggctcagcgcctacgagctgtcgttcgagccgcgccagggcggcgtggaggtgcgcgtcgcgctggcggacagcgagctgaaccgggtcgccctgtcctggcggcgtggagcgggggagcgcttgtccggtatcgtcgatgacgaggcggaaggtcgctcctgggtcttgccggccggggtcgccggctactggagttccgctggcaacgccttcctcggccactcgacggcggcgcaatccctcgacctgcgcgagccgggccgggtgcaatggcgggctgcgacggagtcggccagggcctggctgttcgctgccggcaaccgcgagcagtggcagcttcgcagcgcgcgtctcgaggcggaaacgcgccgctga

SEQ ID NO: 353171 - DNA, 255 bp, Pseudomonas aeruginosa
atgcaatgtagagccggctgcggcgcctgctgcatagcaccgtcgatttcctctccgctgccgggcatgccggccggcaagcccgcgggcgtacgctgcctgcacctggacgaaaaccatctctgcgggctgttcggccgaccggagcgaccggccgtatgcggccagttcggcgccgatccggaaatctgcggcgacagccgtgagcaggcgctggccctgatcgcggagtgggaagtcatcactgccgcttga

SEQ ID NO: 353172 - DNA, 609 bp, Pseudomonas aeruginosa
atgcgtggcattttgcgtatgaccgtgctggctgccgcagtgttcggggtggccggcaatgcgctggccgaagactggaagctggccaaggacgaggatggcgtgaaggtctacctcagcagtgtccagggctccaagtacaaggcttatcgcggcgttaccgacatcaaggccgacgtggcgaccatcgaggcgctgcaggaggacgtcaagggttcctgcaagtggatccatgcctgcgccgagatgaaactcctgaagcaggaaggcgccgacgcctggacctactcgaagatcgacatgccctggccagttaccggtcgcgacgtggtcatccatgtcaccaccgagaagaccgcggatggcaccgtgatccgtcaccttaaggccgatccgacctatatccccgaggaaaagggccagatccgcgtgcccaagctggtcggcgagtggaagttgcagccgaaggggcagggcgtgacggaagtgacctaccaggtggaaaccgagccgggtggcagcattccttcctggttggccaacagcttcgtggtcgacgcgccgctgaacaccctcaagggcctgcgtagcgccgccgagaagcgctga

SEQ ID NO: 353173 - DNA, 1287 bp, Pseudomonas aeruginosa
atggctgacaaaaaagcgcagttgatcatcgagggctcagcccccgtcgaactgcccgtcctatccggtaccatgggtcccgatgtagtggatgtacggggcctcaccgccacgggccacttcaccttcgatcctggcttcatgtcgaccgcctcctgcgagtcgaagatcacctatatcgacggcgacaaaggcgtcctcctccatcgcggctaccccatcgagcaactggcagagaaatccgactacctggaaacctgctacctgctgctgaacggcgagctgcccaccgccgcgcagaaggaacagttcgtcggcaccatcaagaaccacaccatggttcacgagcagttgaagaccttcttcaacggcttccgccgcgacgcccacccgatggccgtgatgtgcggcgtgatcggcgccctctcggccttctaccacgactccctggacatcaataacccgaagcatcgcgaagtctccgcgcatcgcctgatcgccaagatgccgaccatcgccgccatggtgtacaagtactccaagggcgagccgatgatgtatccgcgtaacgacctgaactacgcggaaaacttcctccacatgatgttcaacaccccctgcgagaccaagccgatcagccccgtgctggccaaggccatggaccgcatcttcattctccacgccgaccacgagcagaacgcctccacctccacggtgcgtctggccggctcctccggcgccaatccgttcgcctgcatcgcctccggcatcgccgccctgtggggaccggcccatggcggcgcgaacgaagcggtgctgcgcatgctcgacgagatcggcgacgtgtccaacatcgacaagttcgtcgagaaggccaaggacaagaacgatccgttcaagctgatgggcttcggccatcgtgtctacaagaacttcgacccgcgcgccaaggtcatgaagcagacctgcgacgaggtcctccaggagctgggcatcaacgacccgcaactggaactggcgatgaagctggaagaaatcgcccgccacgacccctacttcgtggaacgcaacctgtacccgaacgtcgacttctactcggggatcatcctcaaggcgatcggcattccgaccagcatgttcaccgtgatcttcgccctggcgcgtaccgtcggctggatctcgcactggcaggaaatgctctccggtccctataagatcggccgcccgcgccagctctataccggccacacccagcgcgacttcaccgccctcaaggatcgcggctga

SEQ ID NO: 353174 - DNA, 387 bp, Pseudomonas aeruginosa; identical to SEQ ID NO: 319769

SEQ ID NO: 353175 - DNA, 375 bp, Pseudomonas aeruginosa
atgggtatggtaactaacgtcacaaacttctcgcgctccggcctctacgactggatggctcagcgcgtttccgcggtcgttctcgcggcttatgtcattttcctgctgggctacctcattgctcaccccaacatttcctacgcggactggcacggcctgttctcgcagggttggatgcgcatcttcagcctgttgaccctggttgccctgagcgtccatgcgtgggtcggtatgtggaccatctccaccgactacctgacttcgatggctctcggcaaggcggcgacagtcgtgcgtttcctcttccaggcggtttgcggcatggcgatgttcgcattcttcgtctggggtgtgcagattctttggggtatgtga

SEQ ID NO: 353176 - DNA, 1773 bp, Pseudomonas aeruginosa
atggctagcattcgtacactttcctttgacgccatcatcgtcggtggcggtggcgccggcatgcgtgccgcgctgcaactggcccagggcggccacaagaccgccgtggtgaccaaggtcttcccgacccgttcccacaccgtatccgcacagggtggcatcacctgcgccatcgcttcggccgacccgaacgacgattggcgttggcacatgtacgacaccgtcaagggctccgactacatcggtgaccaggacgcgatcgaatacatgtgttccgtcggccccgaggccgtgttcgagctcgagcacatgggcctgccgttctcccgtaccgaaaccggccgcatctaccagcgtccgttcggcggccagtccaaggacttcggcaagggtggccaggccgcccgtacctgcgccgccgccgaccgtaccggccacgcgctgctgcacaccctgtaccaggccaacctgaagaatggcacctcgttcctcaacgagtggtacgcggtcgacctggtgaagaaccaggacggcgcggtggtcggcatcatcgccatctgcatcgagaccggcgagaccgtctacatccgttccaaggccgtggtcctggctactggcggtgccggccgtatctacgcctccaccaccaatgcgctgatcaacaccggtgatggcgtgggcatggccctgcgtgccggcgtgccggtgcaggacatcgagatgtggcagttccacccgaccggcatcgccggcgccggtgtactggtcaccgaaggttgccgcggcgaaggcggttacctgatcaacgcccacggcgagcgcttcatggagcgttatgcgccgaacgcgaaggacctggccggccgcgacgtggtcgcccgttccatggtcaaggaagtcctggccggcaacggcgtgggcccgaacaaggaccacgtgctgctgaagctcgaccacctcggcgaggaagtcctgcacagccgcctgcctggcatctgcgaactgtccaagaccttcgcccacgtcgacccggtcgtcgcgccgatcccggtgatcccgacctgccactatatgatgggcggcgttgccaccaacatccatggccaggccatcacccaggacgccaacggcaacgaccagatcgtcgaaggcctgttcgccgtgggcgaagtggcctgcgtatcggtacacggcgccaaccgcctgggcggcaactcgctgctcgacctggtggtattcggccgtgccgccggtctgcacctggaaaaagcgctgaaagagggcatcgacgcccgcggcgcttccgagagcgacctggaagcctccttcaagcgcctgaacggcgtgaacgagcgcaccagcggcgaagaagtcgctccgctcaagcgcgagctgcaaagctgcatgcagaactacttcggtgtgttccgcaccggcgagtacatgcagaagggcatcgcccagctggccgacctgcgcgagcgtatcgccaacgtcaagatcaacgacaagagccaggcattcaacaccgcgcgcatcgaagcgctggaactgcaaaacctcctcgaggtggccgaggccaccgcgatcgcggccgagcaccgcaaggagtcccgtggcgcccacgcccgtgaagacttcgaggagcgcgacgacgagaactggctgtgccacaccctgtacttcccgggtgagaagcgcgtatccaagcgttccgtcaacttcgcgccgaagaccgttccggcattcgaacccaaggttcggacttactaa

SEQ ID NO: 353177 - DNA, 708 bp, Pseudomonas aeruginosa; identical to SEQ ID NO: 348152

SEQ ID NO: 353178 - DNA, 2832 bp, Pseudomonas aeruginosa
atgcacgaaagcgtaatgcagcggatgtggaacagtgcccatctatccggtggtaacgctgcctacgtcgaagagctctacgagctctacctgcacgaccctaacgctgtgccagaagagtggcgcacgtatttccagaagcttcccgccgatggcaatcccgcccccgacgtctcgcactccacagtgcgcgatcatttcgtcctgctggccaagaaccagcgccgtgcccagccggtttccgccggtagcgtgagcagcgagcacgagaagaaacaggtcgaagtccttcgtctcattcacgcttaccgtctccgcggccaccaggcttccaccctcgacccgctcggcctgtggcagcgtcccgcgcctgccgacctgtcgatcgaccactacggtctgacgggtgccgacctggataccactttccgcaccggtgagctttacatcggcaaggaagaggcgaccctgcgtgaaatcgtcgacagcctgaagagcacctattgcggtaccttcggcgccgagttcatgcacatcgtcgattccgagcagcgcaagtggttcctccagcgcctggaaagcgtgcgtggccgtcccggcttctccgccgaggcgcgtgcgcacctgctcgagcgcctgaccgcggccgaaggcctggagaagtacctgggcaccaagtacccgggcaccaagcgtttcggcctggaaggcggcgaaagcctgatcccgatggtcgacgagatcatccagcgctgcggttcctacggcgccaaggaaatcgtcatcggcatggcccaccgcggtcgcctgaacgtcctggtcaacaccctgggcaagaacccgcgcgacctgttcgacgagttcgaaggcaagaagatcgtcgagctgggctccggtgacgtgaagtaccaccagggcttctcctcgaacgtgatgaccagcggcggcgaagtccacttggcgctggcgttcaacccgtcccacctggaaatcgtttccccggtggtcgagggttccgttcgtgcccgccaggaccgccgcaaggacagctccggcgacaaggtggtaccgatttccatccacggcgatgccgccttcgcggggcagggcgtggtcatggaaaccttccagatgtcgcagacccgcgcctacaagaccggtggcaccatccacctggtgatcaacaaccaggtcggcttcaccaccagccgccaggacgatgcgcgttccaccgagtacgccaccgacgtggcgaagatgattcaggcgccgatcttccacgtcaacggcgacgatcccgaagccgtgctgttcgtcacccagctggccgtcgactatcgcatgcagttcaagcgtgacgtggtcatcgacctggtctgctaccgtcgccgtggccacaacgaggcggacgagccgagcggcacccagccgctgatgtaccagcagatcgccaagcagcgtactacccgcgagctgtacgccgacgccctggtgaacgctggcgtgctcagcgccgagcaggttcagtcgaagatcgacgactaccgcgacgccctggacaacggcctgcacgtggtgaagagcctggtcaaggaacccaacaaggaactgttcgtcgactggcgtccgtacctgggccatgcctggaccgcgcgtcacgacacccgcttcgacctgaagaccctgcaggaactgtccagcaagatgctggaagtgccggaaggcttcgtggttcagcgccaggtttcgaagatctacgaagatcgccagaagatggcggccggtggcctgccgatcaactggggcttcgccgagaccctggcctacgcgaccctgctgttcgaaggccatccggtacggatgaccggccaggacgtcggccgtggcaccttctcgcaccgtcacgcggtgctgcacaaccagaaggacgactcggtctacgtaccgctggccaatctgttcgatggccagccgcgcctggatatctacgattccttcctttcggaagaggccgtgctggcgttcgaatacggtttcgccaccaccacgccgaattcgctggtgatctgggaagcccagttcggcgacttcgccaacggcgcccaggtggtcatcgaccagttcatcaccagtggcgaaagcaaatggggccgactctgcggcctgaccatgctgctgccgcacggctatgaggggcagggtccggagcactcctccgcgcgcctggagcgctacctgcagctctgcgccgagcagaacatccaggtctgcgtgccgaccaccccggctcaggtctaccacatgctccgccgtcaggtgatccgcccgctgcgcaagccgctggtggtgatgacgccgaagtccctgctgcgtcacaagctcgccatctcgaccctggaagatctggccaacggttccttccagaccgtgatcccggaaatcgacagcctggatccgaagaaggtcgaccgcgtcgtgctgtgcagcggcaaggtgtactacgacctgctggagaagcgtcgcgcggaaggccgcgaagataccgcgatcgtccgtatcgagcagctgtatccgttcccggaagacgacctggcggaagttctggctccctacaagaacctcaagcacatcgtctggtgccaggaagagccgatgaaccagggcgcctggttctgcagccagcatcacatgcgtcgtgtcatcgccgcgcacaagaagggcctcaatctcgagtatgccggccgcgaaggctccgctgctccggcttgcggctacgcctcgatgcacgccgagcagcaggaaaaactgctgcaagacgcctttactgtttaa

SEQ ID NO: 353179 - DNA, 1230 bp, Pseudomonas aeruginosa
atggctatcgaaatcaaagccccaaccttcccggaatcggtcgccgacggcaccgtcgccacctggcacaagaagccgggcgaagcggtcaagcgtgacgaactgatcgtcgacatcgagaccgacaaggtggtcatcgaggttctcgccgaggctgacggcgtgctggccgagatcatcaagaacgaaggcgacaccgttctgagcaacgagctgctcggcaagctgaacgaaggcggcgccgccgctccggccgctccggctgccgctgcgcccgccgccgctccggctgcccaggccgccgctccggccgctgctggcggcgacgacgccatcctgtccccggccgcgcgcaagctggccgaggaggccggtatcgatccgaacagcatcgccggcaccggcaagggcggtcgcgtgaccaaggaagacgtggtcgctgcggtcgaagcgaagaagaacgccccggccgccccggccaagcctgccgccccggctgccgaggcgccgatcttcgccgccggcgaccgtgtcgagaagcgcgtgccgatgacccgcctgcgggccaaggtcgccgagcgcctggtcgaggcgcagtccgccatggccatgctgaccaccttcaacgaggtcaacatgaagccgatcatggacctgcgttcgaagtacaaggacctgttcgagaagaagcacaacggcgtgcgcctgggcttcatgtccttcttcgtcaaggccgccaccgaggcgctgaagcgcttcccgggggtcaacgcttccatcgacggcaacgacatcgtctaccacggctaccaggacatcggcgttgccgtttccagcgaccgcggcctggtggttccggtactgcgtaacgccgagttcatgagcctggccgagatcgagggcggcatcgccaacttcggcaagaaggcgaaggaaggcaagctgaccatcgaagacatgaccggcggcaccttcaccatctccaacggtggcgtgttcggttccctgctgtcgaccccgatcgtcaacccgccgcagaccgccatcctcggcatgcacaagatccaggagcgcccgatggccgtgaacggccaggtggtgatcctgccgatgatgtacctggcgctgtcctacgaccaccgtctgatcgacggcaaggaagcggtgagcttcctggtggcgatcaaggacctgctggaagatccggctcgcctgctgctggacgtctga

SEQ ID NO: 353180 - DNA, 1437 bp, Pseudomonas aeruginosa
atgagccagaaattcgacgtggtagtgattggtgccggccccggcggttacgttgccgccatccgcgctgcccagctgggcctgaagaccgcctgcatcgagaagtacatcggcaaggaaggcaaggtggcgctcggcggtacctgcctgaacgttggctgcatcccgtccaaggcgctgctggacagctcctacaagtaccatgaggccaaagaggccttcaaagtccatggtatcgaagccaagggcatcaccatcgacgttccggcgatggttgcgcgcaaggccaacatcgtcaagaacctgaccggcggcatcgctaccctgttcaaggccaacggcgtgacctccttcgaaggccacggcaagctgctggccaacaagcaggtggaagtgaccggcctggacggcaagacccaggtcctggaagccgagaacgtgatcatcgcttccggctcccgcccggtggagatcccgccggccccgctgaccgacgacatcatcgtcgactccaccggcgccctggaatttcaggccgtgccgaagaagctgggtgtgatcggcgccggcgtcattggcctggagctgggttcggtatgggcccgcctgggtgccgaggtgaccgtgctggaagccctggacaagttcctcccggctgccgacgagcagatcgccaaggaagccctgaaggtcctgaccaagcaaggcctgaacattcgcctgggcgcccgcgtgaccgcttcggaagtgaagaagaagcaggtcaccgtgaccttcaccgatgccaacggcgagcagaaggaaaccttcgacaagctgatcgtcgcggtcggccgtcgcccggtgaccaccgacctgctggccgccgacagcggcgtgaccctggacgagcgtggcttcatctacgtcgacgaccactgcaagaccagcgttccgggcgtcttcgccatcggtgacgtggttcgcggcgcgatgctcgcgcacaaggcctcggaagagggcgtgatggtcgccgagcgcatcgccggccacaaggcgcagatgaactacgacctgatcccgtcggtcatctacacccacccggaaatcgcctgggtcggcaagaccgagcagaccctcaaggccgagggcgtcgaagtcaacgtcggcaccttcccgttcgccgccagcggtcgcgcgatggctgccaacgacaccaccggcctggtcaaggtcatcgccgatgcgaagaccgaccgcgtcctgggcgtccacgtgatcggcccgagcgccgccgagctggtacagcaaggtgcgatcggcatggaattcggcaccagcgccgaagacctgggcatgatggtcttctcccacccgacgctgtccgaggccctgcacgaagctgccctggcggtgaatggccatgccatccacatcgccaaccgcaagaagcgctga

SEQ ID NO: 353181 - DNA, 1167 bp, Pseudomonas aeruginosa
atgaatctccacgaatatcagggtaagcagctgttcgctgaatacggcctgcctgtatccaagggctttgccgtagacacccccgaagaggccgcagaagcctgcgacaagatcggcggcagcgagtgggtcgtcaaagctcaggtgcacgccggcggccgcggtaaagcgggcggtgtgaagctggtgaagagcaaagaggacgccaaggcgttcgcccagcagtggctgggcaagaacctggtgacctaccagaccgacgccaacggccagccggtcagcaagatcctggtggagtcctgcaccgacatcgacaaggagctgtacctcggcgccgtcgtcgatcgttccagccgccgcatcgtgttcatggcttccaccgaaggtggcgtggacatcgagaaggtcgcccacgacactcccgagaagatcctcaaggccaccatcgacccgctggtcggcgcgcagccgtaccagggccgcgagctggccttccagctgggcctgaagggcgaccagatcaagcagttcacccatatcttcgtcggcctggcgaagctgttccaggactacgacctggccctgctggaagtgaacccgctggtgatcaagaaagacggcaacctgcactgcctggatgccaagatcaacatcgacagcaacgccctgtaccgtcagccgaagctgcgcgccatgcacgacccgtcccaggacgatgcccgtgaagcccatgcgcagaagtgggagctgaactacgtcgcgctggaaggcaacatcggctgcatggtcaacggcgccggcctggccatgggtaccatggacatcgtcaacctgcacggcggcaagccggccaacttcctcgacgttggcggcggtgcgaccaaggagcgcgtgaccgaagcgttcaagatcatcctgtccgacagcaacgtgaaggctgtcctggtgaacatcttcggcggcatcgtgcgttgcgacatgatcgccgaaggcatcatcggcgccgtcaaagaagtcggcgtgaaggttccggttgtcgtccgcctggaaggcaacaacgctgaactgggtgccaaggtcctggccgaaagcggcctgaacatcatcgcggcaaccagcctgaccgacgctgcccagcaagtcgtcaaggccgcggagggtaagtaa

SEQ ID NO: 353182 - DNA, 888 bp, Pseudomonas aeruginosa
atgagcgtcctgatcaacaaagacaccaaagtcatctgccaaggcttcaccggtagccagggcaccttccactccgaacaggccatcgcctacggcaccaagatggtcggcggcgtgacccccggcaagggcggcaccacccacctcggcctgccggtgttcaacactgtcaaggaagccgtggaagccaccggcgccgaagcctcggtcatctacgttccggctccgttctgcaaggactcgatcctggaagcggcattcggcggcatcaagctgatcgtctgcatcaccgaaggcatcccgaccctcgacatgctggacgccaaggtcaagtgcgacgagctgggcgtacgcctgatcggcccgaactgcccgggcgtgatcactcccggcgagtgcaagatcggcatcatgccgggtcacatccacctgccgggcaaggtaggcatcgtgtcgcgttccggcaccctgacctacgaagccgtgaagcagaccaccgacgccggcttcggccagtccacctgcgtgggcatcggcggcgacccgatcccgggctccaacttcatcgacatcctgaagctgttccaggaagatccgcagaccgaagccatcgtcatgatcggcgagatcggcggttccgccgaagaagaagccgcggccttcatcaaggccaacgtgaccaagccggtggtgtcctacatcgctggcgtgactgcccctccgggcaagcgcatgggccacgccggcgccatcatctccggcggcaagggcaccgcggacgagaagttcgccgccctgcaggacgccggtgtgaagaccgtgcgttccctggccgacatcggcaaggccctggccgagctgaccggttgggaagtgaagaaggcctga

SEQ ID NO: 353183 - DNA, 1314 bp, Pseudomonas aeruginosa
atgactcatttgaaagggttcgacctgctcgcccttggcttcatgacgttcgcgctttttctcggcgcgggtaacatcatctttcctcccagtgccggcatggcggcgggcgaacacgtatggagcgcggctttcggcttcctccttaccggtgtcggcctgccgttgctgacggtggtcgccctggcccgggtcggaggcggtattggccgcctgacccagccgatcgggcggcgcgcgggagtggcgttcgccatcgccgtctatcttgccatcggcccgctgttcgccaccccgcgtacagccgtggtgtccttcgagatgggcgtcgcgcctttcaccggggacggcggcgcgccgttgctcgtctataccgtcgcttacttctccgtggttctgttcctggtgctgaacccgggtcgccttgtcgaccgggtcggaaaggtcatcacgccggtgctgctgtcggccctgctggttcttggcggcgcggcgatcttcgcgccggcgggagcgatcggcagcagttccggcgagtaccagagcgcgcccctggtgcagggtttcctgcagggctacctgaccatggataccctcggtgccctggtcttcggtatcgtcatcgccaccgccattcgcgaccgcggcatcagcgacagccggctggtcacgcgctattccatgatcgccgggatcatcgccgccaccggcctgtccctggtctacctggcgctgttctatcttggcgccaccagccagggcatcgccggcgacgcccagaatggcgtacagatcctcaccgcctatgtgcagcagacctttggcgtttccggcagcctgttgctggcggtggtcatcaccctggcctgcctgaccacggcggtagggctgatcacggcgtgcggcgagttcttcagcgacctgctgccggtttcgtacaagacggtggtgatcgtgttctcgctgttcagcctgctggtcgccaaccagggactgacccagttgatcagcctttcggtaccggttctggtgggactctatccgctcgccatcgtgctgatcgccctgagcctgttcgaccggctctgggtgtcggccccgcgggtgttcgtgccggtgatgatcgtcgcgctgctcttcggcatcgtcgacgggctgggggcggccaagctgaacgggtgggtgccggacgtcttcgccaagctcccgctcgccgatcagagccttggctggctgctgccggtatccattgcgctggtcctggcagtcgtttgcgatcggctgctgggcaagccgcgcgaagcggtcgcctga

SEQ ID NO: 353184 - DNA, 765 bp, Pseudomonas aeruginosa
atgaccgccgaactcggcattttcaacgggcacctgtcgcaacacctgctggcggcgctctggttcctgttctgctgggtgggctacacccgctacgccacctggaagggccgcgacaccgcctgcctggccagcgtcctgcacctctaccgggaggactggatgcgccggctgctgctgcgcgacaaccgtatcgccgacgccagcgtgatcggtaacctggagcgtaacgcgtcgttcttcgcctccagcacgctgatcatcctcgccggcatcctcaccctgctgggctccaccgatcgcgccgtctcggtactggccgacctgccgttcgtggaggaggccagccggggactgtcggaactgaagctgctgtgcctggcagtggtcttcgtctatgccttcttcaccttcagctggtgcatgcgccagtacaacttcgcggcgatcctggtcggctcggcaccgatgatcggcgagcgcaacgtcggcgagctggagcgcaaatcctttgccgagcgtgccgcccgggtcatctcgctggcggccaaccagttcaacttcggcttgcgctcgtactatttcggcctggccatgctcgcctggttcatcaactcctggttcttcatgctggtgacggccggcgtggtgctggtcctgtatcgccgcgaattccattcggacgtgctggaggtgatggtctacaccgagaccgcaatcgccgaaagcccgcgggaaggcgagggcgaggtgcccagaggctga

SEQ ID NO: 353185 - DNA, 237 bp, Pseudomonas aeruginosa; identical to SEQ ID NO: 319780

SEQ ID NO: 353186 - DNA, 474 bp, Pseudomonas aeruginosa
atgtcggaaaatcctctcctcgagcgcgcccggcgctttctctcggccttgcgtcattgccaggtgctggggttgacggtcgaggccgccgacgagaaaggactgaccctgcgcctgccctacagccaggcgatcatcggcaacccggaaagcggggtcgtccacggcggtgcgatcaccaccctgatggacaccacctgcggtatttccacggtctgcgtgctgccggacttcgagatctgcccgacgctcgacctgcgcatcgactatatgcatcccgccgaaccgcacaaggatgtctatggcttcgccgagtgctaccgggtcacgccgaacgtgatcttcacccgcggcttcgcctaccaggacgatccgggccagcccatcgcccatgtcgtcggcgccttcatgcgcatgggcggttcggctcgctccggggcggccaggccggccgcgcagggaggtgcggcatga

SEQ ID NO: 353187 - DNA, 447 bp, Pseudomonas aeruginosa
atgagcccgaccagcctcgagcaactggtccgcgacgcgcgccggaacaacgactacagcccgctggtggagctgatcccgtacgccaagctgctcggcatcgaatgcctgcgcctgggcgacgacatggtcttccgcctgccggcgaacaaggacaacatcggcaacccgaccctgccggccatccatggcggtgtgatcgccggcttcatggagcatgcggcgatgttgcacctgctgactttcatgagcattccgcacctgccgaagatcatcgatttctccatcgattacctgcgtgccgggcacttccgcgatacctacgcgcaatgccaggtctggcgccaggggcgacgggtggcgaacgtcgcgatcaacgcctggcagaccacccagggcgagcccatcgccaccgcgcgggcgcatttcaaggtggacgagccgtga

SEQ ID NO: 353188 - DNA, 1230 bp, Pseudomonas aeruginosa
atggatgccttgctgattctgggcggcctgctgctgatggtcgccggctatatctgggtcatcgtcctggccttcggtaccggtctgctgtggggttacggcagccttttcccgccggtggcgctggcctatatcggcgtgcactggcgtacggcgcgcaagggcgtcgggctggccgcgctgggttgcatcccgctggtggtcggcctggcgctgctggccagtcacgacgctgcgcgactggaggcgatcctcagcctgcgctggctgaagccggaggccaggccgccggcggaactggccatcgcgctcagcggggagttcaacggcaagcctttcgcgccgcagagcggcgagttgatcggcggcgtgctgagcctgcgccaggggcacgatttctacgcccagcgcgagctgcagatccgccttccggcacagccgctcggggcgctgcgcctggacgtgctgcccgaggacggcggcgcgttgccagaagtcgagctgagctggctgcaaccggagcaggacctgcccgaggcgcgtcgtctcctgcgtggctataccttgcacctggacctgcggcccaaggcgccgaaccgcctggagggcgagttccacctgagcctgccgagcgactaccggaccaccctcagcggccacgtcgagctgtataccgaccggctgcgctatcggcacggcaaggtcgacctgggctacgactccgacgataccctggccctggtcttgcgcgactatctgcagcggcgcttcgccagccgcgacgtcagcctcgtgcgggcgccgtcctggcgcgcggccagccatgcgcggccgctgcgtatcgaggccctggtggccggccagactcaggtgctggagctgacgctggagaagaacgcccggcgggagtggacggtgcgcggcgacgcgttccccgccttgccggcggagcctgcgaccgtggccgcggcggcgccgcccgagccgcaggcgctgccggcgccgggcaacgccaccctcgacctggagctggtccaggtcgaaccgcagcgctacagccagcgcctggtcaaggccactacggtacgcgggcgtatcgccgagggccgtttcaccggcctcgacagcgaggggcgcctggtgatccgccgggaaatgcccggtgcgggggaggcgagctacctgttgcgcccggcggagatcgcccgtctcgaactgctcgaacgctag

SEQ ID NO: 353189 - DNA, 1905 bp, Pseudomonas aeruginosa
atgagcgtggaaacccaaaaagagacactgggctttcagactgaagtgaagcaactgcttcacctgatgattcattctctctattcgaacaaggaaatcttcctccgcgaactgatttccaacgcctcggacgccgccgacaagctgcgtttcgaagccctggccaatcccgagctgctcgagggcggcgccgagctgaagatccgcgtcagcttcgacaaggaagccaacaccgtcaccctggaagacaacggcatcggcatgagccgcgaggatgtggtgactcacctgggcaccatcgccaagtccgggaccgccgacttcctgaagaacttgtctggcgaccagaagaaggattcgcacctgatcggccagttcggcgtcggtttctacagcgccttcatcgtcgccgacaaggtcgatgtctactcccgtcgcgccggccaaccggccagcgaaggcgtgcactggtcgtcgaagggcgagggcgagttcgacgtcgccaccatcgacaagcccgagcgcggcacccgcatcgtcctccacctgaaaaagggcgaggaggagttcgccgatggctggcgcctgcgcaacgtgatcaagaaatactccgatcacatcgctttgccgatcgagctacccaaggaattccacggcgaagaggccgacaagccggccgagccggaatgggaaacggtcaaccgcgccagcgcgctgtggacccgtccgcgcgccgaggtgaaggacgaggaataccaggagttctacaagcacgtcgcccatgacttcgagaacccgctgagctggagccacaacaaggtcgaaggcaagctggaatacacctcgctgctctacgtgccgggccgcgcgccgttcgacctgtaccatcgcgaggcgccacgaggcctgaagctgtacgtacagcgcgtgttcatcatggaccaggccgacgagttcctgccgctgtacctgcgcttcatcaagggtgtggtcgactccaacgacctgtcgctgaacgtctcccgggaaatcctgcagaaggatccggtgatcgactcgatgaagtcggcgttgaccaagcgcgtgctggacatgctggagaagctggcgaagaacgagccggagcagtacaagaccttctggaagaacttcggccaggtcctcaaggaaggcccggcggaagacttcggcaacaaggagaagatcgccggcctgctgcgcttcgcctccaccggcgacgattcgggcgagcagagcgtagcgctggccgactacatcggtcggatgaaggaaggccaggacaagatctactacctcaccggcgagagctactcgcaggtgaagaacagcccgcacctggaagtcttccgcaagaagggcatcgaggtgctgctgctcaccgatcgcatcgacgagtggctgatgagctacctgccggagttcgacggcaagcagttcgtcgatgtcgcccgcggcgacctggacctgggcagcctggactcggaagaggacaagaaggcccaggaagaagtcgccaagagcaaggaaggcctgatcgagcgcctgaagaaggtgctcgacgagcaggtcagcgaagtccgcgtctcccaccgtctgaccgactcgccggcgatcctcgccatcggcgaacaggaccttggcctgcagatgcgccagatcctcgaggccagcgggcagaaagtgccggactcgaagccgatcttcgagatcaacccgcagcatccgctgatcgagaagctggatgcggagccggacgaggaccgcttcggcgagctgtcgcatattctcttcgaccaggccgccctggccgcgggggacagcctcaaggatccgggcgcctacgtacgccgactgaacaagctgctggtggagctgtccgcttaa

SEQ ID NO: 353190 - DNA, 726 bp, Pseudomonas aeruginosa
atgagtgagattcgtgtagagccggtcgcctacgacatcgatgggcagccgtacgaaggtcaactggtgtacgacgccagccacgcggggccgcgcccgggcctgctgatggcgccgaactggatgggcgtgagcgccgccgcgctggacatcgcccggcaggtcgccggccgtgggcacgtggtgctggtggcggacctctacggcagggacgtgcgtccgcagaacggcgacgaggcgggcgcggcgatgatgccgctgaagaacgaccgggccctgctgcgcaagcgcatgcaggcagcgctggcggccttgcgcggacaggcgctcgcggctgtcgatacgacccgccaggccgccttcggtttctgcttcggcggttgctgcgcgctggagctggctcgcgacggcgccgagctgaaggccttcgtgtccttccatggcaccctggatacgccggacccggcgcatgccaggaatatcaagggcgcggtactggtcctcgacggcgcctccgatccgctggtgccgcgcgagcagttgccggccttcgccagggagatgaccgatgccggcgtcgactggcagctcaccagctacggcggcgcggtgcattccttcaccgatccgaacgccaaggtgccgggcaagatgcactatgacgccaggacctcccggcgtgccttccaggcgatggacgacctgctggcggaagtcttcgcctga

SEQ ID NO: 353191 - DNA, 822 bp, Pseudomonas aeruginosa
atgagcagtcatcgcccgcaacatcgcctgtccgttcccgatatccagcgccgcaagggtgccggcagcctggtggcgctgaccgcctacagcacgcccatggcccgcctcctcgatccgcacgccgacctgctgctggtcggcgattcgctgggcatggtgctctatggcatgcccagtaccctgggagtgagcctggagatgatggtcgcccacaccctggcggtgatgcgcggcagccggcgcgcctgcgtggtggccgacttgccgttcgccagctaccaggaatcgccccgacaggcgttccgcaacgccgcacgcctgctggccgacagcggcgcccaggcggtgaagctggaaggcggtgaggaaatggaagaaaccgtggacttcctggtacgccgtggcataccggtgctcgcccatatcggcctgatgccgcagcaggtcaacgccatgggcggcttcaaggcccaggggcgtgacccggaaagcgccgaacgggtacgccgcgacggcctcgccatgcagcgcggcggcgccttcgcggtggtcatcgaaggcgtaggcgagccgctggcccgtcgccttagcgaagaactggcgatcccctgcatcggtatcggcgcctcgccggcctgcgacggccaggtactggtcagcgaggacctgctcgggctaagcggcgaacaggtaccgcgcttcgtcgaacgctacgcgcgcctcgaccgggaaatcgacgaggcggcccggcgcttcgccgaggacgtgcgcgaaaggcgcttccccgaggccaggcattgcttcgccatgcgcgagtga

SEQ ID NO: 353192 - DNA, 783 bp, Pseudomonas aeruginosa
atgccgcaaacgggacaagaacgcgacctgccgcgattccgcagcctgccctgcgcggtgtatctgcgcgccttcgagatgcccgccgggcaccgggtggagatgcacgaccacccctggggccaactgatgtacgccgccagcggcaccttgcgcgccagcaccgagcggcacagctatctggtgccggcgcagcgggcgctgtggattccgccgggcgtccggcacgccgcggaggcttgcaaccctgtgctgttccgcagtctctacctggatcgttcgctgcccggcggttgccgggtactggaggtgtccggcctgctgcgcgaactgttgctgcgggcggcggagtttccccgtgaatatccgccgggtggcgaggccgagcgtctcatgcaggtggtcgccgatgaggtcgggcgccttcgcgaggcaccgctgaacctgccgttgcctggcgacccgcgcttgcgccggatcaccgacgcgctacaggcggatcccgccgatccgcgcggcatctcggattgggcgggactggtgggggcttcccgacggaccctggcgcggctgttccgcgagcagacccagttgtcgtttcgcgagtggcgccagcgcctgcgtctgctcaacgcggtcgccgcgctggaggagggcgccagcgtgacgcgggtggccagcgaccttggctacgactccacctcggcgttcatcagcctgttccagcgtcatttcggccagacccccggttgcttcgcccgctccctgcgcttgcccaactga

SEQ ID NO: 353193 - DNA, 1302 bp, Pseudomonas aeruginosa
atgaagaaggcaacacgcatcggcctctgggcctccggcagcctcgtcgcgctcgccgccatcgccctcggctacgcctggcaaccggccatcgcgccactggaaggcacacccggtcccttcagcgccgagcagatcgcccgcggcgaacgcctcgccgccctcggcgactgcgcggtctgccacactcgcgaaggcggcccgcgcaacgccggcggacgggccttgccgacgccgttcgggacgatctacagcagcaacctcacgccggatcgcgcgagcggcatcggtggctggtcctaccccgccttcgagcgggccatgcggcatggcgtggcccgcgacggcagctacctgtatccggcgttcccttacaccgccttcaccaggactcgcgacgaagacctgaaggccctgtacgcctacctgatgagccagccggcggtgcacagcgaaacgcctgccaaccagttgccgttccccttcgaccaacgccagctgatggccggctggaacctgctgttcctggagcccggcgcctaccgcgacgagccgacgcgcaaccagcaatggaaccgcggcgcctatctcgccgaaggcctcggccattgcagcgcctgccactcgccgcgcaacgcgctcggcgcggaaaagtccggcagcgcgcacttcgccggcggcgaggcggagggctggaccgcgccagccttgaacgccagttcgccggcgcccatcgcctggagcgaggaggccctctacgcctacctccgccacggctattcggcctaccacggggtcgccagcgggccgatggcgccagtggtcggcgaaggcctggccaagcagtcggacgaggacctgcgggccctggcccattaccttgcgtcctacgccgctgccccggccggggaaaccgatcagcaacaggcgcaacgcctcgaccggcagggctacggccgcgtgcaaccgcccagcggcagcggcgcgcgcctgttcgccggtgcctgcctggcctgccaccatgacggcgacggaccgcgcttcttcggcgtgcgtccatccctggcgctgaacagcaatgtgcatgcggacagcccggacaacctgctgcggatcatcctcgacggcatccacagcccggccaccggcgacctcggctatatgcccggcttccgccatagcctcgacgaccggcaagtcgccgccctggccaactacctgcgcgagcgtttcgccggcaagcccgcctggccggacctcgcggccaaggcggcaagcctgcgccgacaggcggcgccctga

SEQ ID NO: 353194 - DNA, 2247 bp, Pseudomonas aeruginosa
atgagcctggccaatccctcgcgacgcggcttcctcaaggccggcggcctgctgctggtcaccgtcaacctgcccgccccgctgctcgcccttgccgagcagggcgccaccgacctgccgctggaccaggtcgactcgttcatcgccatcgccgcggacggcaaggtcaccgccttctgcggccacgtcgaccttggtaccggcatccgcacggcactggcgcagatcgtcgccgaagagttggacgtcgcgttcgagcaggtcgagatgatcctcggcgacacccgtcgcacaccggaccaggggccgaccatcgccagcgccagcatccaggtcagcgccgtgccgctgcgccaggccgccgccgaagcccggcgcttcctcctgcgccaggccggaagccatttcccggtgcatccggacagcctgcgcagcgaaaacggccaggtcttcgccgccgccaatccgcagcgacggatcggctacggcgagttgctgcgaggccagcgcttcaacctgaacatcgacggcaaggcgccgctcaagccgcgcagcgagtaccgcctggtcggcaagccggtgcgtcgggtggacatcccggcgaagctgaccggccaactgacctatgtccacgacatgcgcctgcccggcatgctgcatgggcgagtggtacgcccgccctataccggcgcggatgtcagcgccccgctcggcagcagcctgctggcggtagacgaaagctcggtcgccgggctgccggggctggtcaaggtggtcgtgatcggcgacttcgtcggcgtggtctgcgaacgcgaggagcaggcgatccgcgccgcgcgccagctcaaggtgcgctggaaggactggcagggcctgccgccgctggaacccgaccggctcgaggacacgcttcgccggcatccgaagaagccacgcacgctgcacgactcgcccggtctcgagcagcacctcgcgggcatcgcccggccgctgtcggccacctatgtctggccctaccagttgcatgcctccatcggcccttcctgcgccctcgccgaggtcgatgcgcagcgcgctcgcgtctggtccggcacgcagaacccgcacgacctgcgcaacgacctggccaggctgctgcagcgcgagaccggggacatcgaggtgatccgcatggaagccgccggctgctacggacgcaacggcgccgacgacgtcagcgccgacgccgtgctcctggcgcaggcagtgggccggccggtgcgggtacaactgatgcgcgaacaggaacatggctgggaaccgaaaggcaccgcgcaactgatcgaggtccgcggcggtctcgacgagcaaggccgggtggcggcctacgacttcgccacctgctacccctccaacggtgcgccgaccctggccctgctcctcaccgggcggatccaggccaccccgcaggtggccgacatgggcgaccgcaccgcgatcccgcaataccgctacccgcggatgcgggtggtggccaacgacgccgcccccatcgtccgcgcgtcctggatgcgcggcgtctcggcgctgccgaacgtgttcgcccatgagtcctacgccgacgaactggcgcacctggccggcatcgaccccatcgccttccgccgccgctacctggacgaccagcgcgccctggcgctgatcgacgccctggtcgcccgcgccggctggcagccacgcacctcccccaacccagaggcgcgccgggacggcgtgctgaagggacgcggcttcgcctatgcgcgctacttccacagcaagtttcccggtttcggcgccgcctgggccgcctggatcgtcgacgtcgaggtgaacccggagaacggcgcggtgcgcgtcgccaaggtctgggtcgcccatgactgcgggcagatggtcaatcccgatggggtcaggcaccaggtccacggcaacgtcatccagtccaccagccgggtactcaaggaattcgccaccttcgaccgccgcggcgtcaccagcctggaatggggcggctacccgatcctcggcttccccgaactgccggagatcgacgtgctgctgctcgaccgccccgagcagccaccgatgggcgctggcgagtcagcctcggtgcccagcgccgcggccatcgccaatgcgatcttcgacgctaccggagcgcgcctgcgacaggtgccgttcactccggaacgcgtactcgcggcgctgcgcagcgcgcaggcctga

SEQ ID NO: 353195 - DNA, 492 bp, Pseudomonas aeruginosa
atgagcgatgcccttgccctgaccgtcaacggtcagtccctgcgcctcgatgtcgcccccgatacccccctgctctatgtcctgcgcaacgacctgcaactgaacggtcccaagttcggctgcggcctcggcgagtgcggcgcctgcaccgtgctgatggatggcgtcgccacccgctcctgcatcaccccggtggaggctgccgtgggccgccaggtggttaccctcgaaggactcggcgatgccgcccatccccatccgctgcaacaggccttcatcgacgaacaggccgcccaatgcggctactgcatcaacggcatggtgatgaccgccaaggcgttgctggatcgcaacccgaaccccagcgacggcgagatccgccaggaattggcctacaacctgtgtcgctgcggcacccatgtggagattctcaaggccgtgcggcgtgccgccgagagcctgaaggagcgtcaggaggagcacccggcatga

SEQ ID NO: 353196 - DNA, 423 bp, Pseudomonas aeruginosa
atgtcccgtaccgccccgtaccgcctcgacgaccagatcggcttcatcctgcgccaggccaaccagcgctatgcagcgttgttcgccaatggcatcggcaacggcctgacacccacccagtgggccgccctggtccgcctcggcgagaccggaccctgcccgcagaaccagctcggccggctcaccgccatggacgccgcgaccatcaagggcgtcgtcgagcgcctggacaaacggggactgatccagcgcagcgccgatccggacgacggccggcgcctgctggtcagcctcagtcctgccggacgcgccgaactcgaggccggcctggcggccgcccgcgagatcaaccggcaggccttggctcccctctccccgcaagaacaggaaaccctgcgcgggttgctcgctcgcctgatctga

SEQ ID NO: 353197 - DNA, 825 bp, Pseudomonas aeruginosa
ttgctcggcctgctgacctggcatgccggggctggcgaacggctgatctatccgcgccattccgaagggcgcaaccccgaaccctacgtcgtcgagctgctgcaactggcgctggccaggagcggcggcgactaccgcctggagcccagcgcgcagcccatgccgcagtcccgtgcgcaactgcgcctggagcaggacgatccgggcctgcaggtgatgtgggcgcagtcccgcgacgacctggaagagaccctgctgccgatccgcattccgatctatcgcggcctgatcggctggcgcattcccctggtcagcgccgccaacaaggatctcctggcctcggtgcggaccctcgacgatctccgccgcctgcgcttcggccagcgccaggactgggccgacacaccgatcctgcgcgccaacggcctggaggtgaagaccagccagaactacgagagcctgttccgcatgctcgatgccggccgcttcgaggtcttcccccgcgaggtcgtagtgatcgacggagaactggaggacgcctcccgcgccgggctgcacctggcgatcgaccagcacctggccctgcactaccccgcggccttctatttcttcgtttcgcgtcaacgcccggaactggccgaggccattcgccagggcctggagaaggcgattgccgacggtagcttcgaacggctgttcgagcgacatttcaagacgcggctggaaaagcttgcccttcggcagcggagaataatcgagctgaaaaacccctatcttccaggaaaaactccttttcagcgcgaggcactctggtaccggccgtga

SEQ ID NO: 353198 - DNA, 1035 bp, Pseudomonas aeruginosa
atggctggcccccgtacgcgtgccctgttttcgacattgttcgtcctgtccctggtgacatccttgacccatgccagggattatcgctacagcgacgctcacgtgcactatgtggatttcttccaggaaagcgaaggcatgccgcgcctgctggaggcgatggacaaaggccgggtcgaccatgtgatgctcagcggcgtcgcggtcgccaagaaatggcacgaggacgagccgaagcggccgcgctactacgctggcgacgatgccggagcctattggtacagcgccaccgacgtgatcgtggcggcggcggtgaaatccctgccagccgagcagcggcggcgcgtgcatccgttcctgaccggtttcaacccgaccgacaagaacgccgacgcgcacatccgtcgcatgctggagctggacccaggactctggcagggcatcggcgagatctttacccggcacgacgacctcaccgcgctgacctacggcgacgtgccgagggccaacaatgaggcgctggcgcgggtctatcacctggccgccgaattcgacctgccggtgttgctgcacgccaacgtcacttccaagcgcgaacgcaacccgctgtacctggcggaaatcgaggagcccctgcgcaatcacccgcatgtgcggttcatctgggcccatgccgggaccagcatggagatccatcgccaccagaagaaactggacttcctcctgccgacccttgggcgtctgctgcagcgctacccgaacctctacatcgacctgtcctggtcggtgttgcgcccgtacctgctggacgagcagggcaagcccgacccgcagtggctggcactggtcgagcggtttccgcaacgcttcatgctcggttccgatgtggtcggccagttcgacagcctgcccgagttgatggccagcttcgatccgttcctcgacgccttgcccgagcaggtcgctcgccaggtggcgcgggacaacttcctcgcagtgctgccgcgccagcccgccgatccgcgaggcgaataa

SEQ ID NO: 353199 - DNA, 477 bp, Pseudomonas aeruginosa
atgtccttcatccgttcttgcatcagtcgttccgtcttcctgctcggcgccggcgtcgccgtggcggcgcaggccgaggtgcgtattgacggccccatcgaatatggcgtgttcgaaagccgctaccaggatttccagcccggagaacgggtattgacccgtagcgagcagaacatccagcagactaccgaagtcccggccaagctcggcaccaagttcggcatgcgttatcaactcagcggcaagcaggaaggcgatacgcctttgacgctgctctacctcaccccgggcgtggtcactccggatggccagcggcatgacaagttcgaagtggtgcagaagctggtgccgggcgcgccgaccgatgtcatggcctacgaattcaccgagccgcatgaagtggtgaagggcgaatggcggttgatggtgttccagggcgatcgcctgctggcggagaaatccttcgacgtgcgctga

SEQ ID NO: 353200 - DNA, 441 bp, Pseudomonas aeruginosa
atggtcaagcgcaccagccacaagcaagccagttgtccagtcgcccgcccgctggacgtgatcggcgacggctggtcgatgctcatcgtgcgcgatgccttcgaaggactgacgcgcttcggcgaattccagaagagcctcggcctggccaagaacatcctggcggcgcgcctgcgcaacctggtggagcacggcgtgatggtggcggtcccggccgaaagcggcagtcaccaggaataccgcctgactgacaagggacgcgcgctcttccccctgctggtggcgattcggcagtggggcgaggactatttcttcgccccggacgaatcccatgtccgcctggtcgaacgcgacagcggccagccggtgccgcgcctgcaggtacgcgccggcgacggcagtccgctcgccgcggaagatacccgggtcagcagggactga

SEQ ID NO: 353201 - DNA, 1218 bp, Pseudomonas aeruginosa
atgcgtcgcgtcgttatcaccggtctgggcatcgtttcctgcctcggcaatgacaaagacaccgtttccgccaacctccgtgcgggtcggcccggcattcgcttcaatccgtcctacgccgagatgggcctgcgcagccacgtttccggttcggtcgacctgaacctcgaagagctgatcgatcgcaaggtcttccgcttcatgggcgatgccgccgcttacgcctacctggcgatggagcaggcgatcaaggactccggcctgactccggaacagatttccaacccccgcaccggcctgatcgccggctccggcggcgcttccaccctgaaccagatggaagccatcgacaccctgcgcgagaaaggcgtcaaacgcatcggcccataccgcgtgacccgcaccatgggcagcaccgtatcggcctgcctggccacgccgttccagatcaagggcgtcaactactcgatctcctccgcctgcgccaccagcgcgcattgcatcggccaggccatggaacaaatccagctgggcaagcaggacgtggtcttcgccggcggcggcgaagaggaacactggagccagagctgcctgttcgacgccatgggcgccctctccacccagtacaacgagacgccggaaaaggcctcccgcgcctacgacgccaagcgtgacggcttcgtcatcgccggcggcggcggcatggtggtggtcgaggagctggagcatgcgctcaagcgcggcgccaagatctacgccgagatcgtcggctacggcgccacctccgacggctacgacatggtcgccccgagcggcgaaggcgcgatccgctgcatgcagcaagcgctggccaccgtcgacgcgccgatcgactacctgaacacccacggcacctccaccccggtcggcgacgtcgccgagatccgaggcgtgcgcgaagtgttcggcgacaaggcgccggccatcagctcgacgaagagcctgtccggccactcgctgggcgccgccggcgtacacgaggcgatctattgcctgctgatgatggaaggcggcttcatcgccggctccgccaacatcgacgaactcgacccggaagtggccgacctgccgattctccgcgagacccgcgagaacgccaagctcgataccgtcatgagcaacagcttcggcttcggcggcaccaacgccaccctggtcctcaagcgctggcagggttga

SEQ ID NO: 353202 - DNA, 516 bp, Pseudomonas aeruginosa
atgaccaaacaacacgccttcacccgagaagacctgctgcgctgcagtcgcggcgagctgttcggcccgggtaacgcgcaacttcccgcccccaacatgctgatgatcgatcgcatcgttcacatcagcgatgtcggcggcaagtatggcaagggcgagctggtcgccgagctggatatcaacccggacctgtggttcttcgcctgtcacttcgaaggcgatccggtcatgcccggttgcctgggcctggatgccatgtggcagttggtcggtttctacctcggctggcagggcaaccccggccgcggccgcgccctgggttcgggcgaagtgaagttcttcggtcaggttctgccgacagcgaagaaggtcacgtataacattcatatcaagcgcacgatcaatcgttcgctggtcctggccatcgccgacggcaccgtcagcgtcgatggccgcgaaatctacagtgccgaaggcctccgcgtcggcctgttcacctccactgacagcttctaa

SEQ ID NO: 353203 - DNA, 1956 bp, Pseudomonas aeruginosa
atgagccagcgccacggctgggacatccgtacccgcatgctggcgatcagcctgggcccggcgctgctgctgaccctgttgctcaccgcctacttcacctactcgcgcctgcaggacctgcgccaggaactgacccataccggccagttgatcgccgaccagttggcgccggccgccgaatacggcgtgatcgccggcaacacgcccgtgctgcagaagctgctgcaggccaccctcgacaccccgcatgtgcgcttcatcgaggtacgcgaccgcaacgacaatatcctggtgtacgtcgaacagttgtccggcgcgttgcagaacgccgcgccgatcgacatcttccactccaccatccagcgccagcgcatcgccctggccagcgacccgctgctggacggcgccagcgaaggcgacggccagtccggcgaggactacctcggccgggtggtggtcggcatgtccaacgacgccttcagccagcggcaacaggaaatcctcctgaaggccgccctgctggccgccttcgccctgatcctcaccttcctcgtcgcgcgccgcctggcgcagcgcctgtcggcgccgatcagcaccatgggccaggcggtcgaggcgatccagagcggcgactacaagaccagcctgccgatcctcgacgacggcgagatcggcgacctggcccgtcacatcaacaatctcgccagcgggctggaccgcgcgagccgggaacaggaacaggcgatcggccaattgatcagcgcccgcgaggaagcggagcaggcgaaccgggcgaagtccgacttcctggcgatgatgagccacgagcttcgcaccccgatgaacggcgtgctgggcatgctgcaactgctggaaaccaccgagcagacccgcgaacaggccgagtacacggcgctggccaccgagtccaccgaacacctgctgaaggtcatcaacgacattctcgatttctcaaggatcgaacgcggcgcgctggaactggagtgcattcccttcaacctgctggaactggtgcaaggctccgccctggtgttccagcacagcgcccagcaacgcggactggcgctggaattgcagatccaggccggcctggagaatatcgaggtctgcggcgatccgacgcgtatccgacagatcctggtgaatctgctgggtaatgcgctgaaattcaccgaggaaggcgccatccatctcagcctggagtggcaggcgctcgatcacgacgtactgtggctgacctgcgcggtgcacgacagcggcatcggcatctcgccggaacgcctggaacatatgttcgacgccttccagcaggcggattcgtcgatttcccggcgctacggcggcaccgggctcggcctggcgatcgccaggaccctggcggaacggatgggcggcaccctgcaggcagagagcaaggaaggctcgggatcgaccttcaccctggagattccgctgcccttccagcagtcgccggcgcaccggcagcaggccgctggcgacgccgccccgattgccgccggtcaggaaatcctcctggtcgaggacaatccggtgaaccagacagtcatagaagccatgttgcgcagcctcggctatcgcgtcaccctggtcgccgacggtatccaggcggtacgcagcgccgagcgccagcgctacgacgcgatcctgatggactgccgcctgccggtgctcgacggctactcggcgacacgggaaatcagggcccaggagaacggccggcgggtaccgatcatcgccctgaccgccaacgccctgcagggcgatcgggagaactgcctgcaggcgggaatgaacgattacctggccaagccattcaaacgggcggaattgcaacgcatactgcaacgctggatcggctcgcagccggaactccccgtgacgtcgaacgaaaccggacgaggggagccggaatga

SEQ ID NO: 353204 - DNA, 930 bp, Pseudomonas aeruginosa
atgcgtcgcttgcgccccgcccgtcgggctttccaggcgctgctcgcgctcgtcgtctgctgtctcgcgcatgtcggcgaggccgcgcaactggtcctggtcagcgccaaccagggggccgcggtgaacgcctttcgcgacgccctgtcgcagcgacggccgcaggaccaggtggaactgcgcacgcccgcggccctggcggaggggatggtcttcaacgacgacacccgcctgctcctgctcggccccgaggccctggcctggcgcctgcgccagcaccgggcgccaccgaccctggcgctgctgctcaaccgggtcgatggccagcgcctgctgccaggcgccaacgggcatggcggacacggcgtcggagggctctgcgtactctggagcgacccgccggcggcccgccagctccgcctggcgcgcctgatcctgccgggcatccagcgcatcggcgtgctctacggcaaggacagcgaattcctcctcgacgagcttcgtcgcgaggcccgcagccaggggctcgagctattcgtcgccagcagcagcggcaacgacgacccgcgcccgctgcagttcctgctcggcaatagtgacctgctgctcggcatcgacgacaaacagctgtacaactcgcagagcatcaagagcctgctgctcggcagctacgccaagaaccgcgcgctgctcggacccaccgctgccttcgtcaaggccggcagcctggcgagcagctacagcgaccaggaggactggctggacaccctcgacgaactgctcggccaggcgcccaggcactggcccctcagcctctatccagggcatttcaaggtgctcggcaatcggcaggtagcccgttccctgggtatcgacctggccagcgacgccgacctcggccggcgcctcgccgaaggagaagaaccatga

SEQ ID NO: 353205 - DNA, 2109 bp, Pseudomonas aeruginosa
gtgcccatcgcttcgcgtgctcccgtctccctgaccctgctggccctgctgttcggcagcaagctcgcggccgccgacctgttcaacgatcccagcggcgttcccgaagtattgaccgcgacacgcctgaaacaatccccggcggaagttcccggcagcatcagcgtgctcgaccgcgagctgatcgtcgccagcggcgcccgcgacattcccgaactgatgcgcctggtcccgggcatgatggtcggctacctgtccggcaaccagcccacggtcaactaccacggcaccagcatgtcgggggcgcggcgcctgcaagtactgatcgacggtcgctcggtgtaccgcccgggcctcgccagcgtcgactggagcgacctgccgctggccctcgaggatgtcgagcggatcgaagtgttccgcggtccgaataccgtcagctacggcgccaacgcattgatgggggtgatcaacatcatcacccgggcccccggggagtcgcccggcacgcgcctgaaatacaccgcaggccagcgcggcatccgcgactggtacaccagccagagcatcgccctggaagacagcgacttccgcctgtcgctgtccggccaggaagacgacggcttcgaccacgacctcgacggtcacgccctgcgcgacggccgccggctcagccgcttcaacctcaacgccagccacagcctggcgccgaaccagagcctggagtggcaactggcggccaaggaaggctcgaaccagcacccctacgcctaccgctcgccgtttccccaggttcccgacgacgtcgacaactccgatacgctcgcccacgactatgccggttcgctgcgctggaacgtcgacctcgacccacgccacagcttctatatacaaggctacgcgcagcactgggagcgccggcaggaatggaacgcctgcgaggcgggcatcgccttcagcccgcaactggcgcaactctgggaactgaacccggactacctgcgcaggttcgccgacgaccctacccggctgccgcccggcagcccccaggagctgcaactggcgacccaggtcctcgaccagctacgcaacggcggactgcgcccggtctgcggacgggtcgaccgcaacatccgggaaagccgctacgacctggagatgcaggacaccctcagcctgggcgacaacctgcgcctgctgaacggcctgagctaccgctacgaccaggcaaactccgagaccttctacggcggcagggtcagcagccagatctggcggctgttcagccagttggagtggcatgccggcgaacactggctgctgcagggcggcgggatgctcgaagacgtcgagggctccggcagctcgttcagcccgcggctggcggtgaactacctgttcaacccccagcacagtctgcgcgcggtctattcggaggcggtgcggtcgccgggcatgtacgaaaacgacgtcgactggcgctaccgggtccgccacctgacaccggcgccctacgggcagagcgaagcctactacttcgccagcgcccacggccccggcgacctgggcaaggaacacacccgttcgcgcgagatcggctacaacggttttttccgcgagaccgggctggccgtggatgtacgcctgttccacgaggaaatcaccggactgatcagcgatccgctcagcgtcgtcgacttcagtccggacaatggcgatcgcatccgcttctccggcgcggaaggccagctcgactggcgcctgggcctgcgcgaccgcctgcgcgccacctacgcctatctcgactacgacgccaccagtcgctacgaccggcgcctgaccgcccgccacggcggctcggccggctggatgcgcgactggggccaaggctggtccagcgccctcttctattacggcgacgattcgctcaatggacatcgtttcgaacgcgtcgacctgcgcctggccaagcgcattcccctgggcaaggccgccctggaattggccggcgtgctccaacagcgtctcgacgaccaaccgctgacttttcccgacaaccgctacgacagccgccacctgctctacttcagcgccgaggtgacattctag

SEQ ID NO: 353206 - DNA, 1023 bp, Pseudomonas aeruginosa
atgacagagcagcaaccgattgccgtgctcggcggcggcagtttcggcaccgccatcgccaacctgctggccgagaacggccaggcggtccgccagtggatgcgcgacccggaacaggccgaggcgatccgcacacgacgcgagaacccgcgctacctgaaaggggtcaaggtgcatcccggagtcgagccggtcaccgacctggagcgcaccctggccgattgccaactgatcttcgtcgccttgccctccagcgccctgcgcaaggtgctgcaaccacaccaggcggcattgacggacaagctgctggtgagcctgaccaagggcatcgaggcgcacaccttcaagctgatgagtgagatcctcgaggaaatcgccccgcaagcccgcatcggggtgatttccggcccgaacctggcgcgcgagatcgcagagcacgagctgaccgccacggtggtcgccagcgaggacgacgagctgtgcgcccgcgtccaggcggccctgcacggccgcaccttccgcgtctacgccagccgcgaccgcttcggcgtggaactcggcggtgcgctgaagaacgtctacgcgatcatggccggcctggccgcggcgatggacatgggcgagaacacccgcagcatgctgattacccgggcgctggcggaaatgacccggttcgccgtcaagctcggtgccaacccgatgacctttctcggcctcgccggcgtcggcgacctgatcgtcacctgttcctcgccgaagagccgcaactaccaggtcggccacgccctcggcgaggggctcagcctggaggaggcggtatcgcgcatgggcgagaccgcggagggtgtgaacactctcaaggtactcaaggaaaagtccgacgagatgcaggtgtacatgccgctggtcgccggtctccatgcgatcctcttcgaaggccgcaccctggcgcaggtcatccagctgctgatgcgcggcgagccgaagaccgacgtcgatttcattcccaccaccggcttctga

SEQ ID NO: 353207 - DNA, 465 bp, Pseudomonas aeruginosa
gtgaagctctggctgttgcgccacggcgaggccgagccgcacgccagccgggactccgagcggcgcctgaccgcccatggacgcaaggaagtgctgcagagcgccgcgcggctggccgggttgccgctggacgggattctcgccagcccctacgtgcgcgcccagcagaccgccgagctggtgcgcgaggcactgggcctggtcgagccggtcggcaccgcgccctggttgacccccgacgacgatccgcgcgaggtgctcggtttcctcgacgagcgcagcgagcgcaatctcctgctggtcagccaccagcccctggtcggagcgctgggcggtctgctggtgcatggcaaccggcgtgatccgttgccgatgagcactgcctcgctggccgagctggaaggcgacttcgccgccgccgggctgatgaccctggtctcgctgcatcacccgcggcacggctag

SEQ ID NO: 353208 - DNA, 1668 bp, Pseudomonas aeruginosa
gtggtcactgcaaatcgtctgccgctcgaagtcttcttcgagcgcgaaaagcgtcatccgcaacggcgttacctggtgcagcccatcggtggcggccgggtcgaggagctgagctggggcgaggtgggcgaccaggcgcggcgtgcagccgcctggttgcgcagcctggatctccccgccggcagccgtatcgcgatcatctcgaagaactgtgcgcactggatcgtcactgacctggcgatctggatggccgggcacgtttccgtccccctctatcccaatctcaccgccgagtcggcgcgccaggtgctggagcattccgagtcggcggtggtcttcgtcggcaagctcgacgattggccggcgatggcgcccggagtccccgagggcataccgaccgtggccatgccgttgcacccggaagggcgtttcgaccgccagtggagcgacctgcaggcctgcgcgccgctcgaaggcgacacgccgaccgccgccgagcaactcgccaccctgatctacacctccggaaccaccggcgtgcccaagggggtgatgcacaacttcagcagtttcgccttcgccgccagccgcggcgtggaactgttcggcactcgcgaagacgaccggatgctctcgtacctgccgctgtgccacgtggcggagcggatgttcgtcgagatggggtcgctctacgggggaaccacggtgttcttcgccgaaagcctggacaccttcgtcgaggacatgaagcgtgcgcggccgaccctgctgttcggcgtgccgcgcatctggaccaagttccagatgggggtgtattcgaagatgccggcgcagaagctcgaccgcctgctgaagctgccgatcctcggccgcatcgtcggtcgcaaggtgctcgccgggctaggcctggacgcggtgcgctacgcgctctgtggcgcggcgccggtacccgaggcgctgctgctctggtatcgccgcctgggcctggacgtgctcgaggtctacgggatgaccgagaacagcggctactcccacgtctgccggcccggccggcagaagaccggctggatcggccagaacagccccggcgtcgaggtacgcatcagcgacgagggcgaggtgcaggtgcgtagcggcgcgaccatggtcggctactacaaggagccggagaagaccgccgaggtgctcaccgccgacggtttcctgcgcaccggcgacaagggcgagcaggacgccgacggcaacctgcgcctgaccgggcggatgaaggaaatcttcaagaccagcaagggcaagtacgtggcgccggcgccgatcgagaaccgcctggcggtgcacgatcgcatcgagcaggtctgcgtggtcggcgagggcctcagcgcgccgctggggctctgcgtgctctccgaggtcggtcgccgggaggccctcaacggtacccgcggggcgctggaaagcagcctgcgggcgcacctggaacaggtcaacggtgcgctcgacaagcacgagcgcctggtcggcctggtcctggtgcaggaaacctgggcggtggacaacggtttcctcacgccgaccttgaagatcaagcgcaatatggtggaaggtgcctatggctcgcgcttccacgaatgggtggaacgccgcgaggccgtgctctggcacgaatga

SEQ ID NO: 353209 - DNA, 438 bp, Pseudomonas aeruginosa
atgagcctctggcgacaaacgcccgacctggagcaactgaacgcctcgcagaagaacagcatcggcgacctgcttggcatccgcttcgaagcctgcgacgacgagtcgctgaccgccagcatgccggtcgactcgcgtacccaccagccgttcggcctgctgcatggcggcgcctcggtggtcctcgcggaaagcctgggctcgatggccagctacctgtgcgtcgacaccagccagtactactgcgtcggcctggaagtgaacgccaaccacctgcgcggcctgcgcagcggccgggtcaccgcggtggccagggcgatccacctggggcgtaccacccatgtctgggacattcgcctcagtggcgacgacggcaagccgagctgcatcgcccgcctgaccatggcggtggtgccgctggcgggcagggcgggctga

SEQ ID NO: 353210 - DNA, 813 bp, Pseudomonas aeruginosa
atgtcgcaatcggttttcttcgcccacgccaacggcttcccgtcggctacctacgccaagctgttcgaggcgttggcgccggagtaccgggtggatcacctggaaatgcacgggcacgacccgcgtttcccggtgaacgacaactgggacaacctggtggacgaactgctgcaccatctcgccagcctggaacagccggtctggggcgtcggccattccctcggtggcgtgctgcactaccacgcggcgctgcgccggccggaactctaccgcggcgtggtgatgctcgattcgccggtgctgaccctcgccgaccgcctggtgatccgtgccgccaagcgcttcggcttcatcgaccggatcactccggccgggcgcaccctggggcgtcgcgaggcgttccccgacctggaagaggcgcgggcctacttctccggcaaggcgctgttccgccgtttcgaccccgactgcctggaggcctacgtacgccatgggctggccgacagcggcggcggttccggcctgcgcctgcgcttcgatccggccaccgagatcagcatctaccgcagcgtgccgcacagcagtccggggcgtgcgcggcagttgcaggtgccgctggcgatggtgcgcgggcggcacagcaaggtggtgttgccgcaccacacccggctgatccgggcgatgccgcgcggcgagttcatgtcgctgcccggcggccacatgttcccgctggagcgcccgcgagaaaccgccgaactgctgaaaggcgtgttcgatcgctggtcgcgggcgaccgaggagcgttcggcatga

SEQ ID NO: 353211 - DNA, 861 bp, Pseudomonas aeruginosa
atgagcctgcaggtcgaggaagtacgcatcagcctgccgcacatcgaactggccgcgcatctgttcggtccgccggacggcaagccggtgatcgccctgcatggctggctggacaacgccatgagcttctcgcgcctggcgccgaagctcgccgggctgcgtatcgtcgcccttgacttcgccggccacgggcattccgcgcatcgtgccgagggtgccagctacctgctctgggactacgcgctggacgtgctgatggtggccgagcaactgggctgggggcggttttccctgttggggcactcgatgggcgccatcgtctcggtgctgctcgccggggccttgcccgagcgcatcgagcggctggcgttgatcgatggcctgattccctacactggcgaagccgacaaggcgccgcagaagctcggcgaagcgctgaaggcgcaactggcgctacgccacaagcgcaagccggtctatgccgagctggaaaaagccgtggaagcgcggatgcgcggggtcggcgagatctcccgggaggccgccgaactgctcgcccagcgcggcctggaaccggtgcccggcggctatacctggcgcaccgacgcgcgcctgaccctaccgtcgccgctgcgcctgacccaggcccacgcgctgaacttcgtgcgcagcgtggagtgcccggtcagcctggtactggccgagcagggcatgctggcggtggagccgcgcatgcgggcgctgctggagaccctgccgttcgagcggcaccacctgccgggcgggcatcacctgcatctggacgacgaggccggggcgcaggcggtggccagggtcttcgcggccttcttcgcgcgctga

SEQ ID NO: 353212 - DNA, 663 bp, Pseudomonas aeruginosa
atgatcgatctctacaccgccgccacgccgaacggccacaaggtttccatcgccctcgaggaaatgggcctgccctacagggtgcacgcgctgtcgttcgacaagaaggagcagaaggctccggaattcctcaggatcaatcccaacggccgcatcccggccatcgtcgaccgcgacaacgacgacttcgccgtcttcgagtcgggcgcgatcctcatctacctcgccgagaagaccgggcaactgatgcccgccgacgtcaagggtcgctcgcgggtgatccagtggctgatgttccagatgggcggggtcggcccgatgcaggggcaggccaacgtgttcttccgttatttcccggagaagttgcagggcgccatcgaccgctaccagcatgagacccggcgcctctacgaagttctcgacggtcgcctgggcgaggccgagtacctcgccggcgactacagcattgccgacatcgccacctatccctgggtgcgcatccacgactggtccggtgtcgccgtcgacgggctggacaacctgcagcgctggatcgccgccatcgaggcgcgtcccgcggtgcagcgcggactgctggtgccgcggcgggagaaggagggcgacgacgccatccgtaccgcccagtcgatgctgacccgttga

SEQ ID NO: 353213 - DNA, 807 bp, Pseudomonas aeruginosa
atgcgagggttcctgttgctatccctgggcgttttcagcttttcggcgctggccgccgaccttcccggcagctatgacctggacgtcctgccgcgcttcccgcgcgccgagatcgtcgacttccgccaggcgccgagcgaggagcggatctacccgctaggggcgatcagccgcatcagcggtcgcctgcgcatggagggcgaggtgcgcgccgaaggcgagctgaccgcgctgacctaccgcttgccgcccgagcacagcagccaggaggcgttcgccgcggcgcgcactgcgctgctcaaggccgacgccacgccgttgttctggtgcgagcggcgcgactgcggctccagcagcctgctggccaacgccgtgttcggcaatgccaagctgtacggcccggacgagcagcaggcctacctgctggtgcgcctggcggcgccacaggagaacagcctggtggcggtctactcgatcacccgcggcaatcgccgcgcctacctgcaggccgaggaactcaaggccgatgcgccgctgggggaactgctgccgagcccggcgaccctgctgcgcctgctcaaggccaacggcgaactgaccctcagccatgtgccggcggagccggccggctcctggctggagttgctggtgcggaccctgcgcctggataccggggtgcgggtcgagctgtccggcaagcacgcccaggagtggcgcgacgccctgcgcgggcagggcgtgctgaacagccgcatggagctgggccagtcggaggtcgagggcctgcacctcaactggctgcgttga

SEQ ID NO: 353214 - DNA, 1068 bp, Pseudomonas aeruginosa
atgttcgataacgatcggctgttgcttcgcgtgctgttgttcggcctgctcggtgccagtctctgggtgctggcgccattctggtcggcgctgttctgggccgcggtgctggctttcgccagttggccgctgatgcgtatgctcacgcgcctgctcggtggccgcgagtcgctggcggcgggcctgctgaccctgggctggatcgtcctggtggcgttgccgctgatctggctcggcttcggcctggcggacaacgttcgttcgctgatggagctattgaagaatctccaggtcgagggcctgccgccgccgccttcgtggatggccggcgttccgctgatcggcgaccgcctgatcggctggtggaactccatcgaccaacagggcgtggcgttcttctacgtgctcaagccctatgtcggcgaggtcggcaactggctgctggcgcgcagcgcgaagatcggtggagggatcctggaactggtcctcagtctgatcctgatcttcttcttctaccgcgacgggccgcgcctggagtccatcgtccaccgtgccctggaacgcctgatcggcaaccgcgcggagcactatcgcgaccttgtcgccggcaccgtacagcgggtggtcaacggggtgatcggcaccgccgcggcgcaagccctgctggcctggatcggcttcacgatcgccggcgtaccgggagccatgctgctcggcctgctgaccttcgcctgcagcctgctgatggtcccgccgctggtctggggcccggccaccgcctggctgttcttcaagggcgactatggccacggggtgttcctcggcctgtggggcttcttcatcatcagcggggtggacaacatcctcaaaccctacctgatcagccgtggcggcaacctgccgctggtggtggtgctgctcggggtgttcggcggcctgctggcgttcggcttcatgggcctgttcctcggcccgatcctgctggcagtggcctacaacctgctcagcgactggatcgccagcacgccgcggacgccgcccggcgaagggcgcggcccggatgcctga

SEQ ID NO: 353215 - DNA, 1275 bp, Pseudomonas aeruginosa
atgactcacgccttgaatgcccggccgggagcgcaccccggccatcctccggaagaactgctgatcgatgccgaagtcgacgacgaaccagccccgccggcgccgccgctacgcccctggctgctcctgctgggcctggtgctggtggcgctgaacctgcgcccggcgctgtccagcctcgcccccctgctcaaccaggtacgcgacgataccggcctctcggccgccgccgccggcctgctgaccaccgcgccggtactctgcctggggttgttcgcgccgctcgcgccgcgcctggcccggcgtatcggcgccgaacgcagcgtgctgctgatcctcttctgcctggccggcggcatcgtcctgcgcagcctgttcccggtgttcggcctgttcgccggcagcgttctggccggcgccagcatcggcatcatcggcgtgctcctgccgggcatcgtcaaacgcgacttcccgcgccaggccggggtgatgaccggggtctacaccatggccctgtgcctgggggccgcgctcgccgccggcgccaccgcgccgctggagaagctcttcggcaactgggaactggcgctggcgttctggtcgctgccggcgatcctcgccgccgccttctggctgccgcagacccgccagggccagcacgcccatcgccaggccttccgtgtcgtcggtctgtggcgcgacccgctggcctggcaggtcacgctgtacatgggcctgcaatcgtccctggcctacatcgtcttcggttggctgccgtcgatcctgatcgaccgcggcatgactgcggtggaagccggcctggtgctgtccggctcggtgatgctgcaactgatcaccgccctgctcgcgccctggctcgccgctcgcgccagggaccagcgcctggcggtggtgctggtgatggctaccaccctcgccggcctgctcggcttcctctatgcgccgctgccgaccatctggggctgggcggtcctgctcggcctcggccagggcggcaccttcagcatcgccctggcgctgatcgtcctgcgctcgcgcgacgcccacgtcgcctcgcatctgtcgggcatggcccagggcgtcggctacaccctggcggccatggggccgttcatggtcggcgtggtccacgacctgaccggcggctggaacgcggtcggctatatcttcatcggcgtcgccatcgccgccaccctgttcggcctcggcgccgggcgcagccagtacgtggcggcccgcagcgaacacctgtag

SEQ ID NO: 353216 - DNA, 648 bp, Pseudomonas aeruginosa
gtgaccattcccctcaagcgctccctggtggacatcgccctggagcagatccgccagcgcatcgacgccggccattggccgctcggccagcgcctgccgccggagccggaactcgccgagctgctcggcatgagccgcaacaccgtgcgcgaagcggtgcgcgtgctgacattctccggcgtgctggaagtccgccagggcgacggcacctacgtgcgcgcctgcgccgatccgctggaaaccatgctggtgctggcgcgcagcgcggtgcagcactccctggaggcacgcgggatgatcgagatcgaggcggcgcgcctggcagccgttcgccgcgacgacagcgacctgagcgcattgcgcgagcatctcgacgcttcgcgccagcgctacggcagcgacgacctgcaggactacatcgagcacgacgtccgcttccaccaacggatggtcgatgccgcccacaatccggtgctcagcgaactctaccgctacttctcgcaggtcatccggacctcgctggaacgcaccatggccgacccacaaagggcccagccctgcttcgagctgcaccagcaactgctcgatgccatagaacgcggagacccggacgctgccgccgcggccaaccgcgcactgctgatctga

SEQ ID NO: 353217 - DNA, 1530 bp, Pseudomonas aeruginosa
atgcccgatattcgttgtatcgctgtggtcggtaccggtgcgatgggcaccgggatcgcccagatcgccgcccaggccggcctgaccgtgtggctgttcgacagccgcgccgaggccgccgcggaggcacgccagcgcctgcggcaaaccttcgagagtctatgcggcaaaggcaagctgagcgccgccgacgccgaggccgcgcaaaaccggctgcgggtggcggaacgcctggaacaactgggcgactgcgaactggtggtggaggccatcgtcgagcgcctggaggccaagcaggaattgctgcgccggctggaagccatagtcgcgccggagaccatcctcgccagcaatacctcgtcgttgtcgatcaccgccatcgccgccgcctgcgagcggccgcagcgggtcgccggctttcacttcttcaacccggtgccgctgatgcgcgtggtcgaggtagtcgacggcctggccagcgctccggaagtcggcgacgccctgctcgccctcgccgcgcgcctgggccaccgcggtgtacggaccaaggacagccccggcttcatcgtcaaccatgccggccgcgcctatggcaccgaggccctgcgcatcctcggcgaaggcgtcgccgaatgcgccgagatcgaccgtgtgctgcgcgagtgctccggcttccgcatggggccgttcgaactgctcgatcttaccggcctcgacgtgtcgcacccggtgatggaatcgatctaccagcagtactaccaggaaccgcgctaccgcccgcacccgctgacccgccagttgctcgccgccggccgtctcgggcgcaagagcggccagggcttctatcgctacgtcgacggccagccgcaggacaagcccggtccgcaaccggtgccgcaggccgccacccgaccaccggtgtggctgggctgcgaaaacgaggacgaccgccgcacgctcgccgaactgctgcatcgcctcggcgtcgagccggaaaccggcgaacgcccttccgccgcagcactctgcctgctggccgcctggggcgaggacctgagcagcgccgtgcagcgcttcgcctgtcccgccgagcgcagcgtcggcatcgacctgctctgcgacctcgagcgccggcgctgcctgatgctctcgccgctgactaccccggccatgcgcgacgccgcccacgcgctactggcttgcgacggcgccggggtcacgatgctgcgcgacagtcccggcttcgtcgtccagcgggtactggcgatgatcgtcaacctcgcctgcgacatcgcccagcagggcattgccagcgtcgaggatatcgaccaggcggtgcacctcggcctcggctatccccacggcccgctggaatggggcgaccgcctcggcccgcggcgcctgctgagcattctccagcgcctgcaggcgcttaccggtgacccgcgctaccggcccagtccctggctgcgccgacgagcgcaactgggcatgtccctgcgcgccggcgaaaccaccgccgtagactga

SEQ ID NO: 353218 - DNA, 786 bp, Pseudomonas aeruginosa
atgtccgccgatccttcgcccgtggttctgctcgaatttcccgcagccgatatcgccctgcttcgcctcaatcgtcagcaagccaggaacgcgctgaacgacgaagtgcgccagcgcctcgccagccacttccagacgctcggcgcggatccggcgatccgcgtcatcgtgctcaccggcgactcgcgctgctttgcagctggcgccgatctccgcgatctctcgacgagcacggcgatcggcctgtacggccgccacagcgagcgctactgggaagccatcgcgcgctgcccgaagccggtgatcgccgcggtcaacggcttcgccctgggcggcggctgcgaactggcgatgcattgcgacctgatcgtcgccggcgagtcggcacagttcgcccagccggagatcaaggtcggggtgatgccgggtgccggcggcacccagcgcctggtacgggcggtgggcaagttccaggcgctgcgcatgctgttcaccggctgcctggtgaaggctccgcaagcgctggccatgggcctggtcagcgaagtggtggcggacgagtcgacgctggcgcgcgccctggaactggccacggagatcgcccgcctgccccctctggcgctggcgcagatcaaggaggtggtcctggccggtgccgacctgccgctggacagtgccctggccctggaacgcaaggcgttccagttgctgttcgactcgcaggaccagaaggaaggcatgcacgccttcctggagaaacgcccgccgaactaccaggggaaatag

SEQ ID NO: 353219 - DNA, 867 bp, Pseudomonas aeruginosa
atgcgcggcaacgatgagcgccggagtccggcggaaggtgccagtacggaagcggaagtgtccgccttcgaagctgtgctgatcgacccgatgcaggagaaagacgaggaactcaaggaccgccagttcgtcaccgcgctggcccgcgggttggaattgctgcgctgtttcacaccacgggaaagcctgctgggcaaccaggaactggcgaagaagaccggcctgccgaagccgacggtgtcgcgtctgacccacaccctgacccggctgggctatctgcgtcacctgccgcatagcggcaagtaccagttggaagtgggcgtgatgtcgttcggctacgcgatgctctcgaacctgtcgattcgcgcgctcgcccgccctttgatggaagagatggccggctacgccaaggccgcggtggccatggcggcccgcgaccggctgagcatggtctacctcgacgtggtgcatggcgaggccaacctgaccatgcgtcgccaggtcggcagccacctctcgctgcaccgcagcgcgatcggtcgggcctgcctggcggcgatgccggaggacgagcgggagttcatcctcgggcacatccgcaagcgccacccggaagactggccggaagtgcgcaaggggctggagcgggccttccgcgactatgccgactacggcttctgcctgtcgctcggcgagtggcaacgcgacgtcaacgcggtgggcgtggccttgcaccacgagagccatgggctgctggcgttcaactgcggcgggccgagtttccacctcaagcgcgagaaactggaggacgacatcggcccgcgcctgctgcacatggtccacaacatcgaggccgccacccgctga

SEQ ID NO: 353220 - DNA, 1155 bp, Pseudomonas aeruginosa
atgattcgtgatccggaaaccctgaacctgctgctggacagcatccgccagttcgtccgcgaaagcctggtgcctcatgagcaggaggtggcggaaaccgaccgcatccccgaggcgatcatcgcccgcatgcgcgagatgggcctgttcggcctgtcgatcccggaggcctacggcggcctcggggtgaccatggaggaagaggtgagcatcgccttcgaactggggcggacctcgccggcgttccgttcgctgctgggcaccaacaatggcatcggctcccagggcatcgtcatcgacggcaccgaagaacagaagcggcgctacctgccgcgcctggcgtcgggcgaactgctcagttcgttctgcctcaccgaaccggactccggttccgacgccgcctcgctgaagaccacggcggtgcgtgacggccagcactacgtgctcaacggtaccaagcgcttcatcaccaacgccccgcaggccggcatctacaccgtgatggcacgcaccgacccggcgatccgtggcgccggcggaatctccgctttcgtcgtcgagcgcggtacgcccgggctgtccctgggcaagccggatcgcaagatgggacagaagggcgcgcatacctgtgacgtgatcttcgacgactgccgggtgcctgccagccagttgatcggcggggtcgagggcgtcggcttcaagaccgcgatgaaggtgctcgacaagggccgcctgcacatcgccgcggtctgcgtgggggtcgccgagcggatgctcgaggatgcgttgcgctatgccctggaacgcaagcagttcggccagccgatcgccgagttccagttgatccaggcaatgctcgccgacagcaaggccgaagcctacgcggcgcgctgcatggtcatcgacgccgcgcggcagcgcgacgaaggccgcgatgtcggtaccgaggcgtcctgcgccaagctgttcgcctcggaaatgtgcggccgcgtcgccgaccgcgcggtgcagatcttcggcggcgccggctatatcggcgactatgggatcgagcgcttctatcgcgacgtgcgactgttccgcatctacgagggcaccacgcagatccagcaactgctgatcgcccgcaacatgatccgcgccgcccagggctag

SEQ ID NO: 353221 - DNA, 1695 bp, Pseudomonas aeruginosa
atgaacagccacgagattctcttgatcctggcctttttcgccctggtcctggtgcctgcaccgttcctcgggcgctactgcttcaaggtaatggaaggccaacgcaatctcctcagcgcgccgctggcgccactggagcgcgtctgctatcgcctgttcggcgtcgatccggcgagcgagcaggactggaagacctacaccctggcgctgctggcattcaacctggccggcctggtcctgctgttctcgatcctcatgctgcagggcagcctgccgctgaacccgcagcacctgccgggcctggaatggaccctggcgttcaacaccgcggtcagtttcgtcaccaacaccaactggcaggcctacagcggcgaggcctcgctgagctacttcagccagatggtcggcctcacggtgcagaacttcgtcagcgcggcggtcggcctctgcgtgctggtggccctggcgcgcggcatcagccgccgctccacacgacagctgggcaacttctgggtcgacctgacccgcggcaccctctacgtgctgctgccgctgtgcctgctgctggcgctgctgctggtctggcagggcgtgccgcagaccttcttcgactacgtccatgccaccaccttgcaaggcgccgagcagaccatcccgctcggcccggcggccagccagatcgccatcaagcagctgggcaccaacggcggcggcttcttcggcgtcaactcggcccatccgttcgagaacccgagcgcctggagcaacctgttcgaagtggcctcgatcatcctgatcccggcggcgctggtattcaccttcggccattacgtgaaggacctgcgccagagccgcgcgatcctcggctgcatgctgctgctgttctgcctcggcctgggcctgtcgctgtgggccgaataccagccgaacccggcgctggcgcagttgccggtcgagcagggcgcaccgatggagggcaaggagagtcgcttcggcaccgccgccagcatgctctgggcgatcaccaccaccgccgcctcgaacggctcggtgaacgccatgcacgacagcctgagccccctgggcggcatgctgccgctgctgaacatgatgctcggcgaggtgatcttcggcggcgtcggcgccggcctctacggcatgctgctgttcgtcctgatcgcggtgttcctcgccggcctgatggtcgggcggacgccggagtacctgggcaagaagctcgaggcgaaggaggtccgcctgctggtcttcaccctcctggtgatgcctgtcggcgtgctggtgctcggcgccattgccgccagcctgccgggaccggcctcggcggtgaccaaccccggcccgcacggtttcagccaactgctctacgcctacacctcggggagcgccaacaacggctcggcgtttgccggtttcggtgccaacacgccgttccacaacctgatgatcggcctggccatgctcatcggccgcttcggctacatcctgccgatcctcgccatcgccggcagcctggcggcgaagaaggccagcccggtggggccgaacagtttcccgacccatggtccgctgttcgtcagcctgctcaccgtgaccatcctgctggtcggcggcctgaccttcctgccgaccctggccctcggcccgatcgctgaacaactgagcctcggcttctga

SEQ ID NO: 353222 - DNA, 2073 bp, Pseudomonas aeruginosa
atgaacgctcagacccaggcgtccaagaacgccttgcacaaatcgctcgaacgtcgccacaacgcgtccaccagcctcgccgccttgtggcggccggcgctgctgcaagccttcgtcaagctcgacccgcgccagttgctgcgctcgccggtgatgctggtggtcgaactgaccgccgtgctcaccaccttgctgtgcttcgtccccgaccaggcggtgccgacctcggtggcgctgcagatcgccctctggctgtggttcaccgtgctcttcgccaatttcgccgaagcgctcgccgaggggcgtggcaaggcccgcgcggacagtctcaaggccggcagccagggcctctccgccaataagcggcgcgccgacggcagtttcgagagcgtcgctgccagcagcctgcgcaagggcgacgtggtacgggtccaggccggcgagatgattcccggcgacggcgaagtcatcgaaggcgtggcggcggtcaacgaggccgccatcaccggcgaatcggcgccggtgatccgcgagtccggcggcgatcgctcggcggtgaccggcaacacccaggtggtgtccgactggctgctggtgcggatcggcgccaacccgggcgagtcgaccctggaccggatgatcgccctggtggaaggcgccaagcggcagaagacccccaacgaagtggcgctggacatcctgctgatcggcctgaccctgatcttcctgctggtggtggtgaccctcaagccgttcgccctgttcgccggcggcaacctgccgctggtgttcctggtggcgctgctggtgacgctgatcccgaccaccatcggcggcctgctctcggccatcggcatcgccggcatggaccgcctggtgcgcctgaacgtgatcgccaagtccggtcgcgcggtggaggcggccggcgacgtccacgtgctgctgctcgacaagaccggcaccatcaccttcggcaaccgccgctgcagcgcgctgtacgccgcgccgggggtgagcggcaaggaactggccgagggcgcgttgctggcctcgctggccgacgacacgccggaaggcaagtcgatcgtcgaatacctgcgcatcctgcatccgatcgaggagccgcgccgcgaggagctgacgccgatcgccttcagcgcggaaacccgcctgtccggggtcgactggaacggccaggtgtaccgcaagggggcggtggatgcggcgctgcgcttcatcgacctgccgcgggagaagatgcccgaggtgctttcgcgggaggtagacaagatcgcccagagcggcggcaccccgctgctggtggtagccaacggccggctgctcggcgccattcacctgaaggacgtggtcaagccgggcattcgcgagcgcttcgccgaactgcgccggctgggcatccgcactgtgatggtgaccggcgacaacccgctgaccgccgctgccatcgccgccgaggctggggtcgacgacgtgatcgccgaggctaccccggagaagaaactggcgcggattcgccaggagcagggcgaaggtcgcctggtggcgatgtgcggcgacggtgccaacgacgccccggcgctggcccaggccgacgtcggcatggccatgaacgacggcacccaggccgcccgcgaggcggccaacctggtcgacctggacagcgacccgaccaagctgctcgacgtggtccaggtgggcaaggagttgctggtcacccgcggcgcgctgaccaccttctccatcgccaacgacgtggccaagtacttcgccatcctgccggcgctgttcgtcggcatctacccgcagctcgacgtgctcaacgtgatgcgcctgcaaagcccgcagagcgcgatcctgtcggccatcgtgttcaacgcgctgatcatcgtcgcgttgatcccactggccttgcgcggcgtgcgggtgcaggcggcggacgcttcgcaactgctgcagcgcaacctgctgatctatggcgtcggcggcctggtggcgccgttcctcgggatcaaggcgatcgacctgctgctgaccgccgtcggcctggcatga

SEQ ID NO: 353223 - DNA, 552 bp, Pseudomonas aeruginosa
atgttcaagcaactccgtccggcactggcgtcactgctggtgctgagcctggtcaccggcgtggcctatccgctgctggtcaccggtatcgcccaactggcgttccccgagcaggccaatggcagcctgctgcgcgacgccgagggcaaggtgctcggctcgcggctgatcgcgcagaagttcgacggcgaggagtggttccattcgcggccttcggcgggcgactacgccaccgtttccagtgccgcgagcaacctggcgccgagcaacccggcactggccgagcgcatcgccagggacgccgcccaggagcgtatcgccgaccaggggccggtgccgctggcgctggtcactacctccggtagcggactcgatccgcagctgccgccgcaggccgcgcgttaccaggcgctgcgggtggccacggcgcgcgggctgccgctgcggctggtggaagacctggtggaaagccacaccgagcggccgctggtggggccggcggtggtcaacgtgctggcgctgaacatggcgctgacggggttgaagcgctag

SEQ ID NO: 353224 - DNA, 2658 bp, Pseudomonas aeruginosa
atgaccgacaccgcacgcgccgacgcgctgctggccgacctgcccgctgacgggcgcggccgcctgaaagtctttctcggcgcggcgccgggggtgggcaagaccttcgccatgctgcaggccgcccaggcccagttgcgccagggcgtgaaactgcgcgccggggtggtcgagacccactcgcgggcggaaaccgagtccctcctcgcaggcgtgccgcagcagccgctgcgcagcctcgagtatcgagggatgaaactgcaagaaatggacctcgacggtctcctcgccgacccgccggcgctggccctggtcgacgaactggcccacagcaacgttcccggcagccgccacgccaagcgctggcaggacatccaggagttgctggcggcgggaatcgacgtctacacaacggtcaacgtccagcacctggagagcctcaacgaccaggtccgcgacatcaccggcgtgcaggtccgcgagacggtgccggactgggtgttgcaggaggcctacgagatcgtcctcatcgacctgccgccgcgcgagctgctggagcgcctgcgcgagggcaaggtctacgtgccggaacaggcgcgggcggcgatcgatgcgttcttctcgcagaccaacctcaccgcgctgcgtgaactggcgatgcagaccgccgccgcgcgggtcgacgccgacctcaaccaccgctaccgccagcgcggcgaggaggcgccggcgttgcgcgggcggctgctggtgggcatcgacggtgacgaacaggccgaacgcctggtgcgccacgcctgccgggtcgccgaacgtcggcacctgccctggagcgtggtacacgtcgataccggcggcttgcgcggcgagcaggcgcggatgcgcctgcagggtgcgcagcaactggccgagcggctcggcggcgagatcgtcgtgctgcgcgccggcgaggtggcgcggaccctcctgcaacatgcccgcgagcgccgcgccagcctggtcctggttggccagtcgcggcgccgctggtaccgccgggccttcggcggtggtctcgccgggcgcctgctgcgcgacggccagggcctggagatcagtgccctggacagcgaggccgacctgcgcccggcggaaccgcggccacgctatccggtggtgtggaacgactatctgctggcgctgctggcgaccgccctggccagcggcctggcctgggtcgtggcgcacctgctggaactgccgaacatctccctggtgttcctgatggcggtgctgctggtggcagtgcgcagcagcctgatgccggcactgctgtgcgcggtggcgtcgttcctggcctatgacttcctgttcatcccaccgcatttttccttcgccatccatcgccatgaagacctgctgagcctggcgttcttcctgttcatggccggcctcaccggcaacctggcggcacgccagcggcgccagctggaggcgctgcgtgatacccaggaggaaaccagcctgctgctggagctgtcgcgcaagctcaccgccgccaccgaccgccaggcggtgctggccgccgccgcccagcagttcgacgactggaaggacgtcgaggtctgcctgctcggtcaggtcaatggcgagtggaagaccgaggccggcgtgcagcggcaactcgccgaccaggaacgggtcgccgccgactgggcctgggcccacgaccagccggccggcctcggtactggcacgctgcccggaggacgctggtggtggtggccgctgtcggcggaagaggggccgctggcactgctcggcgtcgcgccgctggacggccagccgctgagcccgcagcgccggcgcctgctcgccgccctcggccagcccctggcccaggccctggcgcgggctcgcctggccgaggacctggaggccgcgcgcctgcacggcgaaaccgagcaactgcgcagcgccttgctcgcctcggtgtcccacgacctgcgcacgccgctgacggccatgcgcggttccatcgacagcctgctggcgctgggcgaggcgatcccgccggcggatcgtcgcgaactgctggaaagcacccgcgacgaggccgagcgactggaccgctatatccagaacctgctcgacatgacccgtctcggccacggtggcctgaagctggcgcgcgactgggtggcgccgggcgacatcgtcggcagcgcgctgaaccgcctgcgtgcggtgctggcgccgtaccgggtgcaggcgatcgtggccaacgacctgccgttgctctacgtgcatgcggcgctgatcgaacaggcgctgatcaacgtgctggaaaatgccgcgcgcttctcgccgagccacggccggttgcgcatcgaggtcagccaggatgccgccgagctgcgtttcgcggtgagcgacgaggggccggggattcccgaggccgagcgggagaagatcttcgacatgttctacaccgctgcccgtggcgaccgcggtggccagggcaccggcctgggcctggcgatctgccagggcatgatcggcgcccacggcgggcgcatcagcgtcggcgaaggcctcgacggtcgcggcaccacgctggtcctgcacctgccgctgcatccgcagccggacctcgggcaactggagggcgacgaatga

SEQ ID NO: 353225 - DNA, 693 bp, Pseudomonas aeruginosa
atgacccaattgcagaacagcatcctgctgatcgacgacgaaccgcagatccgcaagttcctccgtatcagcctcaatgcccagggctaccgggtactcgaggccggcaccggcgaagaggggctggcccaggccgcgctgaaccggccggacctggtggtgctcgacctcggcctgccggaccgcgacggccaggacatcctccgcgacctgcgcgaatggtcgcaggtgccggtgctggtgctgtcggtgcgcgccagcgagggcgagaaggtgctggccctggacggtggcgccaacgactacgtgaccaagccgttcggcatccaggagttcctcgcccgcgtgcgcgtcctgctgcgccaggcggcgcagggcgaaagcccggaggcggcggtggcggtcggcccgttgcaggtggacttcgcctatcgccgggtcaccctggagggtgcggaagtggcgctgacgcgtaaggagtacgcggtgctcgccgcgctggcacgccatctcggacgggtagtgacccagcagcaactgctcaaggatatctggggcccgacccacgtcgaagacacccattacctgcgggtcgtggtcggccacctgcggcagaaactcggcgacgatccggccagcccgcgcttcctggtgaccgaggcgggcgtcggctatcgcctgcgcgacagctga

SEQ ID NO: 353226 - DNA, 909 bp, Pseudomonas aeruginosa
atgcagcaactgttgaacgagattctcgatgaagtccgcccgctgatcgggcgcggcaaggtcgccgactacattcccgcgctcgccggcgtcgagccgaaccaactggggatcgccgtgtacagccgcgacggcgagctgttccatgccggcgacgccctgcggccgttttccatccagagcatttccaaggtgttcagcctggtccaggcgatccagcattccggcgaggacatctggcaacgcctcggccacgagccctccggccagcctttcaactccctggtgcagctggagttcgagcgcggcaagccgcgcaatccgttcatcaatgccggcgccctggtgatctgcgacatcaaccagtcgcgtttcgccgcgccggcgcaatcgatgcgcgatttcgtccggcgcctgtgcggcaacccggaagtggtgtcggactcggtggtggcgcgctcggagtaccagcaccgctcgcgcaacgcggcggcggcctacctgatgaaatcgttcggcaacttccacaacgacgtcgaggcggtgctgctcagctatttccatcattgcgcgttgcgcatgagctgcgtcgacctggcgcgggcgttctgcttcctcgccgacaagggcttctgcaagcacagcggcgagcaggtgctcaacgagcggcagaccaagcaggtcaacgcgatcatggccaccagcgggctctacgacgaggccggcaactttgcctaccgggtcggcctgccgggcaagagcggcgtcggcggcggcatcatcgcggtggtgccggggcgcttcacggtctgcgtctggtcgccggagctgaacgccgcgggcaattcgctggcgggtatcgccgcgctggagaaactcagcgagcggatcggctggtcgatcttctga

SEQ ID NO: 353227 - DNA, 606 bp, Pseudomonas aeruginosa
atgtcccgcccgattcccgtttcccgtgtcttcgcctgcctcaccgttctcgccgcctgcgcgcacgccggcgccgccgagccggactggcgtggctataccagcgaccagcagcagcgcagcgtgctggccgtcgagcaggacgccgaggccatcaacaagcgctactacgacagtgccttcgaggaattcctgccggaactggagcaactggaactcagcctggcgcagcccgtcgtcgccgtcgacgagaaaggcctgctgggcgactggaagtgccgctcgacccaggccgaccagtacggcatctatcgctatccgaacttccagtgccgcatccggcgtaccgaccgcggcctgttcctggagaagaccagcggttcgcagcgggtcagcggctacctgttccgcgaaggcacgcagcgctacgtgttcctcggcggcgccacggtcaacgacgagccccaggtggccttcagtggcctggcccacggcgcgccggctgagtccgacgtggtcgcgctgctgcgcccgcacgccggcggcttcctcctgctgttcccggaacggcgcggcggctacgaggtcctcgagttcagccgctga

SEQ ID NO: 353228 - DNA, 1038 bp, Pseudomonas aeruginosa
atgagcaaacaggtcgccctggtattgggctccggcggtgcgcgcggctacgcgcacatcggcgtgatcgaggaactcgaggcgcgcggctatgagatcacctgcatcgccggttgttccatgggctcggtgatcggcggcatctacgccgccggcaagctgcgcgagtaccgcgagtgggtggaaagcctggattacctcgacgtgctgcgcctgctcgacgtcagcttccgcctcggcgcaatccgcggcgagcgggtgttcggcaagatccacgagatcctcggcgaggtgaacatcgaggacctgtcgatcccctacacggcggttgccaccgacctcaccaaccagcaggaaatctggttccaggaaggctgcctgcaccaggccatgcgcgcctcggcggcgatccccagcctgttcaccccggtcatgcagggcagccgcatgctggtcgacggcggcctgctcaacccgttgccgatcgtgccggtggtgtcggcccacagcgacctgatcatcgcggtcaacctcaacgccaccaaccagaagcaataccacctgccggtgatcgagcgtccggccgcgctcaaggggcgcttcgacagcatgatcgagagcctcggccacaaactctcgttcttccgccgccacggcgacgacaataccccgccggagctgagcgccgacgccctgctccatccggttccggcggaatccgaggagcccgccgagccgcaactgcaacagccggccgcggcgccgcaaggcaaggactcgccgaagtcggccagcggcaccacggtggtggaaagcagcggtccggcatcactgctggaactggtcaaccagagcttcgaggtgatgcagacctcgctggcgcagtacaagatcgccggctacccgccggacatcctgatcaacgtgccgaagcgggtctgccgcttcttcgagttctacaaggcgccggagttgatcgccctcggccggcagatcgccagcgacaccctggaccgctacgaggaagacaacgcctga

SEQ ID NO: 353229 - DNA, 279 bp, Pseudomonas aeruginosa
atgaaaacctggatcgttctgcccgtccttgccctgaccctggccggctgcgccggcaagaccgcctaccgggagaactgcgccgaccagttggacgcggcctggaaggaacttgacctggccaaggccgaaggcttcgccggcaccgtcagctactcgaaggccctgaccctgctcaccggggccaagacccagcagcagttcgaagcctacgagggctgcaccagcaaggccgagaaggcgcgcttctatatccgcgagtcgcgcgccgggcgctga

SEQ ID NO: 353230 - DNA, 1035 bp, Pseudomonas aeruginosa
atgagcgaggcgatccgcctgacccagtacagccacggcgccggctgcggctgcaagatttcgcccaaggtactggaggtgatcctcgccggcagcggcgcgcagaacctcgatccgaagctctgggtcggcaacgcctcgcgcgacgacgcggctgtctacgccctcgacgaggagcgcggggtggtctccaccaccgatttcttcatgccgatcgtcgacgaccccttcgatttcggccgtatcgccgcgaccaacgccatcagcgacatctacgccatgggtggcgacccgctgatggccatcgccatcctcggctggccggtcaacgtactggccgcggaagtcgcccgcgaggtgatcgccggcggccgcaaggtctgcgaggaagccggcatcccgctggccggcggacactccatcgacgcccccgagccgatcttcggcctggccgtgaccggcgtggtggagaagcgtttcatgaaacgcaacgacaccgccgaggccggctgcaggctgtacctgaccaagccgctgggcatcggcatcctcaccactgccgagaagaaggccaggctgcgcgccgaggacgtcggcgtggcgcgcgactggatgtgcaccctgaacaggcccggcgcgcgcttcggtcgattggccggggtcaaggcgatgaccgacgtcaccggtttcggcctgctcggccacctggtggaaatggccgacggcagcaagctcaccgcgcgcgttgagtacgccgcggtgccgcgcctggccagtgccgaatattatctggagcagggctgcgtgcccggcggcaccctgcgcaacttcgacagctatggcgagcgcatcgcgccactgccggaggtgcagaagctgttgctttgcgatccgcagaccagcggcggcctgctggtggcggtggctccggaaggcgaggcggagttcctcgccgtggcggcggaactcggcctgcaactggcgccgatcggcgaactggtcgagcgacagagtctcgcggtacaggtgctgtaa

SEQ ID NO: 353231 - DNA, 1110 bp, Pseudomonas aeruginosa
atgcgcgacaacacccagcactaccgcgagctgtttctcgacgatatccctctgatggatgtgcgcgccccggtggagtaccacaagggcgcctttcccaacacggtcaaccggccgctgatgaacgacatcgagcggcagaaggtcggcaccagctataagcagcacggccagcaggccgccatcgcccttggtcacgaactggtctgcggggcgctcaaggccgaacggctggcggcctggaaagccttcgccgaagccaacccgaacggctacctgtattgcttccgcggcggcctgcgctcgcagatcgtccagcagtggctgaagcaggacgccggcatcgactacccacgggtgatcggcggctacaaggcgttgcgcaacttccttttcgaaaccacccgagcggcggtcgacgagtgcgatttcgtgctggtcggcggcctcaccggttgcggcaagaccgaggtgatcgcggcgctggacaacagcctcgatctcgaaggccacgccaaccaccgcggctccagctttggccggcgagccacgccgcagccggcgcagatcgacttcgagaaccgcctggccatcgacatcctgaagaagcgtcatcgtggcgtcggccagttcgtcctcgaggacgaggggcggatcgtcggcagctgctccttgccgctggagctgtaccagggcatgcagggctacccgctggtctggctggaggatgccttcgagcagcgtgtcgagcgtatcctcagggactacgtgatcgatctgcgcagcgagttcgagcgcgtggtgggcgtggaggagggcttcgccgccttctccgcctacctgcagaagagcctcgccggcatcgtcaagcgcctcggcggcgagcgctaccagcggctggcggcgatcctcgtgcaggcgctggaagagcagggccgcgacggctcggtggatacccatcgcggctggatcgaggggctgctcaaggagtactacgacccgatgtacgccttccagcggcagagcaaggaagaccgcgtcgagttccgcggcaaccaggccgaggtgatcggctacctgcgccagcgtcaggcgttgcggccatcgtag

SEQ ID NO: 353232 - DNA, 348 bp, Pseudomonas aeruginosa
atgaactatcgaggaagctgccactgcggaaccatcgcctacgaagtcgaaggcgacctcgaccaggtgatccagtgcaactgttcactgtgcagccggcgcggctggctgctgtggttcgtcccgcgcgaccgtctggcgctgaagacgccggccagcgcgatgcacacctacaccttcaacacccatcgcctgcagcatcacttctgccccacctgcggctgcgcgccgttcagcgaaggcataggcccggacggccaggcgatggccgcggtcaacgcgcgctgcctggaggacatcgacgccagcgcgctcccggtacagcactacgatggccgcaacgcctga

SEQ ID NO: 353233 - DNA, 609 bp, Pseudomonas aeruginosa
atgcaactggacttcaccaccatcgctcccgccgaggcctatcgctggttggcttccaccgtcaccccgcgaccgattgcctgggtctcgaccctgtccgccgagggcgccagcaacctggccccgttcagcttcttccaggtgatcagcgacgagccgccgaccctgatggtcaacgtcagcctgcgcgacgacggcagcctcaaggacaccctgcgcaacgtccaggccaccgggcagttggtgatccacctggtcggcgccgcccaggcagagaccatgaacgccacctccgcctggctgccccatggcgtgagcgagatcgagacggtcggcatccctaccgtgtccagcgtacgcgtggcgccgccgcggatcgccgcggcggcggtggccttcgagtgcgaggtggcggagatcaagccgtatccggcggagaaccccaattgccacctgatcttcgcccgcgtgctgctggcccatgtcgacgatgccgtgctggccgacgagcgccatgtggatagcgacaggctcgacctggtcggtcgcctgggcggcagccactacagctatacccgcgacacgttcagcatgatccggcccaggtag

SEQ ID NO: 353234 - DNA, 408 bp, Pseudomonas aeruginosa
atgcgtcccgtattgccgctgttgctgtcgctgagtctgtgcgcccccgccctggccgactggagcggcccgatcgagcagccgctctggtcgttgccggcggcgccgggcctgtcgcgctggctgatcgtgcacaacctgtcgagcgcggcggccgacggcctgtaccacgtcgaggtcctggagcgccgccagggccagcagccctggcagttccagcgcctggccgcgcacctggcgctgaccgaacaagcgctgcgcgcgagtatcgtggcgccgctgaagcgcggcggggtgtatccggaaagctaccagttcgcctatcgccagtggcaggaacgccaggccgcgggccaggcgccggtgtgccggcgcacggtcgacgagtgcctgcgggcgccggactga

SEQ ID NO: 353235 - DNA, 1959 bp, Pseudomonas aeruginosa
atgctggggttgctgcgcaggcgtctggccgatctcggcacggcgaagaaactggccatcggttttaccctggtcctgctgttgaccgcgctggtggccgcgctcgcggtgctctcgctgcatgcgctggggcagcgcttcgcgcgcctgcaggagatgagcgcgatcaatcgcgacgtgctggaggttcgccaggccgagaaggactttgccctgcacggggaaaagagtgacgccgagcgcttgcgccagcgcctggccgcgacccttgaacgggtgggccggctcaaggccgacggcgacgccgatcaggcgcttggcatggccgaggtggagcaggtgctggcggcatacctcgaagcgtttggccgcttcgagcagtccatccagggacgccagttggcttgggaaagcgccagctggtcgctgaacggcgccgccaacagcctcgatatcctccagtccagcctggccgaggatggcgcctatgcgctgaaggagagccagggacgcgacggcgaaccgctgttgcagcaggcggcccaggtcgcccaggtcaatcgcctggtcctgcaggggttggacgaggcccgctcgcgtctcgaagcgcgcgccgcggatgcgcaggaggggccgccgaaatcgctgcgcgaggcgctggagctggccgcccggctggagcaggcgatcaccgacgatgcctacgtgtcggtggtcaaggacgtgctgaccaatatccgcggtttcgccgacaagctcgccgagtatcgcgccagccagcgccaggagcggcagatgtacgccgccatgggcgagcgtgccgggcaggtgatggcgcgtgtcgaccgtagctgggaggcgcagcagcaggccatgctccacagcctgcggacaaactccctgctgatcgtcggcgccgccgtgctggcgctgctggtgggcctgggcgcggccttcggcatcagcctgctgatcgtccgtccgctgcgccaggcgatgggtgtggcgcagcggatcgccgaaggcgacctggcggtacgggtcgacagcgagcggcgcgacgaggttggccaactgatggccgcgatgcgcgccatgaccggcagcctgcgcggtatcgtcagccagttgcaggacggcgtcgggcggattgccggcgcttccgaggcgctgtccggcgttaccacgcgcacccgcctgggaatcgacagccagcgggcggaaaccgaacaggtggccacggcgatgaaccagatggccgccaccgtccacgaagtggcgcacaacgccgaggaagccgcggggtcggcggaaagcgccgacggcaaggtcagcgtcggccaggaggtggtacgccagaccctggagcggatcgagcgactggccgaggcggtgcgcgcggccaccgccagcgtcgaggcgctgagcgccgacagccagcgcatcggcagcgtgctggacgtgatcaagagcgtggccgagcagaccaacctgctggcgctgaacgccgccatcgaggcggcgcgggccggcgaccagggtcgaggcttcgccgtggtcgccgacgaggtgcgggcgctggcgcggcgcacccaacagtccacggccgagatcgagaccctgatcggtgccttgcagaatggcacgcagcaggcggtgcagcgtatgcagcgcagccaccagttggtggaccagagcgtcgacgacgcgttgcagaccgaggcggcgctgggcaacatcgctacggcggtggcgctgatccagcagatgaaccagcagatcgccgcggcctccgagcagcagagcgcggtcgccgaggagatcaaccgcagcgtcacggcgatccgcgaggtggccgatcagtcggcccaggccatgcagtcgacggcttcgtccagcgaacaactggcggagctggggcgcgaactacagggcatggtcaggcatttccgcttgtag

SEQ ID NO: 353236 - DNA, 1722 bp, Pseudomonas aeruginosa
atgccactcgcccgctgggtacccggactcgatagcctgctccactaccgccgcgcctggttccgtccggatgtccaggccgggctgtcggtggcggcgatccagatccccaccgccatcgcctacgcccagatcgccggcttcccaccccaggtaggcctctatgcatgcatcctgccgatgctgatctacgccctgatcggcagctcgcgccagttgatggtcggccccgacgcggcgaccgcggcgatggtcgccgccgccatcaccccgctggcggcgggcgacccgcagcgcctggtggacctgtcgatgatcgtcgcgatcatggtcgggctgttctccatcgtcgccggcctggcccgcgccggattcatcgccagcttcctctcgcgaccgatcctggtcggctacctcaacggcatcggcctgagcctgctggtcgggcaactgggcaagctgttcggctacgaggcggcgaccagcggcttcgtcgccggcatcctcgcgctgctggagaacctgctgcacatccattggccgacgctgatcctcggcagcctctcgctcttgctgatggtgctgctgccgcggcgcttcccgcagttgcccggggcgctctgcggcgtcctcctggccagtctcgccgcggcgctgctgggcctggatcgctacggcgtggaactgcttggcgaggtaccggccgggctgccgcaactgagctggccgcagaccagcctggaggaactgaaaagcctgctgcgcgacgccaccggcattaccgtggtcagcttctgcagcgccatgctcaccgcgcgcagcttcgccgcccgccacggctacagcatcaacgccaaccacgaattcgtcgccctcggcctggccaacatcggcgccggggtctcccagggcttcgccatcagcggcgccgactcccgcaccgcggtgaacgacatggtcggcggcaagacccaactggtcggcgtggtcgccgcgctggtgatcgccgccaccctgttgctgctgaacaagcccctgggctgggtgccgatgccggcgctcggcgcggtcctgttgctggccggctggggcctgatcgacgtgcaggcgctgaaaggcttctggaagctcagccgcttcgagttcagcctctgcctgctgaccaccgtcggcgtgctcagcgtcggcgtgctgccgggaatcttcgtcgccgtcagcatcgccgtactgcgcctgctctactacacctatcgcccaagcgacgcggtgctcggctggatgcacggcatcgacggccaggtcgagctggccaagtacccgcaggccaccactcttcccggcctggtgatctaccgcttcgacgcccccctgttgttcttcaacgccgactacttcaagcagcgggtgcttgccgtggtggacggcagcgagcggccgaatgcggtgctgctcaacgccgaagccatgaccaacctcgacatcagcggcctggccaccctccacgaggtgcaacagatcctcaaggcccagggcgtgcacctatcgctggcgcgggtgaccgggcagacgctggacctgctgcaacgctcgagcatgctcggcgagatcaagccgccgctggtgttcagctcggtgcgttcgggggtcagtgcttatcgctactggctgcgccagcaggaaagactcgccgcccaggccgcggctacaagcggaaatgcctga

SEQ ID NO: 353237 - DNA, 1005 bp, Pseudomonas aeruginosa
atgacctcccagatcaatcggcaataccagttggcccagcgtcccagcgggctgcccggccgcgacaccttcagtttcgtcgagaccccgctcggcgagccggccgagggccagatcctggtgaagaacgagtacctgtcgctggacccggcgatgcgcggctggatgaacgacgcccgctcctacatcccgccggtggggatcggcgaggtgatgcgcgcgctcggcgtcggcaaggtgctggtttcgaagcaccccggcttccagaccggcgactacgtcaacggcgccctcggcgtgcaggactatttcgtcggcgagcccaagggtttctacaaggtcgacccgtcccgcgcgccgctgccgcgctatctctcggcgctgggcatgaccggcatgaccgcctacttcgcgttgctcgacgtcggccagccgaagagcggcgagaccgtggtgatctccggcgccgccggtgcggtgggcagcgttgccgggcagatcgccaggctcaaggggtgccgggtggtgggcatcgccggcggcgccgagaaatgtcgcttcctggtcgaggagctgggcttcgacggcgccatcgactacaagaacgaagacctcgccgccggactcaagcgcgaatgcccgaagggcatcgatgtgttcttcgacaacgtcggcggcgaaatcctcgacacggtgctcacccgtatcgccttcaaggcacgcatcgtcctctgcggggcgatcagccagtacaacaacaaggaagcggtgcgcggcccggccaactacctgtcgctgctggtcaatcgggcgcgcatggaaggcatggtggtgatggactatgcccagcgcttcccagaaggcctgaaggagatggccacctggctggcggaaggcaagctgcaatcgcgcgaggacatcgtcgaaggcctggagaccttccccgagaccctgctcaagctgttcagcggggaaaacttcggcaagttggtgttgaaggtctga

SEQ ID NO: 353238 - DNA, 762 bp, Pseudomonas aeruginosa
atgagcaaacttctttccggccaggtcgcactggtcactggcggtgcggcgggcatcggccgcgctaccgcgctggccttcgccgccgccggggtcaaggtggtggtcgccgacctggacagcgccggcggcgagggcacggtcgaagcgatccgccaggcaggtggcgaagccctcttcattcgctgcgacgtcacccgtgacgccgaggtcaaggcgctggtcgagggttgcgcggcggcctacggccgtctcgactacgccttcaacaacgccggcatcgagatcgagcagggcaagctggccgacggcaacgaagccgagttcgacgccatcatggctgtcaacgtgaagggcgtctggttgtgcatgaagcaccagatcccgctgatgctggcccagggcggcggcgcgatcgtcaacaccgcctcggtcgccgggctcggcgcggcgccgaagatgagcatctacgctgcttccaagcacgcggtgatcggcctgaccaaatcggcggcgatcgagtacgcgaagaagggcatccgcgtcaacgccgtgtgtccggcggtgatcgacaccgacatgttccgccgcgcctacgaggccgatccgcgcaaggccgagttcgccgccgcgatgcatccgctgggtcgggtcggacgggtcgaggaaatcgccgccgcggtgctctacctgtgcagcgaccacgcgggcttcaccaccggtatcgccttgccagtggacggcggggcgacggcgatctga

SEQ ID NO: 353239 - DNA, 894 bp, Pseudomonas aeruginosa
atgaccgccgatcccatcctgaccctgttcctccccatcgccctgggcatcatcatgctcggtctcggactgtccctgaccccggccgacttcctccgcgtggtgcgctacccgaagccggtgctggtcggcctggtgtgccagatcgtcctgctgcccatggcctgtttcctgatcgtccagggcttcgccctcgaggcggccctggcggtcggcatgatgttgctggcggcctcgcccggcggcaccaccgccaacctctacagccacctggcgcatggcgacgtggcactgaacatcaccctgaccgcggtgaattcggtgatcgccatcctcaccatgccgctgatcgtcaatctgtcgctgcaatacttcatgggcgacgggcaggcgattcccctgcagttcggcaaggtcatgcaggtgttcgtcatcgtcctcggcccggtggccatcggcatgctggtgcgcaaccgcctgccggccgtggcggatcggctgcagaagccggtgaagatcctttccgcgctgctgttgctggtgatcatcctgctggcgctggccaaggactggcagaccttcgtcacctacgcgccggtggtcgggctggccgcgctggccttcaacctgctgagcctggcggtgggctactgggtaccgcgcctgctgcgcctgccgaaggcccaggcggtggccatcggcatggagatcggcatccacaacggcaccctggcgatcgccctggcgctgagtccgagcctgctgaacaacagcaccatggcgattccgccggcgatctacggggtgttgatgttcttcaccgcggcggccttcggctggtgggtcagccgtggccaccaggccgcgccggcgcccgtgacggcgccggactga

SEQ ID NO: 353240 - DNA, 1197 bp, Pseudomonas aeruginosa
atgaccgaaaccacccagccccagcctcgtctgcgtccgttcgccgactcctctcccgccgccgtggtggccggcttcgtcgccatgctcaccggctacaccagctcgctggtactgatgttccaggccgggcagaacgccggtctcagcagcgcgcagatttcctcgtggatctgggccctgtcgatcggcatgggcctggcgaccatcggcctgaccctgcgctaccgggtgccgatcgtgatcgcctggtccacccccggcgcggcgctgctgatcagcagcctgcccggagtgccgtacagcgaggcgatcggcgccttcatcgtctgcgccctcctgatcaccctgtgcggcgtcaccggcagcttcgaacgcctgatgcgccaggttccctcctcgctggcctcggcgctgctggccggggtgctgttccgcatcggcatcgagatctgcaacgccgccgagcaacagaccctgctggtgctggcgatgttcttcagctatctgctgtgcaaacgcttctcgccgcgctatgcggtgttcgctgcgctactggtgggggtgctgctggccgggatactgggccaactggacttcagcaggttccgcctggaactggcggtaccggagtggaccacgccgagcttctccctggccgccaccatcagcatcggcatcccgctgttcatcgtcgccatggcgtcgcagaacatgcccggcatcgccgtgctgcgcgccgacggctaccaggtgccggcctcgccgctgatctcgagcaccggcatcgcctcgatcctgctggcgccgttcggctcccacgggatcaacctggcggcgatcagcgcggcgatctgcaccggtccctcggcccacgaggacccgcacaagcgctataccgcggcgctctggtgcggcttcttcaactgcgtcgcgggaaccttcggcgccaccctggcagcgttgttcgcggcgttccccaaggcactggtgctgtccatcgccgctatcgccctgctcggctcgatcatgaacggcctggccaattcgatggccgacgagcgccagcgcgaggccgcgctggtgaccttcatggtcaccgcctccggcttcaccctgctgtccatcggctcggcgttctggggcttggtggccggcctgctgactcagttcgtgctcaactggcggcgcggctga

SEQ ID NO: 353241 - DNA, 636 bp, Pseudomonas aeruginosa
atggatgcaaacccctacgccacgccgcgtgtcgaattggtcgagcagggcataccggatgctttccgccggcgctggacgcccgcgcaactgcgcatcctcgcctggctctgcctggcctcgatagccggcggcgtggtgctgatggtgctcagcctgctggaggcattcggcgatggcgccgcgttcggggtctacgccgactggctgggcctgctcctcagcctgctcggcgcctacctgctgctgcggctcaagcacctggtcgagtcgcgctttcgcggcccctcgctggcctggccggtatggttgtcgattctcctgaccctgctgggcgagggctggagcctgctggcggttaccgacgatgcgctgcagggttggaactggcaggcgctggtgtacttcgcgctgcttgcgctgatcggcgctaccaccctctggctgggcctgcgtctgctcaagcaggaaaacctctatccgtcgctgcggatcatggcctggctggacatcgccggcggcgcgatgctggcttcggtgctgttgctggtgctggcggtactgccgctgctggccgccaccctggccatggcgctggcctgctggcgcgcggcgcgggagttggagcggagctag

SEQ ID NO: 353242 - DNA, 477 bp, Pseudomonas aeruginosa; identical to SEQ ID NO: 327678

SEQ ID NO: 353243 - DNA, 1167 bp, Pseudomonas aeruginosa
atggccttctctgaacgcatctcccgcctgaaaagctccttgatccgcgaaatccttgccgcggcgcagcgtccggaggtgatgtcgttcgccggcgggctgccggccgagccgatgctgccgaaggtgcagtgggagcagatgccggcctccatgggccagtacggcatgagcgaaggcgagcctgccctgcgcgaagccatcgccgccgaagcgcgcgccctcggcgtcccctgcgaggcgagccaggtgctgatcgtcagcggttcgcagcagaccctcgacctggccagcaagctgttcatcgatccgggcaccgaggtgctgctcgaggcgccgacctacctcgccgcgctacaggccttccaattgttcggcgccgattgcgtgaccgtgccgctgggtgccgagggccccgacctggttgccctgcggcagcgcctggagcgacacaagccggccttcgcctacctgatcccgactttccagaatccgtccggcgtgcgctacagcgagggacgccgcgacgcggtggcggcgctgctcgacgaattcggcgtgaccctgatcgaagacgaaccctatcgcgaactggtgttcgacgagggccgcgcaaccccgctggtcagccgcctgcgcaagtccagctggatctataccggcacggtgtcgaaaaccctgctgccgggcctgcgcgtcggtttcctgatcgccaccccggacctgttcccgcacctgctgcggctgaaacagtcggccgacctgcataccaaccgggtagggcagtggcaggcgctgcaatggttcggcagcgaggcctatcgccagcacctggccgaactgcgcgagttctaccgggtccgccgcgacgccatgcaggaggccctgctggagcacttcggcgagctggccgaatggaatatcccggagggcgggctgttcttctggctgaccctcaggcagccgctggatacccgcaccctgctccagccggcgctggccgccgatgtcgcattcatgcccggcgaacctttcttcgccgagccggagcagaacctcgggcgtctgcggctgaacttcagccacgtcgccccggagcgcctgcacgaaggcctgcggcgcctggccaaggtcgtccgcgacgcccaggccgccgaagcggcctga

SEQ ID NO: 353244 - DNA, 603 bp, Pseudomonas aeruginosa; identical to SEQ ID NO: 319843

SEQ ID NO: 353245 - DNA, 435 bp, Pseudomonas aeruginosa; identical to SEQ ID NO: 326088

SEQ ID NO: 353246 - DNA, 4845 bp, Pseudomonas aeruginosa
atgatctcgtcgttctacgccatgttcatgctgcgcggagtgaacgcgaagcagccggatgccagccagttgatcggcgaattcagctccggggtgctcaaccgctatgaggaatatgcgaacagttggctctggggctgggcactcgacgtccagcagaccatcgccctttccgatgggaacggcaacgagttgaccaggctgaaagccgacaaggacgccaacatcctcgaagacgtcgcctcatgtccggtcaacggtcaactgaaactgctgcatactttcgaatcgaccagtttcgtgcccatcggcaacacgccttacgaaatcactcggataggcagcaggacaccgcagttcaagggcgtactggatgcagatgggatggcgagcataagcggctgcgctcccaatacgctgtaccaggtcaagttctacccagaggtaagcatccaggagatcgacgcgctctaccgctcctacgacgacgtaatcgccaagctgaacgaatggcttctggagcaatggaacggcccgctttccgccgaatggaaaaggctcgcgccggttggcgaccgtaggcggatggagcagataaacgacgcctatctggacggcatgggcaaagcgctggtcaatctctgggatgatgtggtcgagctgttcggcatcctcgcgaacctcgacgagcacgcggcgaaactccttgagttcatcaacgaagcggatttcgaaaagctcaaggctcaggccaaggaactcctcggtaccgccttgctgatcgccagcgacgaaccgcttctgttcatctatgccagcgccatcgtgtgctggacccagttgctgccgcccacgactgccgcggaaatggtcgcggaactctccaccggcctgctcctcgatattctgctcggcatcatcctgaccggcggagccggtctcgccgttcgcctggccgtcaagggctcgaaagcgatcaaggcctccgaaggtgcgatgctgctgcgcaaagccatgcaggtgctgatcgataccagctgtcggcattccctccagttgcacgcggaaaagctgaaacctctggccgtccgcggtgaagtgatggccaacagctccaacaagatcaccgcacagatccagagcaccgcccaaggcatcgcccgcaccgagcccgacaccctgccgctgagccgaggaaagcgcgcgaacacctcgctctccagcagtcaggcgacgcccgatgcctccgcacccggcaggacgcccgccggcaaacccgccgaccaggccgcccagacctgcgtcaaggactgtcccgtttcgatggtcaccggcgaggagctgctgaccctgaccgactgcgagctggacggtccgctgcgtttcgcctggacgcgcctgtaccgcaccagcgcggcggaaatcgacaatggtctgggcttcggctggagccatgccctctcccatcgcctcgatcgcgacggcgacgagttggtatggaccgatcacgagaaccgccggacccgcttcccgatccctgacgcccagcgcccggcgatcaccaaccgactgtcgcgcgccgccatctacctcggcggcgacccatccgaactgatccttgcccaggccggcgaaaagccgcgcttctaccacttccgcaaagacccggacggcgcttacctgatcgccatcagcgacgcctacggcaaccgcctggaactgagtcgcgaccgcctcggccggccgcgccgcctcagccacaaggccgggcgcgcgctactgctgtgctaccagggcaggcacatcgagcgcgtcgagtaccaggtgtaccagcccgccgataacctggaggcctgctggcacaccacccaggtactcgcccgctaccgctgcaacgaacgtggccagttgatcgaagccggaaacgcactctacgaggctgaacgctatcgctacgacgcgcgcaatgtcatcctcgagcgccagttggccggcggcgcctcgttcttctgggaatgggaaggcgaaggcaagcaggcccgcgcggtccatcactgggccagcttcccgcagatggactcgcgctacgtctggaacgaagacggcagcgttaccgcgatcaacgccgacggcagcgaggaagtctatgtccacgacgacaacgcgcgcctggtacgccaggtcgatcccgacggaggcgaaaccctcaggcactacgacgagaagggccaactggtcgccgaacgcgatccgttgggaacgatcaccgagtaccgctacgaccaggccggacgcttggaggcactgctcccggccgaaggcgagccaacctgctatagctacttcgacggcttcgtgcgcagcgtgcgccgcggcgaggcgcagtggaagtacgagcgcaacgctcagggcgacatcacccgccagaccgatcccgaaggcaacgtcacccactacgcctacgaccaccgcggctgcctggtggaaatcacccatgccgacggcagcctgcaccagttgacctggaatccgctcggccagttgatagaagaacagcttccggacggtagcgtgcgccgctatcgctacgacacactgggtagacagatcacccgccaggacgaaagcggcgccatcacccggttccagtgggatgcagcaggccgcctgagccagatcaccctgcccggtggcgccagccgcatgtaccgctacaacgcttacggcaaggtcaccagcgagtgcgacgaacagggccggatgacccgctacgaatatcttgacgacctgcacctggtcagccggcggatcaacccggacggcagtcagctgcgctaccgctacgaaaacgcccggctactgctcagcgagatcgagaacgaacgcggcgaacgctatcgcctcgattaccacggcaacggcctgatcagccaggaaaccggcttcgacggccgccgcaccgcctatcgctacgacctcaaaggccagcttctggagaaaaccgagtacggcgacgacggcagcgaactgcgcaccgcctaccagcgcgacagtaccgggcgcctgctggcgaagacactgcccgacggcaatcgggtcgactaccgctacgatacgctcggacgcctggtcgccgtcgacgacggcacctggccgctggcctacgaatacgacctacgggaccgcctggtccgcgagcaccagggctgggccacccttcactacgcctacgacgccctcggccagttgatccactgccgactgcccgacggcaaccgcgtcgactaccgctaccagaccggcggcaccctctcggcaatcgatctcaacggccagtccctgacccggcaccagttcggtagcggtcgcgaacgccagcgccagcagggcgaactgctcagccaataccactacgatgagcagggccgcctgctggcccaccaggtcagtcagcggcagcgccatctctaccagcgccagtaccgctatgacgctagcggcaacctggccgccatcgaggacagccgcaagggcattcgcagcttccactacgacccgctggaccgcctgctcggcgtacgcggtgaaaccccggaaagcttcgtgcacgacccggccggcaacctgctcgcccagggcgggcaattcgacgcgcgacagatggaggttcgcggaaatcgcctgctgacgcagggcgaccggcatttcgactacgacgcccacggcaatctcgttcgcgaacgccgcggcaccgggcagaagctggtcaccgaatacagctacgactgccaacaccgcctgatcggcgtcagcctgccggacgggcgccaggtcgtctaccgctacgacgccttcggccgacgcattgccaagcaggtcgacgggcgcaataccgagttcctctggctcggcgaacgcctgctcgccgagagcggcgaccggcactaccgcacctatctctacgaacccgacagcttccgcccgctggccctgctcgacggcgaaggcccggaacaggtcgaaccctgctactaccaactcgaccacctcggtaccccgcaggaactgacccgcgccgatggccgcctctgctggtcggcgcgctaccgggcttacggcaatgtgctcaagctggacatcgccgaagtggataacccactgcgcttccagggccagtatttcgacgccgagaccgggctgcactacaaccgccatcgctactacaatccaagcacgggacgctacctgacccccgatccgatcaggctggcaggtgggttgaacagctaccggtacgtgccgaatccgacggggtgggtggacccgttggggctggcctcaaataaaactcgctgtcccgaagcattagacaataatccccgcaaagggattaactccacatccggcagcaaaaagccggcaggaccaatcgtagagctggatgcgcagggaaacgagatttactaccgaacactaagcgagcagcaccttgagatactgaggaacaactttgaagtacctccgacgagtgagaccttcatctccccgctacaatcctactcccaagagtatgatgggaaattagtaagacttacagccagtccaggcaccatgaatgagctgtctaaaattggagtaactgcaaattccggaaccggcctattgcttccagatctccctcccgcccgaaagggctggaaacagaacaacgcactattcaaactcgaagcactaaaaaagccaacgataaatgaaggaggcggcgttatcaacactggccttggggatggaaaagccctagagattttcaacaagaacctaatagacttcgaagtaatagactag

SEQ ID NO: 353247 - DNA, 741 bp, Pseudomonas aeruginosa
gtgacctctgacgctctctccccgcgaacctggctggcccgacatccgcttcaggcaggcgaatgcttgtacgcgatcttcggcagcgccagcgatgccgcgcccctgcaagcctactaccgggaagacagcccacccctaccgctccctctctggaacggtacgccatatgccgactggcaaccggtgatgccctacctcgcgaagctgccccccagcagcgtattcctcgattgggctgccagcgaaaagtctcgcgactggggttggctggcagtttccacctggtcgacagacgcaatcctagagcacctacgcagcctcacccaggtacgcatgccggatggcagcgaagtgttcttccgtttctgggacggccgtcacctgctaccgatactcgcccacctcggcgagaaagcgcacgaagtactgccgatgttcggccgttacctgatcaatggcaaagcactcgaaaccggccagggccatctccatgccgcccgtccctacccctggtgggaggttccgcgggcactggtcgacacgctgcatgccgacgacccgactaccgctatcgacaacctgctgcagtggctgcgcgagaaccacgcagatctgtacttcgcctatcccgagcgaagcctgcaattgcgcgccagacgcctcatcgcgaaagccgtcgccatggatgagatcggcggcctgttgttgaaccagttggaaaaggacctgaccccatga

SEQ ID NO: 353248 - DNA, 2037 bp, Pseudomonas aeruginosa
atgttcgcagcagccaaccagacccatttcagcctcgccatcgacggcctcgccctcgacctgcaggtgctctccttcagcggccgcgaagccatcagccagccgttcgccttcgacctggagctggtcggcgaacgccccgtgccggacctcgaaagcctgctgcacaaacccgccttccttaccctcgggcccgccggcaacggtatccacggcctggtgcgcagcgccggacagggcgactcgggcaagcgcctgacccgctaccgcatcaccctcgtcccgcaactggcctacctcgcccaacgcaccaaccagcgcatcttccagcatctcacggtgccgcagatcgtcggccgggtgctggaggaacacggcatcctcgccgacgcctaccgcttccagctcggcacccgctaccccgagcgcgaatactgcgtgcagtacgacgagagcgacctgcagttcgtccagcgcctgtgctgcgaggagggcatccactttcatttccagcacagcgccacggcgcacctgctggtgttcggcgacgaccagacggtgttcccgcggctcgcgccggtggcctaccagcaggactccggcctggtcgccgaccggccggcggtcaagcgcttcggcgtacgcctggaaacccgcaccagccgcgtcacccgccgcgactacgacttcgagaaaccgcgcctgacgctggaaagcgccgcccgcggcgaagcccggccggacctcgaggactacgactatcccggtcgcttcgtcgaccgcgagcgcggcaagcacctggccaggcgtgccctcgaacggcagcgcagcgactaccgcctggccgagggccgcagcgaccaaccgttgctgctcagcggccacttcctgccgctggccgcccatccccaggcgggctggaacgacctctggctgctcaccgaggtgattcacgaggggcggcagccgcaggtgctggaagaaagcatcgtctccgacacctcggcgagcccggacgacttccggcagggttaccgcaaccgcttccaggccacgccctgggaggcgttctttcgtcctccgctgacaccgccgaagccgcgcatcctcggcacgcagagcgcggtggtgaccggtccgaagggcgaggaaatccactgcgaccgctacggtcgggtgaaggtgcaattccactgggatcgcgagggccaggccgacgacagcagcagttgctggttacgcgttgcctccggctgggcgggaaggaactacggcgccatcgccatcccgcgggtcggcatggaggtgctggtgaccttcctcgaaggcgaccccgaccagccgctggtcaccggctgcctgttccacagggaacatccggtgccctacgaactgccggcgcacaagacccgcagcgtcttcaagagcctcagcagccctggcggcggtggctacaacgagctgcgcatcgaggatcgcaagggccaggaacagatcttcgtccatgcccagcgcgactgggacgagaacatcgagcacgaccagaagatccgcgtcggccacgaacgccacgacaccgtggaggcgaacagctacagcgagttcaaggccgaggaacaccgcaccacccacgccgagcgcaaggtggaggtccgcgccagcgaccacctcaccgtagccaacgaccagcacctgaagatcgccagcggccagtttgtcgaggccggccaggagatccacctgagcagcggcctgaaggtggtgctggaggccggcgccgaactgaccctgaagggcggtggcagcttcctcaagctcgacgccagcggcgtgaccctctccggggccaacgtccgggtcaactccggcggcagcccgggcagcggcgcggcgccgctgttgccggggccgctgcggcaggccgacagcgacaaggccggcgccctcctcaccccggcccagatcaataccctgaagcgcaacgcgcccttctgcgaagagtgcgagaagtgcaaggacggtgcctgtgacctctga

SEQ ID NO: 353249 - DNA, 687 bp, Pseudomonas aeruginosa
atgtgtggacgactcagccaatactccggcctgcatgaattcgtgtcggtcttgaacctaccgaacatgctaaccaacctagtaggagaacagccgcagcgctacaacgtagcgccatcgacccaagtgacaacgctccgactcgaaggggacgcgctggtcgcccaggcgatcaaatggggatggaggccaggctgggccagggatcgcgcagcgccgatcaacgccagggccgagaatgtggcgcatggacgcttcttcagcgcagcctggcgccatcgcgcgctttgccccgtttcaggctggttcgaatgggtggccgatggcggggcgcggaaacagccgtatcacatccagcacgccgacggctctccggtcttgtgcgcagcgatcggccagttccccgggcttgaagatgagcaggccgagcagcacgggttcgtcatcataaccgccgatagcgccggcggtatggtcgatattcacgaccggagaccggtggtgctgccgcccgagctggcccgggagtggattgacccggcgacaacaccggagcgcgcggagcagatcgtgctccaccagggcgagccgagcgagtcattccggtggtacgcagtcgacccagcagttgggaacgtccgaaaccagggaccgcagttgatcgagcctcagcgctcggcctcataa

SEQ ID NO: 353250 - DNA, 798 bp, Pseudomonas aeruginosa
atgaagattccttttagtcttaaagttgatagtggggcaagtcgttttacaaaactgggaatgtattatggtgcaaatgcactcgaggctctctctgaggttgtctcaataacaacgcatgccatacttcataatgaagtaaaaacacaaactactgcggtaaaagggtttagtgtggattttaaaaattcacacacaggatcttttatccagaagtttgaagttgaatttaatacctcagagtctcttagtacgattaactatatagggattgatgcgtatgtggagttacttgcaatacacttggctcttcctctagggtataaatcctcacttcaaagcgcctctgctaaacgctggtttagaagctacatggaaaatggtgaagaattggtggagcgcttagaggggccactgaaaagacttcatatgccagtatacgggcagggctatcaaatggttctttctaaagctagaactcctttggttggcttcaatgagcgcacgcacgattttttaactacatctataacaagcccaaccagagaaaccattaccatgggggttagtcggttcaatgctcgaactggaacggggcgcttcattattgatgatgaagcggagtcaataagtttttcaccgtataagggtgttatttctcagcgagcgaagcaagtgcttgctgcaagcttgaaagacttggctaacgatgtgtttacccctgtaagtgcagaggtgactagggttagctctcgtgatggtcgagtcaaacactatcgcttgcactctgttaaatga

SEQ ID NO: 353251 - DNA, 1008 bp, Pseudomonas aeruginosa
atggataagcagcaaataatcgaatcgatggttcgcgactttcgtggagaaggtgctggcaaggctaggaagtatgttggaggccttcttcccgctttttgtgagttcttgattgaattagagactccgaaaaaggggtattcttctctttcagatttctttgctgattatccgcaactaaccgaaggcgtatcaactttaactgtctctctgcctgcgggaggacaaaaaactattcgtcctgcatatgagagataccatgatctttatatagttaaaaatcatcgactcgattatcctcggccacagccctatgcgacaggtaagtggagtgactatcgtcagtggctcgatgcgttagttggaatgcctgaagatgatctcaagtggattatagccgagactgtttcttttgttctaaacgaattaaaagatcaaagtttcgatcctaactctgtaagagttgagcctccaatttttaagtggctcttggagcaatttgattttagcgcaagggcaaagggtgagccaacaggtgctgctttccaagcaatggtttttggttacattcgagcggatgctccacacttacaggttgaggcgcgtaaagcaagggctggctcggcaagaaccaagggaattggtgatattgatgcgtgggagggggatagactagttatttcggccgaagtgaagcatttcactgtatcagaaaaagatatcggcacatttgctcacttctcgtcatctgtgatcgagcgcggcgcgttaggaatgattgtttcagagaattatgtgcagggggcgcgcgagatgataagtgcgctgggcatccatccgctgtctcggctggatattttgcatattgtttcgctttgggatccgctaaaacagcgtgctgcgcttaatgcttttcaatgggttgtagtgcataaggaacaaaactccggactcattgagcgtgtgaatgcttttctagagtctgtaggatatctggtgaaacggtag

SEQ ID NO: 353252 - DNA, 1587 bp, Pseudomonas aeruginosa
atggccaccatcgtggatatttacggcaaccccctgcgaacccagcagctgcgcaagcagcagaccgcgcacctgacgggcctggccaaagagttcgccaaccacccggccaaggggctgaccccagccaagttggctcgcatcttgatcgaggccgagcagggtcaactccaggctcaggccgagttgttcatggatatggaggaacgcgacgcccacctgttcgccgaaatgagcaagcgcaagcgcgctgtcctcggcctggactggaccatcgagccgccgcgcaacgcctcggccgcagagaaggccgacgcggagtatctccacgagctgctgctcgacctggagggcattgaagacctcatgctcgattgcatggacggcgtcggccacggctatagcgctatcgagctggactggtcgctccaggggcggcagtggttgccgcaggccttcgaccaccggccgcagagctggtttcaactgaacccggacgaccaggacgagctgcgcctgcgcgataacagcatcgcgggcgaggtactccagccgttcggctggatcatgcacaagccgcgttcgcgctcgggatacgtggcgcgtagcgggctgttccgggtgctggcctggccgtacctgttcaaacactactccacggccgacctggcggaaatgctcgaaatctacggtctgccgatccggctcgggaagtacccgcccggcacgccggacgaagagaaggtgaccctgctgcgagccgtgaccggcctcggccatgccgcagcgggcatcatccccgagagtatgtccatcgacttccaggaagcgtcgaaaggctcggccgagccgttcatggccatgatgcgctggtgcgatgactcgatgtcgaaggccatcctgggcggcacgctcaccagccagaccagcgagtcgggcggtggtgcctatgccctggggcaggtccataacgaggtgcgccatgaccttctggcggcggatgcccgacagcttgccgccacgctgagccgcgacctactctggcccctcctggtcctcaaccgctccggcaacctcgacgcacgccgcgccccccgcctggtgttcgacctcaaggaccgggccgacctggccgccatggcaacgtcattaccgcccctggtcaagctgggcgtccaggtgccggtcaactgggtccaggagcagctgggaatcccgctgccagtcaatggcgaggcggtcctggtcgatcaggtcggcgcaggtatcgcccagctgagccggcgccctggtcctcgcatcgctgcgctggcccaggtgatcggaccacgctaccgcgatcaggaagcgctggaccaggtgctggccagcctgccggcccaggacatgcaaaaccaggccgatagcctggtcgcgccgctcctggatgtgatcagccgcggaggtagcgaggccgagctgctcggcgccctggccgaggcattcccggatatggacgacagcgccctggcggatgccctccaccggctgctgttcgtagccgacacctggggccggctcaacggcacgctggatcggatcgactga

SEQ ID NO: 353253 - DNA, 1533 bp, Pseudomonas aeruginosa; identical to SEQ ID NO: 281084

SEQ ID NO: 353254 - DNA, 810 bp, Pseudomonas aeruginosa
atgaccccctttcacctcgctacagatagttcgcccgggctcactggctggcatgttgcgttggttgcttgcgttggcatgctcagtgatgaatggggcaagcgtgggctgagctacagcgaatccgtggcctccggtgatggtggctgcgggctcgcgcacggactgaccccggaactcggcgccaccgtgattcacgctgacgatgaacggatcggcgtgttcggtgacgtatttctttacgcccttgcggagccggtcgagcgtcttcttgacgagggggcggcgtaccttaaatttcttgccttcagtcgcgtcgaggaagatcgacgggcacggaatgctccagtcgatgtgcgtagccacgggaacccatgggagctggtcagggcctggggtcttggcgtgggttggctctggccagttcaatgggatgccatcgcgtcgcgcgatgaagaacaggcgttccctggtggtggcggcgccgaagtccgcggcaacgagcttgtcgtagtggtactggtagcccatgtctcggagcaggcgaaggaagcgcgcccaggtgcgtcctttgcgcttggggtccggtatcaggtactggcgctgtacgggtacgcgctcgcctggttcggctacgcggtgcatgggcttgccggtggttgggtgcggcaccatgtcgagagtgaccacccgcttggtctgcgggcagcgtttggcgatcagcggaccccactggaggatctgcatcacgttctccatggtgagcatcaggggacgtgtttggcctgcccacttgatcatcatccatga

SEQ ID NO: 353255 - DNA, 483 bp, Pseudomonas aeruginosa
atgaccgcccctatcccggctggctgcgtagcagcactccgccagggcgccgccctggcacacgccacccacagcacccaagccccggccgcgcagaagcgcggcggcggcatggcacgtcgcatccaactgatcgccatcgcccagggccgccaaccgatgcccgagggtggcgctataaaaagccactgctgcgcagcagcaggcatattccaacccaaccttcagcacacgccgaaggcacgcataccccacgaaaggctgcgccggggcgcgaagcacatagccacgcttcgcttaatgactcgctcgcccgcgcagcttgtcgaggggggaaagcgcccaccgaagcccaccgataacgcactgatccgcacgctgtgcgcgcagatccgcgagcagaaccaagagattgccgcgctgcgcatcgcgaacaccgacctcctccagcgcctggagaaagccgaagggggacgggcatga

SEQ ID NO: 353256 - DNA, 192 bp, Pseudomonas aeruginosa
atgcaacgttccgccacggtacacgtccacccggcctgtacttcctccccccaacagatccaacgcctccaggccgacactggctgcctagtcgtcatcgtcaacggcaaagcccagcttgtcgccaccaagcgcaccttgggccgccgctacgcggtagccacctccccgtttggaggtgacgcggcatga

SEQ ID NO: 353257 - DNA, 1884 bp, Pseudomonas aeruginosa
  misc_feature (722)..(722): n is a, c, g, or t
gtgcaggaggtgcacgatagctggaagtacagcaactcggggctgggggctgcgccgtcactggccattgccatcgttgcggctgcttacctcggcccggtgtatggccctatggccagcaatcttgccgttggcaccatcaataacggtggcgaccttggcaaagggctgcaacacgccaccagctccagtgctctcaagagctacgccatcgcggcggccacggcttacttgaccaccgagtacttcgacaaggtgctggacaccaagaccaacgtcgataccagcaaggtcacggtggacctgagtaccgtcagcggtgccagtcgcttcgccgccaaccaggcgatgcagaacctcaccagcacggccttgggtaaggctatgggacagggtggcagcttcggcgatgccctcaaggacagtctctacaatacctttgctgccgccggcttcaacgccattggtgacttcggcaagacccacaagctggaaaccggaagcgcgcaaatggtggtgatgcatgcgctgatggggggcttggccgcccaagcgcgtggcgacagcttcgctgctggagcgattggtgcaggactcaacgaagcactggtgaaggacctggacaaactggtcagcagctactcgccggaaaatcgcgaggcgatgctggccatggcctcgcaactgacggggctggtcggggtagtcgcgaaggaccccgntgccagttacaaggagcttgaaacggggagttgggcggcgaggaattctgtccaatacaactacctaaaccacgaagaaaaccaggaacgcttcgaggccaagaaggcatgtaacggcggagactcaaccgcttgtggccgcgtcgatgaattaaaccaactcgaccggagtcgcgatctggcactacttacggcctgttcttcggacggtagtagcacgacatgtacagcgctgcgtaaagaggcttgggaatctgcccagagtttgaaacaggccagttggactccagaagcacaagagcagtaccggcaagccatgcagaacccgcaactgatggcatacaccattgagggcgagctgcgcagcatctaccagatcaacgacccgataacggcagctgattccaagcggctggccgaggcgatggccagcttgggttctgacttcatcccaggttatggcgatggcaaggcgtttgtcgaagcgcaagaccccttcgactatacgatggccggaataggcttggtgccgggcattggggatggcgctgcgaagatcctggccaaggcgaaggcactttacaaggaaggtaaagtatccgaggctgctgatttggtcgagggactgggtaagctgccggctccgcaagggccaaaaggaactggaacggcgctgcgtgaagtagaagttagctctggcagcaaagggtcatggactaaggaactcaacaaaccagagccgaacacgatttataaagtggacgggaacaagacctatcagacagatagtcttgggcgtgttgagaaggttgagtccaacctctcgctgacgaagagtgaccggaatacttatcagcagtgcattgctggtaaatgcggggttagtggcgatgaaggtggccatctgattgcaagtatcttcaatgggccaggtgagaagctgaacctgcttcccatgaatgggaacttgaataaaggtgcctggaagtccatggagaacacttggtcatctgcgctcaagcaagggcagatggtcagtgtgaaaattgagcctgtctattctggctcatctgtgcgtcctgatagatttactgtcagatactctattgatggtggtcgccctgtcattgtcgatttcaaaaactcaccgggtggtatttga

SEQ ID NO: 353258 - DNA, 1821 bp, Pseudomonas aeruginosa
atggtgcaggaggtgcacgatagctggaagtacagcaactcggggttgggggctgcgccgtcactggccattgccatcgttgcagctgcttacctcggcccggtgtatggcgcaatggccagcaacctcgccattggcaccatcaacaatggcggtgaccttggcaaggggctgcaacaggccaccagcgctgacagtctgaaagggtacgccatcgcagcggccacggcttatctcgtcagcccgcagttggacaaggcattcggcgtatccagtgacaacatcaacaaagtcaccaaaggattcaagctcagcacagttgagggaatcggtggatttgctgcctacagcattgcccaaggctttgctcaatcggtcatgcagcaggccgcctatggcggcagctacatcgacaacctcggtaatgccatggcaggtcaggcgcgcaacctgggaatggcggtaggtttcaatttcattggcgactcggtcaaataccctgatggcagcccgccgaaaatcatggctcacgccctgatgggaggtctgctggccgaagcctccggcagtgacttcaagactggagcggcggccgctggtgccaacgaggccatgatcaacctccttgggaaaatggtaggtggcgatcaaaacctcgaactgatggcctcgcaactcgttggcgtagccgcggcaagtgcggtcaatggcgatgtgagtctgggcgccgagatcgccaaaagcgggacggcgtacaaccggcagctacacccagatgaaatcaaattcgcatcggatgtggagcgcgtcaaacgttatgcccaggaaaatgggctgagcgaggacaccgcccgcaaagagcttctcagcacggccgccatgatggtggacaatggctggaaccaggccttggccggcacagacatcaacgctgcccgggctgctcagtatctgcgtacggagctgggcacaggcccggacagcaatctcttccaggtgatccaggctgactactacaacgagcgggtggggctgacggcgctattcaagaacaaggaggccctgaccagcgttctggaaaacatagccctagcgaatcccgcgagctatacgagggaccccgcgaaccgtgcggaagtgctgaatgccaaaggtgaaggtagccaagcgggctttgggctggcactggaagggatcgtcagcgcgccttcaaaaactgccttgtggttgatgggtgcgctaacctgttcaagctgtgcggagcgggatatccagaacgcttggaactcggttgcctcgttacctgaagacatccgtatgaaaggctatctggatgccttgcacaccatgcaaggccagggtgccagcgtggtgcgggacaacgccgcgagttcgactgcattgggagttgaggttgggctggccattgatggagggttggcaggggcaggcaagggcgtcgttacggatggtccgaaaggaatacttacactgaaagatttccctgatgtctctaccaagataagccagaagcagcttcgccatattgctggaacacagcagcttgaggcacggggaggcggtggtttcttaaacagtgtctctgatgctcaaaaagtgcttgatgcctaccataccggccaagtgaaaatcctagggagaaatgctcagggattcccagtagtcaagtttgagggcgttactggaactaacgttaatctcggtgttggtataactgatcaggcaaccaatgtatttattatcaagggcacaaagagtccaagtattgtccctacaaatccaaactggagtcccaaatga

SEQ ID NO: 353259 - DNA, 756 bp, Pseudomonas aeruginosa
atggcgggcaatacggggttcgataacagcctggcgtggaacgcgcagcccggtaactcggtgcagaacaacccttattcgtcgaaggggccgaccgtcgcacagctgagcggtgggccgttcacgcgctaccacctgtttgccacggcggcttatctgcacctgcacgtcgagattgcggccggtcagttccggccggtgatgattggctcgctcaacaagcgcggagtcgaatacagcggcggccagtacgtatgcggctccgtaatctatcaggcgggccagatgctgacatcgagctggtcctgtcatccgttcgacggctatcacgttcgctatagcgacggtggttgcgtactgcgtgtggatggcctggatggcggcccctcgcccgactggctgccattcgactacacgacgaacatcccccggcgggtcatcgggccaggccgtggaaactacagaagtcagtaccatcctgacgtcggactgatcgacgccagcgcaaacgagctgaacagctcgaccaccactgtgccgtgcgccatctatgcgttcggcgctcagcagcgctcgcgctacgtgggcgaagtgccggactttggcatatgcaacatggccttcctcgcgcctggtgatccgcttgtcgtcggtagcgacacttggcgcgtctatccgttgctccaacgcggaaccgctaccgccttcgacagcaccagcgcctgggtcggctattgcttccgggtggtcgagtga

SEQ ID NO: 353260 - DNA, 309 bp, Pseudomonas aeruginosa; identical to SEQ ID NO: 327654

SEQ ID NO: 353261 - DNA, 249 bp, Pseudomonas aeruginosa
atgggcgcgctcatgagaacggtcagtttccagggcgcgaccctctcggccagcgagcggcgttcggcgcagcttcgccagcaggtgagggcggcggtaaatcaaaccgttctgcaacagcaggttgcggccacgctccaggccctggagcagcacaaagagcagggcggcaagcccgagcgcgtctggaccactgttaccaacgaaaagggcacgccgttcctgggcgacgtgttcgggtggtcgtga

SEQ ID NO: 353262 - DNA, 192 bp, Pseudomonas aeruginosa; identical to SEQ ID NO: 332594

SEQ ID NO: 353263 - DNA, 450 bp, Pseudomonas aeruginosa
atgagcaggtctgaggtggatcttcgggaggtccaggacatgctgccggataccgtccgcgacatggccggacgcatcgggctgccggccaccctggtggtggtcgagcaactcggcggcacgtcctggcggatagccgagggccgggcgcggaggggcgaagcgcgccgggctgcgctggccgagctggtgggcagcgacatcgaggagcagctccacacgcactatcggggcgaagaaatttacgtggctcgctgccacaaggcgctggtacggtggcgcgacctggagatcgtcgagcgcttcgaacagggcttgcgtgatgggcaaaccgcccgtagcctgcttagcgatctggcccgccagtacaacctgtccgaccgctggatatgggagattgtcaaccggccgagcgagccggcaccgcagcaatccaccctgttccactaa

SEQ ID NO: 353264 - DNA, 348 bp, Pseudomonas aeruginosa
atgagcacatctagccccccaacgtctctacgcagcccccgcgactacgccgccgccatcctggccgagcccagccgcgagcgtcgtaatgctctgctggaagcctgcccggtcaactggcagccacttgttcgggcgcacgtcgaggacgccttcgcgaaggtcaaggcgtatcgccagatgatggaccaccgcgccgagtcgatccggcgcggcccgcctgctgctccccgcgtcaccgacaccgatttccgcatatccaactacaccaagtccgccccggaggtaggcaatgcgcacctatccgcaattcgggcagcgctcgcaacggaagcaccaaatgcctga

SEQ ID NO: 353265 - DNA, 240 bp, Pseudomonas aeruginosa
atggacccgatcacaatcaatctcgtcatcctggcggcgtcgttcatcctatccaaggtcttggcaccgaagccgcagaagcccaagccgaccgcctttgaagacatcgatttcccgcgctgcgacgagggtgacgaacaggtcgccgtcttcggtcagtgctggtcgaagagctggatggtgctgaccgtgggcaactacagaacgaaggcgattaagaccaaagggagcaagaaatga

SEQ ID NO: 353266 - DNA, 534 bp, Pseudomonas aeruginosa
atgcactacggcgacaccgaggcagcggtttcctgggtgggccagattggcgatgtggactggccgaccgtggatagctgccgcataacgtgcgtgtcagaagacgaactgatggaccagcccggcttgatcgacacctactgccgcacctgcacggcagtcgttggcgaccatcgctgcaaggtcaacctcgttccgtatcgcgtgacgctgacgccgcagagcatcagcggctgggtgatctccagcggcgtggtcgccggctatgtcgatggctggtttaccgggggctacgtcgagtggcaagtggacggcgacaactacgatagccgctacatcgagcggcacgccggacccgatctttacatcctgggcggcaccgagggcattccggcaggtggccaactgcgggtttatccaggttgcgacgggctcgcgctgacctgcgacgacaaattcagcaacctccccaacttcagggggtttaacgcgatgcaaggcaagtcgccattcgatggcgaccaggtctggtga

SEQ ID NO: 353267 - DNA, 294 bp, Pseudomonas aeruginosa
atgctgctgaccattcgcgacgttcccgaagacttggtgcgccaggccaagcttgcgaccggcaagggcaccggcagtcaggcgttcattgccggcatcgagcttatgatccgtcagcgtgatcggatcgaggcgatggaggaggagattcggtcgctgcgcgagaccctcggtgtgttccagggcgtgcttgcagatgcccatgccgccgctgtgcaactggctgagattgccgggcagcgcgatatgctggtgtccgacaacccgctgcggcctgggtatcgtcgccgctag

SEQ ID NO: 353268 - DNA, 294 bp, Pseudomonas aeruginosa
atgctgctgaccattcgcgatgttcccgaagacctggtgcgccaggccaagcttgcgaccggcaagggcaccggcagtcaggcgttcattgccggcatcgagcttatgatccgtcagcgtgatcggatcgaggcgatggaggaggagattcggtcgctgcgcgagaccctcggtgtgttccagggcgtgcttgcagatgcccatgccgccgctgtgcaactggctgagattgccgggcagcgcgatatgctggtgtccgacaacccgctgcggcctgggtatcgtcgccgctag

SEQ ID NO: 353269 - DNA, 294 bp, Pseudomonas aeruginosa; identical to SEQ ID NO: 340150

SEQ ID NO: 353270 - DNA, 303 bp, Pseudomonas aeruginosa
gtggcgcgccaggtgctggccggcctggtgactcagtttcaggccaccatggaggcgatccaggtggacagcgcgatcacgccagcggtcaaggtgcagatgctcgccagcctggccgacgcctacaacaagtcgatcagcgcatcgaagcgggtactaccggaaacctccagcctggccaccgcaatggaagtcatccagcgcctggcggccttcatccgtgaacagttcccgcagcacgtccaggccttcgccgagattctggagccgttcggggaagtaatcgctaaggggctgaaatga

SEQ ID NO: 353271 - DNA, 150 bp, Pseudomonas aeruginosa
atggtgcgggaagtaggtatacgcgaagaactcgaaatcgcgatctaccagtacgcgacgacgccgctcggcccgagcttccggggaactatcaaggccgacctgttgcgcttcgatgtcgcggcgcagctgctgcgccatggcggatag

SEQ ID NO: 353272 - DNA, 372 bp, Pseudomonas aeruginosa
ttgatcaagccaattgacgagatgctacggacctgggccgccgagctgcacccgccgaatggcgtcggctctgccggcaacgctagcggcgggagcaatgtgattgctatgctgatggcgaccaggggaaacctgactcgctccacagcgggggctcgctgtcccctggatcgcacggcggacattgagctgatcgtgaacaagcatcttccgccgcccatcgagcgggtggtgcggttgcattacacggactacgacatgtcggacccgatgaaatgggcagcatgcggatgcggtagaacccagtattaccagcgcctgcacctggcccacgcggccatcgctgaaatcctgctgcggcgggcggcctga

SEQ ID NO: 353273 - DNA, 303 bp, Pseudomonas aeruginosa
gtggcgcgccaggtgctggccggcctggtgactcagtttcaggccaccatggaggcgatccaggtggacagcgcgatcacgccagcggtcaaggtgcagatgctcgccagcctggccgacgcctacaacaagtcgatcagcgcatcgaagcgggtactaccggaaacctccagcctggccactgcaatggaagtcatccagcgcctggcggccttcatccgtgaacagttcccgcagcacgtccaggccttcgccgagattctggagccgttcggggaagtagtcgctaaggggctgaaatga

SEQ ID NO: 353274 - DNA, 249 bp, Pseudomonas aeruginosa
ttgatcggttggctggagggatacgtcggcgagaccgtcaccagtgctgacctgctggggggagcgctcaacctcgatttcgggcattggggcaagccggagcagatgcgagtaggccatatcatgcatcgtctgggctggcggcgcagacgcctgcccgcatccggtaaatcgccggtgcgaccgtggggctacgagcggccgccgtcgtggaagggacagccgacgcagaaggaggccgcattttga

SEQ ID NO: 353275 - DNA, 150 bp, Pseudomonas aeruginosa
atggtgcgggaagtaggtatacgcgaagaactcgaaatcgcgatccacaaggacgcgacggcgccgctcggcccgagcttccggggaactatcaaggccgacctgttgcgcttcgatgtcgcggcgcagctgctgcgccatggcggatag

SEQ ID NO: 353276 - DNA, 228 bp, Pseudomonas aeruginosa
gtgaggaatggcagctacgtcgactacctgttcggcgtggccaccggctggctgggctggccgcctgaaactgcatggcgaacgcccatcccgcagatcctgatggcgctggatgcccgtctggactggatgggcggcggcaaggctcagcagcacgccgcgccgaaacagaaggccagcgtggccgaccgcttgaaagcgttcctgcggggacgacaggaaccatag

SEQ ID NO: 353277 - DNA, 345 bp, Pseudomonas aeruginosa
atgagtgaagccctgcacggcaccgtcacgctggtgattggtgcccgtacctacacgctgcagccgaccctggaggctgcgttgaagatcgaatcgcgctttggtggcctgcgcccggcgatggagtccatgcgcctgctgagcattggcgcctgcgctgacgtggtgatcgctgccgccggcctgaagccggaggagcacacgaccctcgccacgcaggttttcgagactggcgtggtcaaagtctccgcgcagctcaccgactacatcgccggccttctgaacccggtgccgccgagcatcgccgaacggggaaagctcgaggcggccagcacagcgccgtga

SEQ ID NO: 353278 - DNA, 390 bp, Pseudomonas aeruginosa
atgagtgagcaagacgagtgggccggcgagcgcgagcagcgtctgcggatgatccgcgacagcgcggcttcgctggtgccacgcgacggcgacctgacccgcgtgcgccgcggtcgtttcaccggtagcggggtggaccgccaggcctggcgcgaggtctgcgccatgggctggccggcgctgcgcctggatgaagcgttgggcggcagcggcctgggcatgagcgaatacgcggcgttgctggaggcgctggggcgcggcctgctgcccgagccgctgatcgaggccgggctggtggctccgctgctgccggaagacgagcgcgttgcgttgctggccgctgagcggctggtcctgccggcgggcatcgtctaccgcgatgggcggtga

SEQ ID NO: 353279 - DNA, 2739 bp, Pseudomonas aeruginosa
gtgcacgtagctctcgtagaggatgccgaggacgatgtacaccgccagcagcgccaggaggatcagccagggcatctggttctgcgtgtcctgcaccgcgccggcgttgccctcgaagctggtctgcacgtccaccgggatgtgcagcggctccagggcctgcatgatggcctcgcgggtcgggccgatctgcgcgcccggtgccaggttgaaggacagcgtggtggcggcgaactggccctggtggttgacctccagcggtgcccggctcggttcgtagtggctgaacgcggacagcggcacgcgctggccgtcgttgccgatcacctggacctggcggaggatctccgggctctgctggtactgctggtcgacctccatcaccacccggtactggttcagcgggttgaagatggtcgacacctggcgctggccgaaagagtcgttgagcaccgcgtcgaccatttccacgttgatccccagggtcgccgcgcggtcgcggtcgatcaccaggcgggtctgcacgcccttgtcctgggagtcgctgttgacgtccaccagctgcggcagcttgcgcatcgccgcctcgaccttcggcgcccattcgcggagcagggtcaggtcgtcgctgcgcagggtgaattcgtactgcgcgttgctgtcgcggccgcccaggcgcacgtcctggccggcgttgagatagagcgccgcgccgggcaccttggcgatccgctcgcgcagccgggtgaggaccttctccaccgggtcgcgctcgccgatcggcttgagggtgacgaagaacgaaccggtgttgctcgactgccaacggccgccaccgatgaagccgaccacgttttccaccgccggatcggaagagaggatcttgcggtactcgcccatcttcgcgctcagggactggaacgagatgctctggtcggccaccgcgtagccgcgcaggcgcccggagtcctgctgcgggaggaagcccttgggcaccaccacgaacaaccagaggttcatggcgatgcaggccagcatgatcaccaccatcagccgcgagtgctccagcgcccagcccaggctggcgcggtagcgcagcatgaaggcggcgaagaagcgatcgctgcgccgcgccagggaagcgccttcgggccgtttcagcggacgcagcagacgcgcgcagagcatcggcgtgagggtcagggataccaccagggacaccaggatcgccgccgagagagtcaccgcgaactcgcggaacagccgtccggtgaggccgcccatgagcagcagcgggatgaacaccgcgaccagcgagagcgtcatcgacagcacggtgaaaccgacctggcgggcgccggtgatcgccgcctggatcggcggatcgccctcctcgatgcgtcgggcgatgttctccaccaccacgatggcgtcgtccaccacgaagccggtggcgatgatcagcgccatcagcgacaggttgttcaggctgaagtcgcacaggtacatgaccgcgaaggtgccgatcagcgagaccggcaccgccaggctggggatcagcgtggcgcggccgttgcgcaggaacaggaagaccaccaggatcaccagcgccaccgagatcagcagggtcagctcggcctcttccagcgacgcacggatcgacgggctgcgatcgtccatcacgttcagcttgacctgcggcccgagcagttcctgcaacaccggcagttgcgcgtggatggcgtcggtggcctcgatgatgttggcgccgggctggcgggtgacgatcagcagcaccgccggcaggtcgtcggaaaagccggcgttgcgcacgtcctccaccgagtcgctgaccttggccacgtcgccgaggcgcaccgcggcgccgttgtcggcgttgtagtggatcaccagcggctcgtactcgcgggccttgcgcaactggtcgttggcgtccacctgccagtgcttgtcgtccttctcgacggcgcccttggggccgttgctgttggccgcggcgatggccgtgcgcacgctgtccagggacagcccgtactggctcatggcatccgggttgaggtcgacccgcaccgccggcagcgagctgccgccgatgctcacctgccctaccccctgcacctgcgacagcttgggcgccagcacggtcgaggcgaggtcgtacatctcgccgcgactctgggtctccgaggtcagggtgaggaccatgatcggcatgtccgaggggttggccttgcggtagctgggattgttcggcataccgctgggcagcaggctcatcgcgccgttgatcgccgcctgcacctcgcgggcggcgccgtcgatgtccttctccaggtcgaacacgagcaccacggtggtcgagcccagcgaactgctggaggtcatctcgctgatcccggcgatccgtcccagcgagcgctccagcggcgtggccaccgacgaggccatggtttccgggctggcgcccggcaggctggcgctgaccacgatggccggaaaatcgacgttgggcagcggcgccaccggcagcaggccgaacgacagggtgccggccagcagcaacgccagggtcagcagcgtggtggcgaccgggcggcggatgaagggcgtggacagactcatcgcccggcgtccccgtcgaacccggcctcggtgttcaggtccagcccgcgctgcttgcgccaggccgcccagcgacgggccaggcggtcgaagtag

SEQ ID NO: 353280 - DNA, 1050 bp, Pseudomonas aeruginosa
atggggatcaaggcctcggccacctgcgtgatgaacttcgacggcgccaccggcttcctcatcggaccgccgaacaagggcctggaatgcatgttcaccttcatgaacagcgcccgcatcggcaccgccatccagggcgtggccaccgccgagctggcctaccagggcgccctcgcctacgcccgcgaacgccgctccatgcgcgcgctctccgggaccaaggaacccgaccaggtcgccgacagcctgatgcaccacggtgacgtgcggcgcatgctgctgacccagaaagccatcgccgaaggcggccgggcgctggtctacctggccacccagtacgccgaccggatgatccagggcatcctcagcaacgacgacgccgaatacgaacgctgggacgacaagctcggcttcctcacgccgatcctcaagggctgcctgaccgaactcggcctggaaagcgccaacctcggcatgcaggtgttcggcggccacggctatatccgcgaacacggcatggagcagatcgtccgcgacgcgcggatcgccaccctctacgaaggcaccaccggcatccaggccctcgacctgctcggccgcaaggtcctgctgatgacccagggcaaggccgtgcgcgacttcaccaggggcgtggcccggttcgccgtcgacctgctgaagaacgagccgcgcatgcgcggccgcgccctggtgctgctcaagctctgcgcccaatggaacctgctgaccctgcgcattgccctcaccgcgcgcaagcaacgcgatctggtgagcaccgccagccacgactacctgatgttctccggctacgccacgctggcctattcctgggccctccaggaagccgctgcgcgccggcgactgcgccagggcggcagcgagtcggcggacttctacaaggccaagatcgccaccagcgagttctacttcgcccgcctgcttccgcgcgccaagggccacgcggcggcaatggcgaagccgacgggttcgatcatggacctgaagagcgagcacttcgccttcgactga

SEQ ID NO: 353281 - DNA, 669 bp, Pseudomonas aeruginosa
gtgcgggagatcggcgaggccgaggtcgagccctatctcgacagcctcgacgtgctgctggtggtcaacccgaacaaccccaccgggcgggtcttcgagcccgccgagctactggcctggcatgcccgcctgcaacgtcgcggcggctggctgctggtcgacgaggcgttcatggactgcaccccgcagtcgagcctggcggcctgcagcaaccggcccggattgatcgtgctgcgctcgttcggcaagttcttcggcctggccggcgcgcggctcggcttcgccctcggcgaacggccgctgttgcaggcgctggccgagcagctcggtccgtggacggtcaatggcccggtgcgccatgtggcccagagtgccttgcgcgaccgccagcaacagcgccagcagcgcgagcgcctgctggccgccagccagcgcctggaggaactgctgcgccgccacggctggccgccggcgggcggcagcgcgctgttccagcgcctggtcgatccacgctgcgcggcgttgcacgactacctggcgcggcgcggcatcctcacccgccagttcgagcagccggccagcctgcgcctcggcctgcccgccgacgaggccgcctgggcccggctggatgccgcgctgctcggcttcaaggagcctgctcatgagtga

SEQ ID NO: 353282 - DNA, 1473 bp, Pseudomonas aeruginosa
atgagtgatcgcggacggaccctgatggtccagggcaccacctcggacgccggcaagagcaccctggtgaccgcgctgtgccgctggctggcccggcgcggcgtcgcggtggtgccgttcaagccgcagaacatggcgctgaacagcgcggtcaccgccgacggcggcgagatcggccgcgcccaggcggtccaggcccaggcctgtcggctggcgccgcacaccgacatgaacccggtgctgctcaagccgaacaccgacatcggcgcccaggtgatcatccatggccgcgcggtgaccagcatggacgccgccgcctaccacgactacaagcgcgtggcgatggaagcggtgctggcttcccatgggcggctcgccgccgcctaccgggtggtgatggtggagggcgccggctcgccggcggagatcaacctgcgcgccaacgacatcgccaacatgggcttcgccgaagcggtggattgcccggtgatcctggtcgccgatatcgaccgcggcggggtcttcgcccacctggtcggcaccctggaactgctctgcgactcggagcgggagcgggtcaagggcttcgtcatcaatcgtttccgcggcgacatcgccctgctgcaacccggcctcgactggctggaggcgcgcaccggcaagccggtgctcggcgtgctgccctatgtcagcgacctgcacctggaggcggaggacgccatcgacacgcgccaggcggccaaggtcgggccgcgcctgaaggtggtggtgccggtgctgccgaggatcagcaaccacaccgatttcgatccgctgcgcctgcacccccaggtcgagttgagcttcgtcggccccggccaggcgctgccgtcggcggacctgatcgtcctgcccggctcgaagagcgtgcgcgccgacctcgcggcgctgcgcgagcgtggctgggacgaggcgatcctccgtcacctgcgctacggcggtcgcctgctggggatctgcggcggcctgcagatgctcggcgagcgcctgcacgatccgctcggcctggaaggcgcggccggtagcagcgctggcctcggcctgctggcgttggaaacgaccctggaggcggacaagcaattgcgcaacgtacagggccgcctgagcctggaggatgcgccgctgtcgggctacgagatccatgccggagtcacccgtggcgaagccctggcgcggccggcggtggtgctcgacgatggccgcgcggatggtgcccgcagcgtcgacgggaacgtcatgggcacctacctgcatggcctgttcgaatccaccgcggcctgttcggcgttgctgcgctgggccggcctgcgcgaggtccaggcggtggactaccaggccttgcgcgaacgcgacatcgagcggctcgccgacctggtcgagcgccacctggataccgggcgattgctcgccctctgcggagaaccccatgcgtga

SEQ ID NO: 353283 - DNA, 522 bp, Pseudomonas aeruginosa
atgcgtgacctgatccttggcggcgcccgttccggcaagagccgcctggccgagcgcctggccgccgagagcgggctggcggtgagctacatcgccaccgcccaggccggcgacggcgaaatgggccggcgcatcgccgagcaccgcgcgcgccgcccggcccactggcgaaccctggaggagcctctggcgctggcggcgacgctgcgcagcgaggccgaggccggacgctgcctgctggtcgactgcctgaccctgtggctgaccaacctgctgctctgcgacgatccccagcgtctcgacggcgagcgcgaggcgctgctggaatgtctcggcgagctgccgggacggatcatcctggtcagcaacgaaaccgggctcggcgtggtgccgctgggcgaactcagccggcgctacgtcgacgaggccggctggctgcaccaggccatcgccgaacgctgcgaacgggtgaccttcaccgtcgccggcctgcccatgccgttgaaaggagaaccgctatga

SEQ ID NO: 353284 - DNA, 1056 bp, Pseudomonas aeruginosa
atgagtctgcaatggtggcgcgacacctgccgcgaggcggacccgcagatgcgccggcgcgcggccgaacgccaggaccggttgaccaagccgcgcggctcgctgggccgcctggagcaagtggcgatcgacctggcggcgttgcaggggcgcgaacgaccgagcctggagaggatctgggtgacggtcttcgccggcgaccacggagtagtcgccgagggcatctcggcctatccgcaggcggtcaccggcgagatgctgcgcaacttcgtccgcggcggcgcggcgatcagcgtgctggcgcgcgaactcggcgccggcctggaggtggtcgacctgggcaccgcgttccccttggaagccttgcccggcgtgcgtcacctgcgcctggcggcgggcaccgcgaacttcgtcgaggccccggcgatgggcgccgaacagtgcctgctggcgcttgaggccgggcgcgaaagcgtgcgccgcgccgagcaggccggcagccagctgttcatcggcggcgagatgggcatcggcaataccaccgcggcggcggccatggcctgcgcgctgctggatgcgccggtgagcgcgctggtcgggccgggaaccgggctggacgccagcggcgtggcgcacaaggccgcggtgatcgagcgtgccctggccctgcacggcgcccatcgcgccgaccccttcgaaaccctccgccgtctcggtggcctggagatcgccgcgctggccggcgcctacctggcctgcgcgcagaaaggcatggtcgccctggtcgacggctacatctgcagcgtcgcggcgctctgcgcggtgcgcctgaacccggcctgccgcgactggctgctgttcgcccacagcggtgccgagccgggccatcgccatgtgctcgaagccctggcggcgcaaccgctgctcgatctcggcctgcgcctgggcgagggcagcggcgcggcgctggcggtgccgctgctgcgccaggcctgcgcgctgcacgcggggatggcgaccttcgccgaagcggcggtctcggaccgcccggcatga

SEQ ID NO: 353285 - DNA, 246 bp, Pseudomonas aeruginosa; identical to SEQ ID NO: 321821

SEQ ID NO: 353286 - DNA, 1182 bp, Pseudomonas aeruginosa
atggagagcatgctggacaggcccgagcaggaactcgtgctggtggtggacgacaccccggacaacctgctgctgatgcgcgagctgctcgaggagcagtaccgcgtgcgcaccgccggcagcggcccggccgggctgcgggcagccgtcgaagagccgcgcccggacctgatcctgctcgatgtgaacatgccgggcatggacggctacgaggtctgccgacggctcaaggccgatccgctgacccgcgacatcccgttgatgttcctcactgcccgcgccgatcgcgacgacgagcaacagggcctggccctgggcgcggtggattacctgggcaagccggtgagcccgccgatcgtcctggcgcgggtgcgtacccatctgcaattgaaggccaatgccgatttcctgcgcgacaagagcgaatacctggaactcgaagtgcgccgtcgcacgcgccagctgcaacagttgcaggacgccgtcatcgaagccctggcgacccttggcgatcttcgcgacaacccgcgcagccgccatcttccgcgtatcgagcgctatgtcaggctgctcgccgagcacctggcggcgcagcgggcgttcgccgacgagctgactccggaggctgtcgacctgctgagcaagtcggcgctgttgcatgacatcggcaaggtcgcggtgcccgaccgggtcctgctcaaccccgggcaactggacgccgccgacaccgccctgctacagggccatacccgcgccgggcgcgacgccctggccagcgccgagcggcggctcggccagccttccggattcctccgcttcgcccggcagatcgcctacagtcatcacgaacgctgggatggccggggctttccggaaggccttgcgggcgagcggattcccctggcggcgcggatcgtcgccctggccgaccgctacgatgaactgaccagccggcacgcctaccgtccgccgctggcgcatgccgaggcggtgctgctgatccaggccggcgccggcagtgaattcgacccacggctggtggaggccttcgtcgccgtggccgacgctttcgccgaggttgcccggcgctacgccgacagcgccgaggcgctggacgtggagatgcagcggctggaacaggcggtggcggaaagcatcgaactcaccgcgccaccggcctag

SEQ ID NO: 353287 - DNA, 894 bp, Pseudomonas aeruginosa
atgcctgttgcacatatcctgctcgccctgctggtgaccctgatctggggtctgaacttcgtcgtgatcaaggtcggcctcggcgacttcccgccgctgctgttctgcgccctgcgcttcgccctggcggcgctgccgctgctggtcctgcgcgggccgatgccggcgccgttcggacgcatcctgctgatcggcgtgctcctcggggtggtcaagttcggcctgctgttcgtcggcatggcccaaggcatgccggccgggctgtcgtcgctggtgctgcagagccaggtattcttcaccatcctcatcgccgccctgtggctgggcgagcggccgacgccgcgcgggttgttcggcctcctgttggcggcggcggggctggtcctgatcggcctggaacggccgctgggagacagcctgctggcattcctgctggtggtcgccgcagcgctggcctggtccttcgccaatatcgccaccaagcgttccggggccactgacatgctgcgcctgatctgctgggtcagcctggtcccgccgttgccgctgctggcgctttcctatgtattcgaaggtccgcacgccatcgagcgcgccgtgctgaacatgagctggggcggcttcggcgcgctgctctacatcgccttcggcgcgaccacggtgggcttcgccatctggagtttcctcctgcgccactacccggccagcctggtgacgccgttcgccctggcggtgcctgtgtcgggcatgctcgccggctggctgctgctcggcgaacgcctcgacctggacagcctgctggcctgcgcgctggtgttcgtcgggctggccatcaccctgttgccggccagcctgctgcgacgcttcgcctggccggtgcggcggttgggatga

SEQ ID NO: 353288 - DNA, 963 bp, Pseudomonas aeruginosa
gtggctcaactagttgctttccgtaatgctcagggaaacctaggattgatccagaaggacgggaatcacgtaagttattacgtccatacagatcaagagttttacaaaatcacgggttcaaacggctgggcgagttgggtcggtcaagtcgacgcaggctatgcggaaggttgtaaagagaaaattacagtcgaaagcataagatattatatgaataactatgctgagactttaagccttgatattgtcgattttgcagagatcctaaatccgggggtatattaccctcgaatagtaagagaaaacattcagttcgactacgtgagtgaagagttcttacaggatgcaagagcctttagaaatattcagacatctctagatgagctttttaactatattgagccatcagcggctaatctcgcagcatatgggcataagatcagagagttgctgattcttgcgtgcacagaagttgagtgtttgttggtgaaagtcttggtggataatggatatccagcaaaagagagatactcaacaaaagattatgtggtatgcaaatcccttttggcacttcatgagtacgaagctaatttagtgcaatatcctagtcttaaagtgtttaatccatttttgagttgggattcaagttcgccaactaagtcgctcccttggtacgatgcttataatgcagtaaaacataacagaagcgacaatatagcagatgctaatttagagcatttgcttgatgcaatctcggcaattcatattttgcttgaaagccagtatgggcgaaatatatttaaccgttgggatggccacactgatgacaagagcatatttagaacctcaaggcatccagtgtgggcatgcaatgaaatatgtgccccgttgttaattcctggatacagcgtgaaatcacaatggacggaaaagcataagtattttgaggatttccctagctaa

SEQ ID NO: 353289 - DNA, 798 bp, Pseudomonas aeruginosa
atggcccaggcaatagcccaccagcaggccgagcggaatcgcccagagcacgtcgcgcagcagccagtccaggccgctgcggtcgaactccccgggcaggccgccgccctgaccgatcagcagcagggcggcgatgacgaaggggaaggcgatgccgtcgttgagtcccgcctcgccggatacggcgtagcgcaggcggtcgtcgtcgccggcgtggttgacctggatgtcgctggccagcaccggatcggtgggcgcgaggatcgccgcgaccagcaaggccagcccccagtccaggccgaacaggaaatgcgcgcccagggtaaggccgaggatacagccgagcaggactggtccggccagcagccaggcagcggtccaggccggcgagcgcaacggcaggcgcagcttgaggccgccgatgaacagcgagatcagcaacgccgcctcgctgaggtgttcgaaccagccgctgatgtccgccaggccgctgcgccaggcgtgcagcccggccgggccgatggccaggccgaacagcaggtagatgaacgaggtgctgaccggcagcaggcgcaggtaggccgaagccaggccgagcgtcagcaggatgcagcccagtaccagcaaccacaggctgaaactcatgcctggccaggctccgcccgcgggggcgttacttggatgggtgcgccttggccagcgcgcgggccatctccaggtgatgcttcagggccggcagatgggtcttggcgaatgcctgcagttccgggtcggtcaggttgtccgcggcctgggtga

SEQ ID NO: 353290 - DNA, 2619 bp, Pseudomonas aeruginosa
atgacctatcgccatgaacgccgctgccgcaccggcacggccctgatggcgggcggcatggcgctggcggcgagcgccttcggtcatgcccagcccggctacgaattcgatgatcgcctgttgctcggctcttccctgggcggcggcgacctgtcgcgcttcaaccaggacggtcggatcgatccgggtcgctatcacgtcgatgtctacctcaacgagcgcttcgccagccgcagcgaagtgagtttccgcgccaaccccgccagcggcgcggtggagccctgcctcgacgaagacttcctgcgccagcgcctcggcgccaagcctggtgacgatccgcgcaagagcggcgacgggcgccactgcgcctttctcggtgcacgcctgcccggctcgcggttcagcctggacgtcgcccgcctgcgcctggatctctcggtgccgcaagccttgctcgacctcaagccgcgcggctacgtcagccccgaggagtgggacgccggcgacagcatgggcttcgtcaactacgacaccaacctctatcgctccgaataccgcggcggcgaatcgggacgatcggactacgcctatgtcggcctgaacagcggcatcaacctcggcctgtggcgtttgcgccaccagtccaactacacctattcccgctacaacgggcaggccaggcgcaagtggaacagcatccgcacctatgcccagcgcgccttgccggcctggcgcagcgaactgacggcgggggagagctacaccgccggcaacctgctcggcagcatcggctaccgcggcctgagcctagctaccgacgaccgcatgctgcccgagtccctgcgccgctatgcgccgcaggtgcgcggcaccgcggccaccgcggcgcgggtggtgatcagccagaacggcagggagatccgcgaggtgaatgtcgcccccggtccgttcgtcatcgacgatctctacgacagcgcctatgccggcgatctggatgtccaggtgttcgaagccgatggcagcgtatcgagcttcagcgtgccgttcgcctcggtcccggagtccatgcgtcccggcctgtcgcgctacagcttcaccctgggccaggcgcgccagtatggcgacggcgacgacctgttcgccgacttcacctaccagcgcggcatgagcaacgccctgaccgccaacctgggactgcgtgtcgccgacgactacctggccatgctgggcggcggcgtcctcgccacccgcttcggcgccttcggcctgaacagcacctattccagcgcacgcgtcgaggatggcgcgcgcaagcagggctggcgcatcgggctcgactacagccggaccttccagcccaccggcactaccctgaccctggccggctaccgctattccaccgaaggctaccgcgaactcggcgacgtgctcggctcgcgcgacgcactgcgccacggggacacctgggattccggcagctacaagcagcgcaaccagttcaacctgctggtgagccaggccctcggcggttacggcaacctctatctttccggctcctccagcgatttctacgacggcaagagccgcgacacccaattgcagttcggctactccaatacctgggggcagttgagctacaacctcgcctggtcgcggcagaccaccacctactaccaggagcagggcgaccaggaccctggcgtcgagctgctccggcgcgaccggcgcagcggccagcgcaacgacaccctgaccctcagcgtctccatgccgctgggttcttccagtcgggcgccgacgctcagcgccatggctacccggcgctccggcgacagccgtggcggcagcctgcaaaccgggctgaacggtacgctgggcgacgagcgtacctggagctacgcgctgtccgccaaccgcgacagcgaggtcgccgacaccacctggaacggcacgttgcagaagcaggcggcgctggccaccgtgaatgccggctatgcccagggcgatcgctaccggcaatacagcggcggcatccgtggcgcgctggtcgcccaccgcgacgggctgacccttggccccagcgtcggcgataccttcgccctggtcgaggccaagggcgccagcggtgccgcgatacgcggcgggcagggcgcgcgcatcgacggcaacggctatgcgctggccccctcgctgtcgccctatcgctacaacccgatctcactcgatcccgttggcatcgatcccgacgccgaactgctggaaaccgagcgcaaggtcgcgccctacgccggtgccagcgtgcgcgtgacgttcaggacgctgaccggccatccgctgctgatccaggcgcggcgcgaggacggcagtgtgctgccgctcggcgccgtggtggtcgacgacggcggggcggccatcggcatggtcgggcagggcggccaggtctatgcgcgcgcggaaaaccagcggggcaggttgctggtgcaatggggaacggcgcgcaaggagcgttgcgagttgccctacgacctggccggtgtgtctcgcgaccaggcgctgatccgcctgcgcggcacctgccgggcagccaccaccgactccaacctggagaacgccagatga

SEQ ID NO: 353291 - DNA, 1104 bp, Pseudomonas aeruginosa
gtgcgtgcgctcgtagccgtgggtggcgtcgcagccgaacgccagcagcgcggcgcgggtgtcgtggccggcggcgatcgccgactgcgcgtcgctgtggtagtagcggaacaggtcgcggcgcagggcgatgtcgtggcgctcgccgagccgcagcaggtgccgcgacagatggaagtcgtagggcccgccggagtcctgcatggccacgctgacgctgtgctcgttggaattctggccttcggccaccggggcgatgtcgatgccgacgaactcgctgacgtcccagggcagggcgccggcggcgccggagccgacttcctcggtgatggtgaacagcgggtggcagtcgatcggcggctcctggccgctttccttgaccgccttcagcgccgccagcagcgccgcgaccccggccttgtcgtccaggtggcgggcgctgatatggccgctctcggtgaactccggcagcggatcgaaggccacgtagtcacccaccgagatgcccaggctctcgctgtcggcgcgactggcggtataggcgtcgagacgcagctcgatgttgtcccaactgatcttcaggttgtccacctcggtattgaaggcgtggcccgaagccagcagcggcagcacgctgccacggaacacgccctgttcggtgaacaccgtgacccggctaccctcggcgaagcggctcgaccagcagcctaccggggccaggccgaggcggccgttgggcttgatctcgcggaccagcgcgccgatcgtgtcgaggtgcgcggaaaccgcccggtcgggggtattcaggcggccctggagggtcgcccggatggttccccggcgagtcatctcgaagggcacgccaagttcgtcgagctgctcggcgacatagcgcacgatggtatcggtgaagccggtggggctggggatggcgagcatctccagcagcacccgttgcaggtagttgaggtccggttgtggcagaggggtcatgaaggcacctcgcggctgagggggaagagaagatcgacgaagcgttcggcggtcggctgcggctcgtggttggccaggccggcgcgctcgttggcttcgatgatcacgtag

SEQ ID NO: 353292 - DNA, 888 bp, Pseudomonas aeruginosa; identical to SEQ ID NO: 345786

SEQ ID NO: 353293 - DNA, 1071 bp, Pseudomonas aeruginosa
atgaacaacttcatttcatttaatgccaaatactacaaagattctaatgcgtctggtgagattggccatgttcaacgtgttttcgctgaaaacactaatcaaatcagacaattcgccaaagataactttggctgtggttatagcatatatgaccgatacaaagagatttacaagcaagtagaagaagttaaaggcaagaaaatacaaagcaactccaatactttcatggacggagttttgtcattctcaagagaccaaatgtttgagttgatgaaagagccaaactggaaagagtctttttctgaacatattgagcaatacatgaaggacgttcaagaaaagaccggcttagagccgttaggttgggaaatgcacatggatgaagggcataaagaccctgaaacaggtgaatttaagatgaattaccacgcccaattgatattcttcaattatgattttaagacgaacaaagccccgttgcgtgacctcatgggccgcaaaggtgattccatctggtcaaaacttcaagatttggctggtcaagtgtttcaaccgttggggttcgttcgaggcgtatctaaggatatgacgcatcaaaaacatgtcgagaaggatgtttttattgcacagaaacaggcagagctgaataggcagcaagctcatatagataatgctttgaaggaaaatcaagagctgttagagcgagcagcattaattaccgatgagatcttagatgaagcaaatcaagctattgaagttataaacgctagggagatcaagaagaaagctgagatcgagttgagggatagaattgagaaaaatgtaaatgggttgaaaagaatcgttgaagagcatcccatagttagtagtttagctgggacgttcaagtcaaagttccccgaatttacagaggtcgttattaagacatataagcagttgttagaattttttagaatagatgattctggtgatccacaaaacgttttaaagaatactaagtctaaaatagcggaggctagggttctcaatgatgaaattaagagaagaagccttcgcaaagctaagatttaa

SEQ ID NO: 353294 - DNA, 1656 bp, Pseudomonas aeruginosa
atgcctaccgcctatgcctacatacgttactcatccaaagctcagggtgaagctggtaaggactccgtagacaggcagatggcctcgatccaagccattaccaagcagcaaggcattgaactgcgatctgaaaatattttcagtgatacaggtatatccgggtttgatggatcaaacaaaaacaaaggaaaactcaaagatcttatcgatctaatagttaaccaaaaaattcaagaaggtgattttgtctttgtcgagtcaatagaccgattgtctcgacaaaaaatgagattatcaaaagatcttgtttatacaattttagatcgcggcgtaacacttgtaaccacaattgatgggcaaatgtataaccgtgccaaagatggtatggaacaagacattatgctttctgtgatttctacccgtgcccacgaagaaagcaagactaaatcagtccgaagaaaatcggcatggaatagagctaaaaaattagcagatgaagaaaaaaccatttttaactctcataatccaccatacggaatttcatacaacaaagaaaaaaattgttttgaagtagtagaagatgaggccaaagaaatcaatgatatttttgaaagcctaaaatatgttggtgtatctctaacaattaaaaaagttaatgaatactcaaaacgcaaatggacaaacagaaatattaagcacctcttagatactaagtatgtgcttggctcatatatggctcaaaaaagagatgaaaataaaaagaaaatttttgaacgatacattgaaaactattaccctcaaattgtttcttttgaactattcaatgaagcagttgcttcaatgaaacaacgagcacatagaaagcactatggtaatcaaacagttggaagcctgaacatatttagacactccattaagtgtagcaattgcaatgcttcaatgctttttgaaaagcaaacaaatccaaaaggtattatttatccgtacttccagtgtttcacaagaaaagaattgaggaatggctgtgaccagcctcgattcagatttgatctagctttcgggatacttctacagctagtaaaatttgcaacaagtgctactcacttggacattcttaatacaactgaattcccgcctgaatcagttggatcattccaaaaaaccttattcaaacttttaacaagcacagaaaaagacaaagcacttgaagaaaaaatttcacatgttaaaaatcttctgctcgaacagaaaaactaccaagacaatctaaacaaatcttttgatgcatatactgacggaatcattccatcatcattcattaagagagcacaagaaacggaagttagaattgaaaaactagaaagagaactggcagaactgaacactgaaaattccacgagatatacatctttaatggttcattcctacaacgacattatcgatctctacaaaacagaaaatggccgactgaagttaaataacttcttcaccagtaacaatattactttcagtttcttattcaaccagaaaagcaggcttttaaactgcaaaatctattacaagggagttcatgttgacagggtgaacaagactttcccactacacaacccactaaaggaatttggcattttcaatctaaatgagtattttaattag

SEQ ID NO: 353295 - DNA, 489 bp, Pseudomonas aeruginosa
atgaccaccattcccgattcgattcacccgagtgaacttcctgaaatcggccaacccctggccgatggaaccttctttgcccgccactggctcaatggcaaggagtacgcctacatcgatctcggcaagagcgcagagttcactggcgaatggggcgagtggggccagaacgtgggcggcgccgtcagctacagagacggatcttcgaatacggtagccatggctgaggctggcagcccgattgccaagcaggctttggagatcggagccggcgtattcattccctctgctctggaactggctcttctgttctccgccaaacaagcaggcgagctgcccggtttttcggatcgctggtactggtcgagttcgcagtactccgccaaccgcgccttcggcacgggcttccacgacggcaacacgaacgacttaagcaagacgtgcgtcctccgtgtccgccccgtccgcaagattctcatccttcagtag

SEQ ID NO: 353296 - DNA, 228 bp, Pseudomonas aeruginosa
atgagcgatttcaagaactggatagaggatgtagatatcggcaagtgcggtaacggatattttgtccgaattgatggatgcgacatctttgaaagtatcaaccagtacggatgcaaggcccgcagaagcctatcgatcgcagagtgtcttggtagtaaggaagaagctaaagcatctgctatcgaatggctggagaaacagctagcaaaggtaaaggccaccgcctaa

SEQ ID NO: 353297 - DNA, 180 bp, Pseudomonas aeruginosa
atgcccgcactgatcatcatggatgcagacccgaactacccggaagactggaacatcctgcaagacgaagacggcatggaaaaccgcgtcttcgaaagctccgatgccgccagcgcatggctggagcgaaacgccaagaacggctggtgcacgatgatccttccggtcgacgaagactga

SEQ ID NO: 353298 - DNA, 315 bp, Pseudomonas aeruginosa
atgacaacccctatcgtgcaatcgatcagtgatgaaaggttggcggaagtagagagtcagtacataggggaccgctcccggcttgattcaactgtaatcctgtgtggaacgctagctgacattatcgcccgccttcgcgctgctgaggctgatgctaagcgttatcggtggctgcgtgacagcgggcgtctgctcggcgatagcatggactctcacgcggacaacttctgcgtagtcacggctgacggcgaggacgtcatgtggtttgagcaactggattcagccatcgacgctgccatggagcgcacgccatga

SEQ ID NO: 353299 - DNA, 261 bp, Pseudomonas aeruginosa
atgagcgactttcgagtttggtgccctgactacggtcaggaagaaggcgacgcgatgcatatccgcgacgcttatgaccatgccgcagcggccagggaatgggcggagcggtatgaacgacagaacgccgaatacccgattgccgatggtgggtgtgttgttgtgatggttcatcgcgccggagagggaacgcaggcatttactgtctccggatacgcgcaacccgcttacaccgcgaatgcgatcagggagatgccatga

SEQ ID NO: 353300 - DNA, 465 bp, Pseudomonas aeruginosa
atgagtgaggtgaagcgtttctggtgccatgaggcgcggaacattcggtgcgttcgggaggcggactacgacgccctcgccgccgaggcccaggcgctcagggaggaagtcgcggccctgaagcacagccagcaggttctaattgggagccgtaacgcgcatagagacgagcgtgatgctgcacgcaaggaagtcgcggcactgcgcgcaagggtggtggttacgcctgatgcgagcacggtgtacgcggcgctcgatgctcgggagcggttattcacaagtcctgagaacattcaggtagcgctggaagctcaatcgcgcctcaacggcaagacggtcagcgaggggctgctgcggaggatcgcggcgccagtcaataaccaagatgaacttgatgctgtgcatgaggcgcggatcgaactccgcgccctgctcaaccaggaaaaggagaacggcaatggctga

SEQ ID NO: 353301 - DNA, 465 bp, Pseudomonas aeruginosa
atgagaatgaccaaccagcataagtccgcctccgacatcaagtgcgtggcggcagcagagcagaagcgatcacgcaggagacagcgcctgattgatgtcactcagccggttatggatcaccctagaccggaggtggagacgctttattggccggccatgctcgcgtacgaccgcgagcagctcctccagaaaatggcagcgttgcgtgaagtgcgccggctggtgcgctgcaaaacctatcgcgacatcctgcgttacatagaggattgcgaccgcacaagcgacttctcgatcgtttccgcgcctggaacggagcgagataggcaggacgaaaggccatatgccttcaagtacgcctatgtgaaccagtacgagaacggtggctataccggcgatagctatgcgggatgggtccatatacctcttaacgcaggaaaattcctgagatttcactatgcgatgtga

SEQ ID NO: 353302 - DNA, 390 bp, Pseudomonas aeruginosa
atgagcctggacattctcaacgagttcacgaaggacgaaatcctcgcatacatgcgtgagaagaaccctccgctcatgaggatcagaaggagcgatcttctgttcattcgatggcagcagcagagcgaaaaactgggagctgactatcaggcagaacaagatcgctggaagcgcgaaaagcccgacttcaagcggagggacgaattggcccgacagttcaacagcgaaacccgcgccgccgaacaactgcgccttcttaaagaaatcgagccgttcgaccgagccctgcaagatcacatcgcgcgctgcaaaaagctggaccggcgccaggcacaggttgaccgactgtaccaagaactggaatcccaacaatgcagggagggggtgtga

SEQ ID NO: 353303 - DNA, 1035 bp, Pseudomonas aeruginosa
atgaccatacaaacaccaggaagtagcacttcatcggccgattattcagcgatcgtcaaggtcacgccttttacccaaattctttctacagaggcgctttttgacaaaagccacaagctgagcaaattatctccaatagatgagtttattgagaatgctaacaaattaaatttactttggattaatcatgatgaaatctctagtgagtttgccagcattctttttctagggtatttttcggcggtagaaagttatgttcgtgcacttgtaagaaccttaatacagactgatatttactctcagaagtgcgcggaaaaccagcagattactttcggggcggctctacaccataacaagcagctccttccagaggctctgatggataatcattcatttacggcctctgaaaacatacttaagacattcaagagcctcactgatatagagttggttattgatgaggctatcacaactgagctggacaaaatatgccagctaagacattgctgcgtgcatagatttggcaagcttggtgcaaagaacgccatggcccttggtctgacctcgcatagcaaactttttgagaagcctttaacgctaagtagagatgatctgctcttggtgtccagcacgctaaggtctgttgttaagacaattaataacgctgcatataaagccgtcttagatagaacattccctacggtcccagttggtaagggcgataaaaagagattgcctaagtcgttatggtcaaaagactatgaggcagacaaggaacttttcataaaatactacaaagtgttctcctcaacaaataaagacgaatcaccgaagatgaaggagatgtacacgcgcttcatcgcggaaaaagaacaggctctgcagaaaatatctaaaggtgcggccaagaaacctaatattccgcagggccaaggtgatgctaatggccacccgcaaggcgatactagccaccagcaggaaaataacgctgttgatgtacctcaagagcaagtggctcaagaaggcgcgaaatag

SEQ ID NO: 353304 - DNA, 1731 bp, Pseudomonas aeruginosa
atggaaaccgagatcaacgaaatagaaatcgatattgctttagagcaaagagccgattacataacaagcaaagagctcaaggacggaactgcgacaagcgatttctttgacgaaataatttcaactcttctaaagaagcaaacaacgcttattgtcggtccgcgtggttgcgggaaaacgcacatgatgcgctatgcttcaattttatgtaaagatgatgtaaaaaaacctctagcaatctatgtttctttcaatagatattatcggctagagcctatgctgattagtcgcgccaatgcgataaacttgttccatacatgggtgttgtcccggataattgtcgcagcacacgagactttggctgagcaggatgaagtattttccgaagatgagctgcaggaagcgctagaatatattgatataagcgatcttcagaatttaattgctaagcttgagcgcagcctgcctcttacgcaagatgaactagacctcgcaaatagcatcaccctgcacaccaccaagaaaataattgataaccacactagcctagggaacagaccccgagcgattctactcctagatgatgcagctctaacactcaccccagagtacatggctgagttctttgagatattccgtagcataaagagtccttacatatcccctaaggcctccgtttatccaggaacgactgagtatggagcgagatttcatccgacgcaggagggtgggtttgagcatgtttggctgtccgtctctagtccgcactatattgaaacaatgctctctatcgcagctcatagaatccctgatttttcgagcatccctgatgagatccgccaatacttagcctatgccgcttttggaataccaagggcctatttgcatatgataatggagtttcagaggaaaaaattctccactgttcagcaaggtctgaacaggatagtccaaagccataccgaggcacgaatcgaagagtttttaactctcgcaataaaagccccaaaattaaaaacgataatagagcaggggaacgcacttttcagtaagcttgtcctgcttctaaaagagttcaacgataagttggccccctcggggactaagcagctgcttatcgggataacagggataaaggaccagccaatggttgagcgtatgttcaatcttcttatagaagctggacttctttatccggtagcagaaaaggtctcgcatggcgaagaccgaaaatatgacagatatacccctcacattgctgcacttttgcacgagcgagccttttctgcgaaggctagaggctggtctgcacgaatagttgtcgacaaaataaatcaaaaaaccagtaggcaacctttacggcgctctgtctcaagtctgttttcctcagaagaactttcgtcgctgaagtttgatctgccagcttgttcgacttgtggtagggaaagaattacagcaacgcaaaaatattgtcatcactgcggtgccgagttgcttgatagctcaaccttcgaaacctgcatgtcactccccctgcacgaagtcccaggcttaacaaaatggactgtcgcaaagctaaagcaagaactaccgcgtttcaaaactatcggcgacctgctatcagtccaggaccccggtactgaactacgaaaaatacacagggtaggtcaggcacgcgcagagaaaatcattaggctcgtaaccagcttcgttgatgagttcctgcaatga

SEQ ID NO: 353305 - DNA, 1209 bp, Pseudomonas aeruginosa
atgctatctccatttggctctctcagcgatccattaggcaggtactatacaaaagagactatcagcaagcttttggtctctgaattgtcggcgacagagccgaagctgatcctagatcttggatgcggtgacggtgctttgtctcgcgcagcagcgtccagatggatagatgctctatacgttactgtcgatatcgacagtaagcctgaaatattttcgtcagatgaagctgggctgtcagttaagcacttgcatcatcatgcagatgcgctttcgcctgatctaatccgatccattggaatcgcacctgagtccgttgaccttgcactttgcaaccctcctttcgtcaagaaaaaatggcaagcaggatacgacgcaattcttaagtcagctggactaagcgttgatgtaaaagccgtaagacatgcttcggcagaattcattttcattgcacagaatttgacctctcttagaccgggcggccagcttggtctgattgttcctgacggctttgtgtctggagagaagaataaatcacttaggcaatctatcctaaatgagaactcaatagacactgtaataaaacttccgcgtaacatgtttgtcggtacagaagctcaggctcatataataataattactaagggtggagcagcggaaggtccgatcaaagtcaagaatttcatggggctagggaatgaaaagcagaccgttctcattgatccaaaggatgccataaatacattagactacgattactattcgatatcgtcggttcagagaaataaagccggagtgcgccttaaagatctgggatgcgaaattgttcgtggtagattaaattcaaaggaagcgagacagtcaggattcgatgtgctgcatacaacaggtctgcgcccttgggagctttccataaatctacctcacggaaactatacttcttctcctggcttagttttggcggaagcaggagatatacttgtcgcccgtgttgggcgagacttgcatgctcggatctgtatggtcaaatcgggctgtatgccgataaccgactgcatttatcgcttgcgtccaccgattgcgctaagagagcaggtttttcattcgctcatatcggatataggtaggcattttataatgtcccgcgcacatggcgtaagcgcaaggcatctcccaagggactaccttctagatcttccaatttactaa

SEQ ID NO: 353306 - DNA, 1041 bp, Pseudomonas aeruginosa
atgaagacccaagctgagatttacgagctcgtaagagccgggcgcaagcggatgaaagaattgccttccagaaatctatctaagtcgactgatgacggctatgtccgcgagtacaaccgacttgttggcgatgagggtgctgagccagaaaagctatggtctgctatctgcagaactagcagtaagtcgacctaccgaagaagagtggctgcagtaatgcactgctgcagatcccaactattagaggcattgcgaagtcaagacgcggctcagcgcgcaggggatatgagcagtctgatagaacatgtgtcagtaattgaaggggtgataggaatcataaatattgtcgagcagcacaagggaaagagccctctcgaaaccacagtgagacgaaaatcaaaacggtctgacttgaaaaaattaccgaataattggcgtgagcagctgtacaagcagttcgcacttagtaggtacgctatggcctatctggttgaggcggtgtctggatgccgaccaggtgagcttgagaagggcgtcaaagttatttgtaccgaagaaggcaggctgataatccggatcgataatggtgtcaaggttactgaagagagagggcagccttggcgagaaatcagttatcaacttggccagggcgcgcacccattgatcagggctctctttgatgcctgcagaaagccagaagacgtaggtgaggtcgagatggttgtgcgcattgagaaaagcaccaactggcgggcagcactatcgtcggctggacggaagctctggccgcagttgccattcagaatctgtccctaccatctccgaaatgcggcggctagcgattttaagcgctcagatctgagtgacgagaaggtctcggcagctctaggtcactgtgtaaacaaaacagctagcctgtacgggcagtttcaaatcgggcgggggggaaagggattaagccccgagatggtcaatgctgctcgtcccgttctggacacgcgcagttctgttccaacagtgtgtctgtccaatgcgcggtag

SEQ ID NO: 353307 - DNA, 525 bp, Pseudomonas aeruginosa
gtgccgttcgatcccgccaagccgacgctgttgtccacactggttcgtcactacgaggaactggtcgaccatgttcgccggcgcttcggcgaccggggcatggcgcgcgaagtggtgcacgacgtgtgcgtgcagttgctcgaacgcgacgagaaggaggacgtgcacacgcccctggccctgctgcggaaaatctcccacgacaccgccgtgagccgctatcgtagcgaccgtcgtcgaaccgcctgggtagaagccgtcgccgagcttccggaagtcgcctgcatggcggcgacgcccatgggtcgccatgaggccgagcgcgagttccaggcactggtcgacgccatcgccacgcttcctcctcgctgccaggccgttttcgtcatgcacaagatccacgaaattccccaggcgcaagtcgccgaccggctcggcatctccgtcaagaccgtggaaaagcacctgcgcctcggactggcggcctgccgggaacggctcggccgcggcgaggcacggccatga

SEQ ID NO: 353308 - DNA, 780 bp, Pseudomonas aeruginosa
ttgaccagcagtttcgtagcttacattgatgaatcgggagacgaaggcttcacctttcgcgcagacggcagcggctcgtcaagatggttcgtactttctgcgcttgtcattcggaaggagaacgatctaagacttgtccaggcagccaaggaggcgcggcggctaatccgctttgccgacaagaagccaatacacttctgtaagctaaggcatgagcagaggacgcctgtctctcgaatagtgggcgagctccctatcaggaccgtgaacatcctgattcacaagccttgcatagtcgaacccgagatatttcagcagcaggcctatagcctctataggtacgccagccggcttttgctggagcgggtatcttggctttgtcgagacaaccatgatccgcggcgtggaaatggtcaggtagagctcatctactctaatcggtccgcgatgtcctatgaggatctacggaactacatagcccaactacacgttgcccccggcgcacagcatgtgactatcgattggaatgtggtcagcgaagacttggtaagggccgtaaaccacgaccaattggccggacttcaactggcagatgtggttgcctccagcgtctaccaggcggtgaaccccaatctatatggcgatgttgagggggcgtatttggtaaatctgcggcgtacgatttatcgccatcgcaacagaagagaagggtacggattgaaattctggtgtggatgcgatccagacgttcagcgtgttctggccttggtgcaggcctga

SEQ ID NO: 353309 - DNA, 888 bp, Pseudomonas aeruginosa
atgaatgtgctgatgattcacgggatcgggcaagaaggctcaacgaaggacgagctcctgcaaaagtggactgaatctctccatgctgttcagcctggcttgcttgccggcgcctcagtcgagatggcgtactacgggacgactctcgcggattggacgaaccgcaagaccaaagtcgctgtcggcatgggagctgaatccacagcagtcgatatcggcgatgctgatgaactgaagttcctcagcgctgttatggaggagttcgctggcgatcatgacatcgatgaggcccagatcaacgctgccatcgaagagtcagggaacattgccgtgccgatggacaacttcattgcaagacgcctcgtgggtctcatgcgcgtggtcgagaagatttcccctctcaagggtgcgctcctgcttcggctcgtgcgacaaggccatacctacctttcctcgccaaaagcggccaaggcggtcgacgatatcgttcgcccttacctaaagcgtagtcctcaaatactgattactcactcactcggaactgtcatcgctttcaagctactgcgagagatggaagctgtcagtgccggggttcaggtccctctcctgatcaccatgggatcgccactcgggctggatgcgttcaaagcgaagttgggtgtcccgcgacgaaaggctgcatttgtccagaagtgggagaacttctatgacccctccgatttcgttgcactcggaaagccccttaccaaggagaacttcgcagagggaatcgggaacgacggtaccgtcgacaacacgacccccaatgcgcatggcatcgttgggtacctgccgcacaagggcgtgattgaggtgttgaggcaagcgctatcgcagattccatcctaa

SEQ ID NO: 353310 - DNA, 1761 bp, Pseudomonas aeruginosa
gtgaagctgtgtctgacgattggggtatcgaaggctcccccactttcatacttgccgggggctattacggcggcacacgaaatgggagattgggcgcgccaagccggattcaccacggaggtgatcactgatgagggggaggcacgcgtcaccattcagcgtattcgagaatcgctgaaggggatgctcgcttccaacgacgaggtggagctctttgtccttcacttcgctgggcatggattccgctccggggccgagcagaatatgtggcttccaagcgattggtttgacgaaactcgcgccatctctgtggaagggctgaagagacaactctacagacacggcatcaggagcctgacgatctttggcgatgcttgccgctcgctaccggcggacatagatactgctgacatttttggtgatcccgtgcttccacgagggccatacgaagcacaggcaccgatcatcgatcgcttcaatgcggtggtagatggtcaacaggcgtatatgctgaaaggggacggtaaggctcctgatcgatgcgtgttctccaccgtcttgatcgaaggcctttgcggcttcagggacgaagcgtttgacaaataccttcccgactgcgtaatacccgaatcactggccttgttctccaaagaccgattgcgggaaatcggagaaatctacgacctccagtgcaagccagattgcgccaccggcataccccgagagcatgcagtctactttcagcgtggaggtagcccacatgggctacctccacccaagtggccggcaccagcggaggtggttcaggagccggatgatggtagtagagagctgcaaatcaggcttcctaacatccacgagttttcgcgccctctccaagcgcgattactcacgcggcacatccgagacggactctcaatccagagagaggccgacttccgtgatttcaatctgtctatccacggtgcggtgcccaaggcgatctggagcacatcttccgttgagaagtttttcacggaaggcggcgtcacacactaccgggtgagcagcaagaagcaaggggccattcaaatactggtcgaattcgaggatggcgtttttgcgtcggctgtcgtttatccgatgctggtcacttttcttgttcgcgacggaagaaatgagatcaactggacctgcgtttcccgatgggattggaggccggaacctctaagcacttacatcgagacgattgtcgaccttcaggccggcaatcttgctgcagatcaggtggacgatatcgcggcgcgactccgctcagccaaacacgtcaacccaacactgggagccatcgccagctacctatatgactatagtggagacatcgacagtattcggcgcatggcgtttttttactgcgattacggacaggccattccattcgacgtggcgttcatgggattactccaaagcaccgactccggccacggcagcttggtgacagaagttcccccagtcagggagcgaccatattcagctgcaaatcaaaagttacccagatgggtaaccgacgcgacccgccccgcgatgggagagatcgccggtctatggccttggctgcgccaaggatggcaattcatggaaaacccggaaccagcggagaaggcagttgcggaaaatttaggtgacgtcgctgcttttctcctgccatcccagttctcgtcattcaaagcagaaggcgcgcgtatcttggtacaaaaattcaacctggaggaaagcagatga

SEQ ID NO: 353311 - DNA, 1677 bp, Pseudomonas aeruginosa
atggctgatccgacgccgcaggacatggccgccaagctgctggccaggggcttcgaacgcagcggtccttcggccgcggcgttgaccgaccccatcgccgacacgccgatggtggtgacgctggacgagctgcgcccctatgaacatgacccgcgcgtgacgcgcaacccggcctacgaggaaatcaaggcgtcgatccgcgaacgcgggctggacgcgccgccggcgatcacgcgccggccgggcgaggcgcactacatcatcaggaacggtggcaacacgcggctcgcaatcctgcgcgaactgtggagcgagaccaaggatgaacgcttctatcgcgtaccgtgcttgtttcggccgtggccggcgcgcggcgaaatcgtggcgctgaccgggcatctggccgagaacgagctgcgcggcgggctgaccttcatcgagcgggccttgggcatcgagaaggcgcgcgagttctacgagcaggaaagcggccaggcgctgtcgcagagcgaactcgcgcggcggctgacggccgacggctatcccgtgccgcagtcccatatcagtcgtatggccgatgcggtgcgctacctgctgccggcgataccgaacctgctctacggcggcctggggcgacatcaggtggaacggatcgcagtgctgcgcaaggcgtgcgagcgcacttgggaacggcgtgcgctgaaccagtcattggcggtggacttcgccacgctgtttcaggatgtgctgacgcagttcgacacacagccggatgacttttcgccgcaacgggtgcaggacgaactggtgggtcagatggctgagttgctggaggcggactacgacacgctggcgctggagatcgacgacagcgaaagccgccagcgtgcgctgaccagcaaaccggcggcaccgacacctccggcagcacctatcgtgcctgctactcctcccgcatcggtctccgcgcctcagcagccaccggtttcgtccgtgccgcgcgacactacgtcggtcacgccggtcacgccggtctcgcctgcggcgccagcagcgacaccgcctgcatcgtccgaagcgccgaaggaccagcacgggccacgcgacgagcgcctgcaagggcacatcgtgacaccggcgccgaccaccgagcgcctgcagtctatccaacggatggttgcggaccaactcggcgacaagctgcccgacttcgaggcagatgcgctgcttgcgatccccgtacaggctggcgggctctttcccatctcggatgtctggtacatcgagccgggactggatgcgccggatcgcctgcgcgtgcacatcgcgcagttcgcgcgcgagatcgccggggatgcggcggtgtccgaccacatcgaggaccgcgaccatggcatcggcttcgtctgcgtggcgccgactgcgggccaggcaaaagcgctgccggcatttgctcgggcggtgctcagcctgctgcaggcgctgagtgcggcaccgccagccgcgaacggcttggaccatgcgcgactggccgacgagttggcggcgctgctgcatggccacggcggttcgaccacacgtctgagcgatgctgcgctggtgaagctgttccgtctgctgcgcctggcgcgccggctgctggatctgcaagccggcgaagcgggccacgaagcctga

SEQ ID NO: 353312 - DNA, 690 bp, Pseudomonas aeruginosa
atgcgggaaggatggaagcgcggcgccgcgccgtcgccgatcaaacggaaccgcgcgccgtccggtttggcccgagcactgccggcagcagcagtgcacgatccttccgcccacgacaaaggcgccgaagccccgcaaggcttcggctggagaggaatcaatccacctgtgggctgcaagcaggccaggccgtcgtcaaagccattcgctgcgtcagcaatctcacccggcccgtttcgtggctggggccggcatcctctggcgtgtatccacacacaaagggaacccgttgttccgccggcgggcaccggcaccgaataccgtcgaccgcaagcggtctcctggcacctcgcagccttgcgggccaaggcgtcaggagaccgctcgtggatggacggaaacacctcgatcaacggaaccgcggcgagcgcgattcgacggagcaatgaccttctcgccctgcaagccgtgattggcctgtgcaggacgcgcacaccgttgcagaagggaacgcgcgctggggagtcccgcggggcgcgggaggtttgccccgccgtcggcagtagccagcgtggcagagggagacttgggcgtcagttcgccttggggcgccgacgccgcgggctggatgcgccgcgcttgcctgccgcggcaccttcgaccggctgcgtgcccttgcagtccgggtag

SEQ ID NO: 353313 - DNA, 717 bp, Pseudomonas aeruginosa
atgtcccattccaacaatcccttcgtccgtggctacgatggcctgtccgtgcgacggctgctcgctatttcctacgacgacgattgcccgctgagccatctcccgctgcacgcctcgcaggcgcacttgcccgacagccaggtcgagcgccacgcttgcatcttcggcgacgacttcgcgctgatcaccgaacgccaggacgtgccggccgagttggacgcgcaatgccgcagccacggcatcgtccgcacggtggtctatgccgtgatggcagaagaggcgggccagccgctccacgtcggcgacgcctgcaccgaggaagccgcacgcgaggtggtacggcgcctgaaattcgagaccggcttctacagtcgggcctgggaaatcagcagcggccacctcaccgacgaggcgaaccgctacctggccgagttggcggacatcgccacgccgacgcgcttcctattcatcgcctttcgcatcccgtactcccctgcaattggcgtgaagctgatcgccaccccatggacggatgacaacctgcaacgggttgaaggcatcaccgccgcgcgcctgcgtgaggaacaccacaagaaaggcatgcccgaatgtctcgtcgaggtgttgcacctggccgcgcaggtcgacgtgcgcatgctggtgttcgacgccgatgcgccgatcctagaaggattgacgctgtacgacggcgagtga

SEQ ID NO: 353314 - DNA, 750 bp, Pseudomonas aeruginosa
gtgaaagagcccgccgcgaccgccgagcgacagcaggcacgccaacgcggcctggtcgccagcgtggtcacgctgccgtggcgcctgttcggcgtactggtcgcctcgctgctgctgtccatcgtcatcgaatgcgtcggcatgcacctgttttggcccgaccagggctggcgccacgcgcagggcatgctcgactacgaactgaaccagctctccacccatttcacccggagcgccgttgtgcaggagccgggacgcaccgcgcgctggctggtggagggcacctacgagtgggttttcgtgaagacgggcttgctggactggatgcgcgacgcctcggcgcaggccagcgcacccagccgaggcgcgcaccgagacctccgccattacctggcccaggtctatgtctggaccaagggctatctgattgctgccggcttcaccgttctgacgttcatcgtccgcctgctggtcttggtgctgacactgcccctgttcctgctcgcggccttcgtcggcctggtcgacggactcgttcgccgcgacatccgcaagttcggcgccgggcgggaatcgggcttcgtctaccaccgggcgaaggcggccttgatgccgctggcggtgctgccgtggttgacctacttggcgttgccggtgtcattgcacccgttggtgatcctgctgccgagcgcggcgatgctcggggttgcaaccaatattgcggccagtagtttcaagaagtacctgtga

SEQ ID NO: 353315 - DNA, 2781 bp, Pseudomonas aeruginosa
atgaaggggcgactgaatgcacacgtactgttctcgaacgaggtcgatgaacaggtgctcagggatttcatatctgccttgcgcattgagttagtggacaggccactttccgagcctgcgttgagagagcttgccaggaaggtcggtgaggacaagttgaagcatcacggcttcaaaaaatctgatgttgatgcttccgacgagaaggctctgctcgcaggagtggtgattgcggagatcaacgctgactcgtacagggaagcgattcggaaggttccgaatgagcacgcgatcggtctcatgccatttgatacgaatgacggactggcagaggtcggatggcaagagcactacgcctatgccatgaacctctttcaaacctctccgatcttcgagacgcgagacgccgatctgcgcggcgcatttgttggcgagcagaccgccggcaacgccaagtggttcaaaaactttcaagcgggtctgaataatattccgcgcttggcagtctcaggaagcgacgcccactgcttcgttggaacacctggcgacaacaacaagcggggctatggcgacttcccctctgggaaaaggacgtggattaaagctgacccaacgttccatggcctcaagcaagccattcttgagccggcgaagcgctccttcattggtgacaggccgcccaaggttcaagaagtcgagtccaacaagactttttacatcgagtctatcgagattagcaaaacagtggacaaagctggcgtcgggcagtggctgcacggctgtgacatccccctgaatcccgaccttgtcgccgtcattgggaacaagggaagcggcaagagcgctttggcggatgtcatcgcgacgctcggcaactccaaacaatccaagcacttcagctttttaaagaaggatcgcttttggggcaagaccggcgagcccgcacgtcacttcaccggaacgctgacctggcgagacgaaagcaccgagtcccggccattgaatgagtcgccatcagaggagaaggcggagcttgttcgctacatcccgcagggctacttcgaagagctttgcaatgagcacgtatcgggcaagtcgaacgcatttgagaaggagctgagggcagtgatcttctcccatgcgagcgaagaaatgcggcttggcgcactcgactttgatcagttgaccgagcagcaggagcagtcgctcaggaatcgcttgggtgagtaccgtaaggagctggcatcgaccaacgcagacatcgttcgcatcgaggagcagcttcaacccattgagctgaagaaactcaccgatctgcttttgcttaagggcaagcagatcgaggaacacgacaagctgaagcccgcggaagtcgcggcgccgaccgaagcaatgagccccgagcaaaagcaagcggctgaaggcttggctgcagcaactcaacaggctgaagccgccagaaagcgcagccaagagattgctggcgagaccacggaactggccaaacgccaaaaggccatagggaatattcgcgagcagttgaggttgcttcaacgatctttcgatcaagccgaaaaagccgtttccgacgatgtcaaacttctcggcttcgcttggaccgatctcgctgccatcgaaatcaagaccgccgttctggatcagaaatcgaccgagttggcaacgaagcaaggcgagataaagattgaggccgaaaagctggctgacatcctcaatgccgtcactgcaactcagcaaggttttaccgcaaagttgaacgcaccgcagcagcagtatgaggcctaccagcgccagcttggggagtggaataaaaagcgcgacgaactcatcggctcaatcaccgaacctgagaccaaggtcggattggaaaccaggatcgagcagatcaaggaacttccgcagcagctcaaggatttggaagcgaggcgtttgcagctgtccggggaaatcttcgacactcttgatgcacagcggcgtgcgcgcgcggaattgttcaagccggtgcaggacctgattcagaagaacgtcctgatacgcgaggactacaggctgcagtttcaggcaacgctggcggcatccgctgatgctatcgccgaccaattgtttgcgctgatcaagcaaacctcgggtgactttcgcgggcaggacgacgcgctggcgaccatcagaagactgttcgatggccatgacctgaacaccaaggacggggcgctagccttcattgcttccttgcaggaaaaggtgttggccgctgcgaaggcatccggttcagatgccggaatattcagcttgctgaagaaggggcagcctgccacggcagtctatgacctcatttttggcttgaacttccttgagcctcggtactcgctgctcttccaggacacgcagatcgagcaactgtctcctggccaacgtggcgcgcttctgctgatcttctacttgctggtggacaagggaaagacccccatcattctcgatcagccggaagagaatcttgacaacgagacggtgttccgtctgctcgttcccgttctctccgaagccaaaaagcagaggcagatcatcatggttacgcacaaccccaacctggcggttgtttgcgatgcagagcagatcatccatgcgaggttcgaccgagcgttggactccaccatcagctatgaatcgggagccatcgagaacacagggttgaacgaagtcgtcgtgaccatactggaaggtacgaagcccgcattcgagaaccgatacgggaaataccattga

SEQ ID NO: 353316 - DNA, 2883 bp, Pseudomonas aeruginosa
ttgacgacaacacagctcttgacaccgcatcaacgtcagtacgttgcgtggctgctcacgcgccgtgcggcgggcgattccgtggaatcgctggcctcaacactagtcgactcgcaggttgatctcaatccacatcaggtggatgccgccctcttcgcctgccgcaatcccctttcgcgcggtgtgctcctcgctgacgaagtggggctcggcaagaccattgaagcagggttggtcatctctcagcgttgggccgagcgacgccgcaagattctcatcatcgtcccggccaacctgcgcaagcagtggcaccaggaactgcaagacaagttcggcctgcaaggattgattctcgaagccaaaagctacaacgcaatccgcaagcaggatcgacagaaccctttcctgttcgcctccggtccggtcatctgctcctaccagttcgccaagtccaaggctgacgatgtcaagagcattgactgggacttggtcgtcctagacgaagcgcatcgcctgcgcaacgtctacaaaaccagcaacgtcattgccaaaacactcaaggaggcgttgtcgcacgttcactccaaggtgcttctgaccgcaacgccgttgcagaactcgttgctcgaactctatgggctggtcagcttcatcgatgatcgcgtgttcggagaccttgacagctttcgctcccaatttactggccgggaacaggccttcaacgccttgcgtgaccgactggcccccatctgcaagcgcactctgcgcaaacaggttcagccctatgtgtcgtatacggcgcgcaaggccatcatccaggaattcacgccgtcaaacgaagagcaggaattatccagactcgtcgctgattacttgcgtcgccccaacctgaaggccatgcctgagggtcagcgccagctgatttcactggtgctatggaagttgctcgcgtccagctcgcacgccatcgcaggcgctctggagacgatggccaagcggcttcagggagtgcttgacgaaattgccgagattcccgatctggccgaagaactcgacgaggactacgagtcgctggacgaaaccgctgatgagtggagcgagcaggaagccgcttctacgacgccgagccgctcagagcggaatgccatcgcgcaggaaatcgaagaacttcgccacttcaaggcgctggcaaccagcatccgcgacaacgccaaaggcaaggcgctgctcactgcgctggatcgcgcctttgccgagctggaccggttgggcgcggccagaaaggccatcatcttcaccgagtccaagcgcacacaggagtacctcctcagcttgctggctgacacgccctacggcgacggcatcgtgctcttcaacggcacgaacagcgaccagcgtgcgcaggcgatctacaaggactggctcaaacgccacgaaggcactgaccacatcaccggctccaagactgccgacactcgtgcggcactggttgagcacttcaaggagcgcggcaaggtcatgattgccaccgaagccggcgccgaaggcatcaaccttcagttctgttcgctcgtcatcaattacgacctgccgtggaaccctcagcgcattgagcagcgcatcgggcgctgccaccgttacggacagaagcacgacgtggtggtggtgaacttcgttgatctcagcaacgaggcggacaaacgcgtctacgaattgctggcgcagaagttccaacttttcgagggcgtgtttggcgccagcgacgaagtgttgggcgctatcggttcgggtgtcgatttcgagcgacgcatcgctgatatctaccaaaactgccgagagcccgaggagattaagtccagtttcgagcaactccgacttgacctttcgggagagatcagcgacgccatggtcaagacgcgtcaactcctcttggagaatttcgatgaggaagtgcaagccaagctccgtgtccgcgcggaagatagccacagcgcccggagcagattcgagcggatgctgatggagctaagctccgcggaactgggcgaatttgccagcttcgatgaccacggtttcctcctgcagcgtgtgccggacggcattgatgccagtgcacgcgctggaatcgagctgggacgttatgagttgccccgtcgctccggcgactcacacctgtaccgaatccatcacccgctggcttcatgggtcaccgagaaggccaaggcccgtacgcttgaagctgcgaagctcgtgttcgactacgacgcatacggtaccagggtgagcaccctggagccttatcgcggcaaagcgggatggctcacactgaagctgatcgaagtcgatgcgttgggcaaccaggagcagcacctgctggtaacggccatcacgtcggatggcatcactctgctggaagacgatcccaggaagttactgcgcctgcccgccattgcccagccgcccagcctgctcagcagcgcggccgactccgcactggcgtccgacgtcgaagcccgcaaggccgagctgctgcgcgagatcaatcagcgcaatctcggttacttcgagcaagaagtacagaaactggatgcgtgggctgacgatctgaagttgggccttgagcaggaaatcaaagagatcgaccggcaaatcaaggaggtgcgcagcactgccgccaccgcgccgacgttggaagaaaagctgtcctggcagaagaagcaacgggagcttgagggcaagcggagcaagctccgccgcgatcttttctcccggcaggacgaagtggaagcacagcgcaacgggctcatcggccagttggaattgcagcttcaacagcaagtggaggagcacatgctgttcaccatcgagtgggaactgaaatga

SEQ ID NO: 353317 - DNA, 351 bp, Pseudomonas aeruginosa
atggcgcaacccaaccgttacacgctcgcatggtcgctgctggccatgttgcttgcggccgggcaacccgccaacgcgtcagacgatgccatcgaacgcgagcagcttgcggccttggttcgccagatcgacctgattgaccgccaggccgagcacgccgcccttaccgctccgcaggagcgcgcccgctaccacttcgaccatgcccgcctgcgcgaggatcttcagcgcgtccgggcgggcatccaggactacctgacgccgccgcgcgcccagccgcgcgacccggtcgagctgtccggtgactaccgccagtccagcccgatctccggccaggaggttccacgatga

SEQ ID NO: 353318 - DNA, 795 bp, Pseudomonas aeruginosa
atgtcctcgaagcgaaccaccttgccgagccggtcccaggcccttcgcaagcgcgccgggcgactcccgcggctgccctgggtggtcgccggcatccttgtagccggcctgctgggctggctcctgtaccgcacgcccggtgcacctacaccgcgcacggagcccgaggtcgcgcaggcgcatccggccggcccaccctggcgccacggccctgccgatgcgcgcttcacgctgacgctgtacgccgacctggaatgtccgttctgcaaggcctactacccgaccctgatggcctggatcgatgcccatccagaggccagcctgcggtggcatcacctgccgctggcgatgcacgatcccgaggcaagccggctggcccgcgtggccgagtgcgcaggcgaagcgcaaggccacgaggccttcttcggtgccatcgcctggctctaccaaaacacccgcggcgatggccaggggctgccgaccgatcaggcctggccaggcctgacgaccgccatgcggacctgcctggacagcgaccgccccgcggccatcgtccgcgcgcaggccgaagaggccctgcgcagcggcatcaacgccacgcccaccgtgcggcttgacgacggcctgaccgggaaatcgctgctgctgcacggtccggtcgagggcgatgcgctgctgtcggcgctcgatctggttgcgtcgccggacaggccggacgctcgttcagtgggtgcccccgacgccgccggcacggcggtccatggccgccgtcacgaactcgccgagacccagtag

SEQ ID NO: 353319 - DNA, 798 bp, Pseudomonas aeruginosa
atgagcgcacagcgagcgggaagcgtttggtggacaaggatctacgtcttcgtggtggagccggtgctcctggtgtcgggcctgacgctgctgcttgcgttgctgtcatccctgcgcgcggcccctggccccgccagactggctgccacggtcttcctcgtcaccttcgtcatggggctcatggtcctggcccgactgtatggacgccgcctgcgctggcgacgcaggcacatgcccttgcctcgcttcccggcgacgctgcgcattcccatcgcgcgcgccgcgtggtgggaagtgctggtcatgggcatcgggatcgtgttccctctgctggtcgtcgtgctgccgcccctcgtcagggacatccacgagacggaccctgtcgtgctcgctcttgcgctgggcggcgtcatcctggccgtggcgctcacacgggcgatcgtgcgaacactcgtgcggcggttgcgtcgcctcgacccacccgctgacctcgtggctgatgccctcggcctcacgcgcgaaggcccccagcgggtcttcgttccctggcaggcgatacgggccatcgaacatgcgaagttccgaatctggaactcgcacctgcacctactggcgctgaaagtcgatgatccgcatcgatatggcttggacaccagccacttccaacggctgatgctcaggggcacggccgacgaacgctgcatgaacgtcgggctcatcaacctgagcggctacatgccttcgccatcggacagcgtgcgcgccctccgcgactactgggtctcggcgagttcgtga

SEQ ID NO: 353320 - DNA, 513 bp, Pseudomonas aeruginosa
atgccactgtccgacttcaagacaccgagggatcaacgctacttcgaggactacgaaaagggccgatcgttcgagtacggccccatcggggtcgaagagccagaagtcatcgcgttcgcgcggcaattcgatccccaggccatgcacgtcgatcccgaggcggcggcccgcgggccgttccacggcctgatcgccagtggctggcacaccatcggcctgatgatgcggctgttcgtcgaccactacctgacttcggtggcaagcctggcctcgccgggcgtcgatgaagtccgctggttcaagccggtgcgcccgggtgaccagttgcacctgcggctgaccatcgccgacgcggcgccatcgcgctccaagcccgaccgcggcatggtgcataccgtggccgaggggatcaaccagcagggcgaggtcgtcgcgagcttcaaggccatgaacctcatcggtcgccgccaccgcgatgcgtccccacaacgagaaggaatctccgcaccatga

SEQ ID NO: 353321 - DNA, 237 bp, Pseudomonas aeruginosa
gtgtccgtgaagattcactggaccgaccaggcctatcgctggcacatcaacgacggcgaggaggtcttcgtggtcttggacggcacggtggacatgcaccatcgagtcgatgggcgggagcaggtgatcgagctgggcgtcggcgatgtcttcttcgcggaagcgggatgcgagcacctcgcggttcctcgtggcgaggcacgcatcctggtcgtggaaagggtgggcagcccgtag

SEQ ID NO: 353322 - DNA, 915 bp, Pseudomonas aeruginosa
atgcgcatccccgtgccactgaatgccctgcgcgccttcgaagccgccgctcgccatctgtcgatcaaggacgcggccctggaactggcggtcacgccctcggcggtcagccaccagttgcgcacgctggaagacctgctgggcgtcgagttgctgcggcgtgtcggtgccaccgtggagctgaccgacgccggccgccgcctggccccgacgctgaacgcgggcttctgccacatcgccgcctcggtccaggcgctgcgggacgaacggctggacggcccgctgcggctgcacacgctgccggcgatcgccatcaactggctggcgccgcggctggccgcctatccgttcgggaccgccgaatccgcgctcgacatcaccaccgtccaaggccatgccgatctcgcggcgggcaccgccgacgtgggcctgtggttcggcgagccgccgtggcccgggctggtttcggagacgttgtttgccggcaccctgggtgtctatgccagggccggctcgctggccgccacccccgagggacgattggcgcaactggcgcaggcgcacctgttcgtttcccgctatggcctgcactgggagcaatggctgcagacgctgccggccggtccgcaacaccccgccctgatcacccaggtcgattcctgcggcctcgcgctgcaggcggccagcgaaggaacggggctgtgcctggtggtggcgcaactcgccgagcgctcggtgcgggcaggcttgctggaacccttgttcgaccatgaggtcccggccggtggggatttccacctcgtgtatccacccgccctgggcgaggaccggcgcctcgacgccttgcgcgcctggctgcgcgaacactgtccaccggtggatgacgccgacgatccgaaggccttgaccgcatga

SEQ ID NO: 353323 - DNA, 867 bp, Pseudomonas aeruginosa
atggttgtgctcgcggcggtctgctggagttcggccgggctgttcgtccggctgacggacctggacgcatggaccatcgtcggctggcgttccctgttcgcgggcctggcgctggccgcggtcttggccttgcgcggacgcggcgaacgagccggcacgttcggtgtcgctggatggggagccaccctcctcgtatcgacggcgacggtggcgtacatcgccgcgctgacactgaccacggtggccaacgtcctgctgatctatgcctgcctgcccctggtcgctgccggcctggcgcggttgttcctgggcgagccgctttccccgcgcgtcctcgccgccggcgcatgctgcctggcgggcgtggcgatcgtcgtgggggtcccgaccggcagtggccatctcctcggcagcgtgcttgccttgctgatgacgtctgcgttcggtggactcctgatcgtcgtcaaaagccatcccgggctggacatcgtgaagatcaacacgttggggtgcctgctctgcgccgtggcggcgctgcccttcatgtcacggcagattcctgacccgaaggcgctgtcgagcctggcgctgctgggcatcgtcgccatggccctggccttcctgctgttcctcgaaggaggccggcgcattccggcgggagaagcgggactgatcagcctgctggacgtggtgctgggaccgctctgggtgtggctggccttcggcgaggcgcccgggagcggggctctggccgggggcgcgctgatcattgccgcgctggcctggtacctgcggcgcccccagcgggccccggccccggcgcggcggtccgccgccgtcgccggatgtggcgggacagaacgatga

SEQ ID NO: 353324 - DNA, 372 bp, Pseudomonas aeruginosa
atgaagcacaccgcacgcatgaccaccgcagcgcgactcggccgctggctgggcggtgtatggggcgtttgcctccgcgcggagcgtcgggcgcatcggtggctgatggcacagggactgccggcaggcggtgcaagggtgctgatctgggtggtcaagctggcgacccttggggtgttgctgtacgtcacggtctgggcggcgctgttgctggtcgctctctttgtggcagccaggatggcggagcaagcgccgcaaggtgacgatgatttcctcggacgcaaggccgaagagctggatcatcgcgaaagccttgcctacgaccccatcaactacagcgatgacccagatccacgattcgaagacgattga

SEQ ID NO: 353325 - DNA, 657 bp, Pseudomonas aeruginosa
atggctgcgaaggtaatttcagttctgaatcagaaaggcggctcgtccaagacaaccaccgccaccaacctggccagctgcctggccgtcaagcatggatacaaagtcctcctggtcgacctgaaccatgaccaggcatcggcaaccgactgggcggcatccaggatcgaggtggaaggcgacccgggcctgataccagtaatcgccatgggcaagaatgtggcgcgcgacctgcccagggtctccggcggctacgacttcgtcatcatcgacgggatccccaccgtcgacgaaacgaccgccgcctcgatcaaggccgccgacctggctcttatccccatccagccgagccagtacgacatctgggccaccgtcgacctggtgcagctggtgaaagaccggcgagagctgaccgacggcaagccactggcgcgcctgctaatcacccgagccgtccagggcacccgcatcgagcgcaacgccgccgaggcgctcgagggcttcgagctgccgatcatgcagaccaagacccaccaccgcgtcgactatgtcgaaggcgtcggccaggggctcagcgtcatggatctgccagccgacaacaaggcgcgcctcgagattgaggcgatcaccgacgaactgctcgaggtgctgcaatga

SEQ ID NO: 353326 - DNA, 324 bp, Pseudomonas aeruginosa
atgagcgacaagcccgctaagcccagcattgttcggcccagccttgcgcgccctgcgaccacgaccgatcgcgaccacgtcgagaaggcccgccgcgccgtagtggccgacgagggcgagaagcagctcaaggtgctggccgcacccaagtaccacaagggcatggccgagctgaaaaacatgacgaccgagggcgtgccagtgaagcacctgctgctcgaggcgatcgaggatctgttcgagaagtacgggcggggagacggccggttcaaggtcgacgacgtgcccgagctgcgccgacgccttgaggcgctgatgaagtga

SEQ ID NO: 353327 - DNA, 150 bp, Pseudomonas aeruginosa
atgtccgcacgcgactataccaccgcggcaagcctgccgctgcacctggcacgagatccacgctatcgcgacctggtgcgccaattcgccgagcaacagtgcctgacagcctggcacggcatcctgcgcatgatcggggaggcagcctga

SEQ ID NO: 353328 - DNA, 285 bp, Pseudomonas aeruginosa
atgagcatcacagagaacgtatccagcgccatcgagcccgaggatctgcaccgcgtccgcgcaattgccgcggccatcctcgagcaccagggcttccaggcaagcgagctgctcgacctagtgatcgacgagaagaccgctcacctcaaccaccgcgccacagcgcgcgccgagggcgctgtgcagctggccgcgatcatcgtcaactacctgcgcgaggagttcgagatcccgggcgtcgaccacgagctcctgcaggcgctgcagcgggaggccggtctatga

SEQ ID NO: 353329 - DNA, 165 bp, Pseudomonas aeruginosa
atgagtcgccacacgtccagccccgccgagcagctgctcggcctgctgttcggtgccggcgccgccctggtggccggcctggcccttctctaccgcctcgccgccacctggctgcaggagatccacgacgagcaggagagcgccgccgatgacgaccgccgttga

SEQ ID NO: 353330 - DNA, 327 bp, Pseudomonas aeruginosa
atgatgctgaccaatctcccgaactgcccccggcccttctgcgacgggcaaggcgcccacgaggaagacgagggcttccaccggatccactgcgccaagtgcggcttcttcctcggtgtgcggcgggatccgtcgcaggccgagctcgaagacctggcgaagcgctggggcgaccgcgacagctacacccccagcaccttgcccgccaagctgcgcgccatggccaatctgcgcagcttcgaggagcgctgggcgctgctcgatgcggcggcgatgctcgaggccgccaaccaccccgaaacgaaacaggaggcgccccatgcctga

SEQ ID NO: 353331 - DNA, 141 bp, Pseudomonas aeruginosa
atgcctgacgacgaaccgttctacgccgagtgcccacactgcgaccgccacgagttccgcgacgaggacgactggttcgagcatgtcagcatgtgcgaatgggaacaggagcaggatcggctgcgcgacgaggaggagtag

SEQ ID NO: 353332 - DNA, 198 bp, Pseudomonas aeruginosa
atggctgaaaaaccgaagtgggtcgactggagcgagatctcgcgtctcggcctgctcgagcggatcaaccgggagatcatgcacccgctcggctacgcggtcgcccgcgatgtcgagagcggcacgtcgcctggcgcgctggtctcgcctgatggccgctgggcttaccccgaggatctcgagagcgaggcggactga

SEQ ID NO: 353333 - DNA, 246 bp, Pseudomonas aeruginosa
atggctgagcaagagctgccccagccggggccggaacaaatcaaaagcatgcagtgggcgtctgtgcgtgcgcagcgcgatcaactgttgcgcgcgacggactacacgcaaacggcagatagcccgctgagcgagacgcagcgcgccgaggtggccatctatcgccaggcgctgcgcgacatcccgcaggatggccccgacccattcgcggtggcgtggccggaaaggccggcatatctgaaataa

SEQ ID NO: 353334 - DNA, 264 bp, Pseudomonas aeruginosa; identical to SEQ ID NO: 352860

SEQ ID NO: 353335 - DNA, 3885 bp, Pseudomonas aeruginosa; identical to SEQ ID NO: 352859

SEQ ID NO: 353336 - DNA, 666 bp, Pseudomonas aeruginosa; identical to SEQ ID NO: 352858

SEQ ID NO: 353337 - DNA, 591 bp, Pseudomonas aeruginosa; identical to SEQ ID NO: 352857

SEQ ID NO: 353338 - DNA, 390 bp, Pseudomonas aeruginosa; identical to SEQ ID NO: 352856

SEQ ID NO: 353339 - DNA, 819 bp, Pseudomonas aeruginosa
atgaccttcgccctcgaaatccgccacgccgcgccgacttcgtcggcggctgagtgctgggtcgagctggaagatgccgcccccctgtcccgccgcccgcgccgcgcctggcgcgtgccggaggtgaccctgcaggatctgcagtggctgcgcgagcgcctgatgttcgccttcctggccccgggcgactaccgcgacgacaggccggcgcaaaagatcctgggcgcctacgacaccagctgcacccgtgacgcttttccgcgctggcgggccgaggagctggccgagtgcccggccgacggcggccaggccaagcgcctgcccctcgactacgtggccagcctggccagggataccacccgcgtgactgtcagcgagacccgcaagaaaaagaccagctccgacccgctgccgccgagcgccttcgacgacgcgcgcctggtgcgcatcgtggccgcccaggcgccggcctaccgtcactggctgcgttatgcctacgccgactcgaaagagtgggccgacgaggccggcgcagtggtcgagctgtgggcgcgcgtggcccctgggctgggcaagatgcaggccaagacgctggccaaggccaagggtctggcgcacctcgctgtgcagcatggcaagcgctacgcgaacgccggtaccgagctgtactcggccgcgcgcctggccgagctgctgggcgttaccacgagcaactacgaccagcactggcgcccccgctggaaggcgctcctcgaggcgctcgagcgcctggacgaggaggctctgcgggcggtgctgcagcaatacaacgacaagtga

SEQ ID NO: 353340 - DNA, 327 bp, Pseudomonas aeruginosa
atgttcggatggatcaagcggcgtctgttggcgcgcaaggcccgcaagtctctggatagcgttcgccagttcgaggccgcgcggctcgaccaggcccgcacccggccggtgcccccggcctatagcccgtcgccggcctactcgacgccggtacaccagggcgacccgctgggcgtcaaccaggcgctgctgatgtccgccgtgctcgatgatgatcgccgctcggccagctgctcgagcagcttcgccgctgacagctcctcgagttggtcggggtctgactcctcgagcagctgcagctcgagctcctcgagctcctgggactga

SEQ ID NO: 353341 - DNA, 318 bp, Pseudomonas aeruginosa
atggccgccgtgctctgcatccattgccaggtggcgcccgaaaggcgtcagcaggagggtaccgggctggtcatgtggatctgtccggtgtgcaacaaccgcggcgaggcgacgccaagcgagagccgggccttggccagctggaacctggtcaacgacgaggatatgccgctgcatgcctgcataggccagggcgtggcgcgcttcttcatcagcgcaggcaagtggggtagtcgctgcccgtgctgcgacttcgtcgaccatggttatggctcgctcgagggcgcccgggccggctgggcgagggctacgcgatga

SEQ ID NO: 353342 - DNA, 552 bp, Pseudomonas aeruginosa; identical to SEQ ID NO: 352852

SEQ ID NO: 353343 - DNA, 507 bp, Pseudomonas aeruginosa; identical to SEQ ID NO: 352851

SEQ ID NO: 353344 - DNA, 573 bp, Pseudomonas aeruginosa; identical to SEQ ID NO: 352850

SEQ ID NO: 353345 - DNA, 516 bp, Pseudomonas aeruginosa
atggaaccgacacaactgcacgcgggcgactccgtcgcctgggagcgcgacgtgccggagtatccggcatcggccggctggtcgctgcgctatgtgctgagcgggccagaccggcacgtgatcgaggcccaggcgggcgccccgtaccgggtcgagatcgccgccgagaccactgccagctgggcgccagggctgtatcgctgggtggccctggccatcaaggcgggccagcgtctgacggtcgacagcggcacgctggagatcggcgcaaacctcgagacggccgaaccatcggacgcgcgcagccatgcccagcgcatgctcgcgctgatcgaggccgcgctcgagaagcggatcccgaaagaccagcagagctacgagatcgacggcatgcggctcgaccggatcccgatcgagcgactcgacgccctgcgcagcaagtaccggcgcgagctgcagcgcgagaagaaccgccgctggccgaccggccgggtggtcaaattgtccatggggtag

SEQ ID NO: 353346 - DNA, 1401 bp, Pseudomonas aeruginosa
atggcgggcggcgggcggctggctacggcctggtcgggccgcacgagcggcgccgatgccgaccagctgatcttcgccgaccacgagaccctgcggcagcgggctcgagagcagtcgatcaacacctcctacctcaagcgcttctaccgcctgctgcggcagaacgtcatcgggccgtatggcatccgcctgcagtccaaggccgtgctgccggacggcaaggctgaccggatcactcggcgcctgatcgaaaaggagtggcgcaagttctgcaaaaagggcgtcttcgacgtcaccggccgctatagctacgtcaccttctcctggctgtggctcgacaccctggcccgcgatggcgaggtgctcgtgcgcctggtgcgcaactggccgaaccgctggggcttcgcgctgcagattgtcgaggccgatcgcctcgacctgcacctcaacgagctgctggacaacggcaaccgcatcaggatgggcgtcgagctcgacgagtgggagcgcccggtcgcgtactggatgctgagagaccaccccggcgacatcctgcgccgcgccgaggagcgctacgagcggatcccggccagcgagctgatccacaccttcgacccgtggcggcctcaccagtcccgcggcttcacctggacgcatgccgcggcggtcgacatccaccacctgggcgagtttcgctcggcgaccctggtcaaggccgagcacggcgcgaagatcaccggtttctacgagcaggacgccgagtggctggatccgccagacgagggcgaagacgtcgacgtgctcgaggaggtcgaggccggcaccaccaaggtgctgccctacggcctgacctacaagccgcaccagaacgcctcgcccggtagcgactacgcgccgttcgtgaaggacaccctgcgcggcggtgctgcaggcctcggcccgagctacaaccgcctggccaacgacctggagggcgtcagctactcctcgttgcgctctggcgagctggacgagcgcgacttctacaagacctgccaggagttcgtcatcagcgagctgctcgagcgggtgggcgaggagtggttcaactgcgccttgctcaagggcgttatcaagatcgccccgcgcgatctggcccgctgcagcgagatggagtggcaggcccgcggctgggattgggtcgaccccttgaaggactcgaaagcggcgagcgagagcatcagcaaccgcaccaagtcgcgcagttattacatccgcctcaatggcgacgaccccgacgagatcttcgaggagatcgaggccgaggagcagctgctccgcgagaaggggctgctcgccgatcccaacaaaccgaaagcagaggagccggccaatgccgaagagctcgactccgacgagtag

SEQ ID NO: 353347 - DNA, 435 bp, Pseudomonas aeruginosa
atgtctaccacgcaagcccgcaccgccctggtggtgctgctgacggatctcaccgtgcacggtgacgtgatccccgaaaacaccacgctcgaggtcgagcgcgccatccgtaacgattggttcggctcgaagctgtgccgcgacgcgaccgaaaaggagatcgccgagtatcgcgcccaggagggtgccgccgacgacttcgacgcccagctgcaggctgaccaggcgcagctgctcgccgacgtcgatcgcctgcaggagcgcaagaccgagctggccggcgacctcaaggcactggaaagcgacatcgagcagttcggccagcagcgcaccaccctgcaggccgaggtcgacgacctgggcaagcagaagaaggccctggccgatgaagtcgcggccctggaaaaggccaaggccgcggcggctaagaagtga

SEQ ID NO: 353348 - DNA, 381 bp, Pseudomonas aeruginosa
gtgatcggcgccgaggatctcggcgacttcttcgaccccgacgagttcggtaccaccgtgcagctgctcgagcccgggcagcctgcgcgcaccgtgcgcgccctcgagggggcgccggacggatccggccggctgtatcggtcgggcgtggatccgaacgcctcgagcctgcgcgtcaggcccgaccaggtgaagctgcagctggcccggggcgacgccccaggcgactggaagctgaccaaggcggtgctcgctgggtcggagtactcgatcgccaacgtggagccgctgggccggctgcgcgtgctgctgaccctgatcccctacggtgaccgctcggccccggccggggagcgtggaaagtggcaggcttccaactga

SEQ ID NO: 353349 - DNA, 525 bp, Pseudomonas aeruginosa
gtggcaggcttccaactgaatttcgaggtggacggctggggcgacgtggagcgcgccatcgccgacgccccgcgcaagctggacgtcgccgccgcccgcgccctgcgcaagacggcgcagtggctgcgcacgcatagctcgagggagatcgcccgcgagctcggcatcacgcaaagcccgatccggcaccgctacaacatctacagccagtcgacggcccgcgaggtgaagctctgggtcggcctgcagccgatcggcgttcactacctgggcacgcccaggcagacccgcacgggcgtgaaggtcggccaccgggagtacgacgaggcattcatctcgccgatgaagtccacccagcgcctggtcttccgccgcaagggccgcgagcgcttgccgatcgagaaagtgaccgaggactgggaaggcccggcagtcagcgccctggagcgctgggagcgccgcgccatggagcgcttcatggagctgttcgagcaggaggcgcgctatgtcctacaggccgcttaa

SEQ ID NO: 353350 - DNA, 531 bp, Pseudomonas aeruginosa
atgtcctacaggccgcttaaccaggtctccgacctgttcttcgccattggcgacgccatccatgccgcgggcctgggcgtcgacgtggccaactacgacgagtgggacggcaaggtgcgccatgcctcggtgctgatcgagctcgagcgcaccaccccagctgtcaggcaaaacgacgggcgctacacgcacgccgtcaccgtcaccctgcacgccgttgtcgggcggtggcgcaagcactcggcgctcgaggcggtcaacctggccacctgcctggagcgcctggccgatcgcaaccgctggggcttccatgggcgcaactgcgagcagccctgcgagatgcgcagcggcccctcgatgttccagcgcggcgccgacggctacgacgcctggggcgccacgttcaaacaggtggtgacacctggcgagccgacgcccgagatcctgctaaaagccgcccccttggttgcgtacagctggcaggtcgacgacctggacaacccggagagctaccaccagctggagacctga

SEQ ID NO: 353351 - DNA, 612 bp, Pseudomonas aeruginosa
atgttcgacgcctatctgcgcctgcagctggggccgctgatcgagcgcctggcggcgctggagaccgagatcgaggatctgcgccgccgtgccgaggggcacaatcgcattggcacggtggcggcggtggatccgttgaagggcgtctgccaggtcagccacggcgagctgcgctcgccctggatcaagtacagcaacctggccgccggcgaggtcagcgagacgcgccacccatcggtgggcgagcagtgcctgctggtcaattacggcggcggcgacggcagcgcccaggcggtggccatcctcggcctgccgtcggcgcagtttccgccggtatccgaccgcgccgagctgcaccgccgcacctaccctgacggcaccgaaagcagctatgaccacgtcgcccatgccctggaatggaagaacggcccgaccacggtcaaggccaaccaggccggcatcgagctgctgagcaacggcagcggcgtgcgtatcgacgccgcgggcgtccacctggtcgggccgctggtcgatcacgccggcaagaacatcggcaaggatcacaagcacctgagctcgggcggcccgagcatcggtggagagcctgcatga

SEQ ID NO: 353352 - DNA, 333 bp, Pseudomonas aeruginosa
atgatcggaatagaccgcgacaccggggccgccgtcgacgactggccccaattcgtgcagcgcgccacccgcgcgctgacgactccgcttggcacccgccagaagcgccctctgtacggctgcaggctgccgacgcgcctcgcccgcaacctgggcgaccagctgctgatcctcgcccaggccgacgccgtcgacgccttctacaacgaagccaacggcatcggcgacttcacgcccgaggtggtggtcgccagccgggaaggcgccggcctgcgcttgcgcctggcgggcacctggaaaaaccgcaagatgactttcgaggtggtcacgtga

SEQ ID NO: 353353 - DNA, 990 bp, Pseudomonas aeruginosa
atgcttatcccggggctcaaccaactggccgagcccgagatcgtcaaggtcgagcagttcgagcccctgctggccgagttcaaggccgaggtgctggcctacgtggccgcgcgggatcctgagaaggccgcgcgcctcgaggagaccctggccaacgacagcgagctgctgacgatggcgctcgaggccttcaccgtgcgtctgcaaacgcatgaacgcaaatacaacgcccgcatcaagcagatgctggcctggtgggccgagggctcgaacctcgacgcccgcctggccgatatgggcctggagcggcggacgatcgccgagggcgatccgaacgccttcccgccgatcccggccgagctcgagaccgatgacgacgcacggatccgctactacctcgccccgcacgccccggccgcaggctcgcgcctgcagtaccggcgcgaggccatgaccctgggcgagcgcgccgcggtcagcgtggaatcgcccgaggcgggcaaggtggtggtgacctacaccttcgccgcggacgccaacgcggccaaggtgaaggacgccaacggccggcagacggccctcggcgaggtgacggtcacccagctgtcgcgcgagggcgacggcacgccgagcgcggcgctgctggcggccacccgggcgcacttcgcgcgcgacgacgtgcggcccgagaccgacaaggtgatcgtgcaggcggccgagatcctgccgtaccggatccgcgcggtggtctacatcaacaccggcccggacacccaactgaccaaggccaacgccgagcaggccctggcggcctacgccgccgagcgccatcgcctcgagggctacgtcgacccgagccggatcgactacgtgctgcatgctgccggcgctgagcgcctgcagctgctcgagccgctcgcgcccatcgaatgcgcggcccaccaggcgccctactgcacggagatcaacgtcgaggtgcgcactctatga

SEQ ID NO: 353354 - DNA, 645 bp, Pseudomonas aeruginosa
atgagtgatgacagcgccccgcgactgagcctgctaccggccaaccgctcgccactcgaggcgggcctcgacctggctttcgccaagttgctcgagcgcatcgagccgccattccccgagctgatggatccggcggccaccccggcctcgttcctgccgtatctggccgccgatcgcggcgtgagcgattgggatccggcggcgccggaaagcgagctgcgcctgaccacggcgctggcctgggcgatcaagcgccaggccggcacgcgccgcgccctggtgcatgcggtcgagtccatggagctgggcgcccaggtcaccagctggcacgagaagccggccggcgtgccgtacaccttcacggtcgaggctacggtcgagcggccctggctgccgggcgactttccgcggctgtggcggcggctgaacgatgccaagagcgagcgcgacaacctcgacctgattctggtgcatgaaaccagcggcggcctgcgcgccgctgctgcagccggcacgccgctggctgtcggcgacctggatctggccggcgcgctgcccgagctggatctgcgcggcgacctgggcagcgctggagccgcgcagcactacaccatcaacgactacgacctggaggcgcagacatga

SEQ ID NO: 353355 - DNA, 531 bp, Pseudomonas aeruginosa
atgacagacctcacccgcctggtgcggtttaccgccgctggcctggccgaactggtgcaggccaaaaaccagggcctgaaaggcgcgatcactcacattgccgccggcacctcgcgctacaccccgaccggcctcgagacggcgctcaaagccgagcggcagcgcgtgaccattgccgagtatgaagacctgggaagcggcgagattcgcgtcgctggcgtgttcaagggcgcccttgagtatgaggtcggcgagttcggcttctttctcgagagtggcacgctgctggcggtgtactcggtcgccggccagctgctgacctacaaggcggccaccgccaccctggtgcagaagttcaccctggatatttccgcgctgccgagtaacagcgtgaccgtcaacgtgggcagcgagaacctcaacatcatgttgaccgaggagctggccacggtggcgacggcgaacatcgacaacatggcccgccacgtcggcctgctgttccgcgtcatggagctggagtccggcgcatga

SEQ ID NO: 353356 - DNA, 348 bp, Pseudomonas aeruginosa
atgaacgggccgactctggatctgatcgagggcaccaccttcggcttcgaggcgacctggtcggacagcacgggctcgccgattgacgtcaccggctgtgcggcgcgtttcgtgatctgcccggcggacagcgtccggccgctggtggagtgcagcaccgaggacggcggcatcagcctgggcggcgctgcgggcaccgtggcagtcagtctggccccggccaagacggccggcaagcacagcaagcagtggcagggcgcgcgctatgagctgcgtgtcgagtaccccagcggcgacgtttacagcctgctgcgcggatccgtggcgctgtcgccggggctgttatga

SEQ ID NO: 353357 - DNA, 312 bp, Pseudomonas aeruginosa
atgagtggcgccgcgccgcgcgtcgtggttacccgcggcgtcgagcgggtggtcactgtgcgccaggcgggcagggtggtggaggttcgccagctgctctcgccgcgggtgacggtggtcagcgcgggcgtgcaggggccggtcggcgccctggccgagaacgtgctgcagcgcaccctgcaggccgaggcagacgcccgccaggccctggcactggccagtgacgccaacgccaccctgggcgccctgctcgaggatctgcagggcgctttcgattaccacgcgggggctatctccgcacaagggggctag

SEQ ID NO: 353358 - DNA, 663 bp, Pseudomonas aeruginosa
atgaacctgctaacccagctcgagacgctgctcgcctcggtcaacaacctgatgggcgtgatcgacggcaagctgcgcaacaaagccaataaggccgacgtatacacccgcggggatatcgacgatccgctgcgcaccctcggcgccaatgctgcgaccgcctcgaagctcaaggtcgcgcgactgctgacgctgggcggtgaggcgaccggcgaggtcggtttcgacggatctggcaacgtcaccctgatggtgaccgtgcccgggctgctggataaggccgacaaggtcgacaccgtgaccccggcgcagatggaggcgcgctttgagcagctgatcggcgcagccccggaggcgctcaaccagttgaacgagttcgccgcggcgctgggcaacgacccgaacttcgcggccacgatgcttgcggcgctggactccaaggccgacaaggccgccacctacaccatcacccaggccgatgggaaattcctgctcaaaaccggcaaggcggctgacgcctcgctgctcggcggcaatgccccggcctattacgcctcggcggccagcgtttcaacgctcgaggccagtgtcgccgatgggttccagcgaatcgctgcggcattcaatgccggcgcgactcagatcaacgcaacgggagtttaa

SEQ ID NO: 353359 - DNA, 621 bp, Pseudomonas aeruginosa
gtgagcctagagactcagatcgccagcttggttacggcggctaataacctgacggccgccgtcaatggaaagatcggtgccatcgacgcgcggatggatacggctgaagccgagttcgaagagtggcgcaaccagaaggatgtcgagggctccttgggtgctttcggcacgattcgccgcaatatgttccaaggctttattcagtctctcggcggccccgctggcgtcgctgcgaactcaggtttcgataccgtcgatctcgggacgaatacaaacgtttatgtgcatttcaaggtgccgctaaacgttaacgtcaactctgaaatgttttggttcaacatcaagggttacagctatggctcgtcgaagatcgttgacgaaaccatggtcggttactgctacaaaccgaccttgtcgctgcaaaacgttgcggcattcgggagcatgtcgccggcggtttataaggacgccaatggcaatgtggtgttgcggattctgttgccgagtgcctattacacgacgctgcggatcgacaccatgcgggtcggcaatggccggctgttcaacgtcggcgacctcctgacgaagttgtcgctggctgaaaccgtggtctggaactga

SEQ ID NO: 353360 - DNA, 246 bp, Pseudomonas aeruginosa; identical to SEQ ID NO: 353333

SEQ ID NO: 353361 - DNA, 678 bp, Pseudomonas aeruginosa
atgtcgatcgcaatccctgcgccggccgctggctggcgtgcctggcttttgccgcttcacctggtgctgttcgtgctgcagctggcggtgctcctgccgctgcgcgtggctttcatcctggccggcttcgtcgtggtgccgctggccctgccgttccgcacccgccacgccgacaccgccgagcgtttcagccaggccgccggcacctggtgcctggtgacgctgccgcgttgggcctggccctggagcaatgaccgcgacggcgccttgggcgatcgccgcggctggtggcacaccaacgccccgttcggcctcggcgcctaccactggttttcgatgctggtctggctcgccttccgcaacccggccaacaacctgcgcttcacgcgcctgttcggctgcccggtgacgcgcaccgcttgtacctggtggggccgcgaggaggtggaagacgacccgggcaagggtggcgtgcgcttcctgatggcccgcgccggcctgctgtggcgcttctacggcctgtattgggtctggcagtggagtgccagccgcgccctggtcgtgcagctgggcttcaagcctgagccgtccgactggctcgaggactaccaggccgacccgacccgcgagtggaagggcttcacgttcgagatcaaccccatcaaggcgatcggctga

SEQ ID NO: 353362 - DNA, 567 bp, Pseudomonas aeruginosa
atgacctggaaacccgaaccgcatccgctgcgctggcccgtcaccaccgagggcggcgagaccctgaccagcatcgagctgcgcgccctgaccgtcgaggagcaccgcgccgccctggccaccgtcggcgacgacgaagacgaccagttcgaggccctgctgctggcggccaccggcttgccgctgtcggtgctcgagcagatcaagcgccccgactacgtgagcctggtcaagcgcatgcacgagtacgtcaacctgccggccagctacttcctgggccgcaagcccgaggatcccgacgacgtcgagctcctggtgccgatcaaggctatcggccgcacggtcgaccgcctcgccctgcaggtgccggcgatgaaggcgaccaaggtcatgcgcaagctcaagaccgacgccgagcgggcggacttcatcagcgcgcactgcaccggcctgtcgaccgtggaagtcgtgcggctgagcctgcccgattggacgcagctgcaggagcgcctgcacgcttttttgaacaaaccggcggactactttccgaacgcgacatcgaagtga

SEQ ID NO: 353363 - DNA, 2577 bp, Pseudomonas aeruginosa
atggctgacaccaagtcgaagtactcgctgcggctggctgccgtggacgcctactcgaagacgttcggcgacttctcgaagaaagccgagcagctgcaggacgagatcaaggggcagcgcgccgagctcgacaagctgaaccgcgccgcccggtctgccgacggctacaccaagctgaccgagaagctcgacaagaccaaggcctccctgcaggcggccagggtcgagcaggccagcctggccaagacgcaccaggccgccaccgccacggtggcgcgcctcgagcaggagtatggccaggcggcggccacgctcaaggcgctggaaggcgccgaagcggccagcaccgcccaggtcaaggcggcccgcgtcgagcagaaccggctcggccgcgagctggccagcgccacggccgaggtcaagcgcctggacaacgcccaggacaagaacaccgccagcctgcgcaccctggaagcggcgcagcgggccgagcggaatcagctcaagggcctgcaggccgagctgaccaaggccggagtagacaccagtcagctggccgccgagcagaagcgcctcgagacggccacggaacaggccaacgcggccctgcaggcgcagcgcgcacggctcgaagccgtgagcagcgcccaggggcgtatcgacgcgaatcggggcgctcgtgcggatctgcgtgggcagatgctcgagaccgccgccatcggctacctggccgccaagccggtagaccaggcgatgaacctcgaagtggccatggccgacgtggccaaggtcatcaacttcgaggagggtcagcgcgaagcgatggcgcaggagaacctgcgcatggccagcgaccggctgatctcctcggccggcatcaccgcggtggatctcgccaagatccagtacgccgcgggtcagtccaacatcggcggcgacgagaagaccagcgagggcaagcagcgcgcggtgatggagttcacccgcgacgcggcgatcatgggcgcggcgttcgacatcgacgctcagacggccggcgagaccatggccggctggcgggcctcgatgaagctcgaccgggccggcacgctcgacctggccaacgccaccaaccacctggggaaccagttcaacgccaccccggccgacattgcggcggtggtgaagcgctacggcgcgatcggtagcgcctcggggctgagccccgagcagagcgcggccctgtcgacggcgtttctcaacccgggcaccgagaaggaaatcgccggtaccggctttaagaacttcctcggcgccctgaccaagggcggcgccgccaccaagggccagcgcgagacctgggacgccctgggcttcgatcccgaggagctggccaggggcatgcagcagaacgcgccggagacgatccggtcggtgctgcaggcgctcaagcaacagcccgaggaggagcagaacgcgctggccacccagttgttcggctccgaatctatcggcgccatcatgccgctgctgggcaacctcgaggaggtcgaccgggccttcgcggcggtggccaacggcgccgaccgcgccggctcgatgatgaaagaggccgagggcgtggccagcacctcgcgcgccggctggaacggattcgtggccaagctgacgcggctctcgaccctggtcggcaccgccatgctgccggccctggaggccgttctggtgcccctgggcgctctggtcgacggcctgagctgggcggccgagaccttccccaatgtgacggcggccattgcggtggccggcggcgcgctggcggcgatgaaggtcggcgcgctgggactcaagttcgccggcctgctggtcggccaggccttcaacaaggccgggctggcccgggccaagctcgacgccaccaccgcgcgcacggcggtgaccgccgatggcgcggttatgcgcctgaatgccgccatggcccgcctgggcgctgccggcggggtcggagacctgggcgggcgtggtggtcgcggcggccgagctggccgcggtggccgcggcggtcgcggcggtcgcctcggcggcggcctgggcatgaagggcggcggcgcgctgatgctggcggccggcgccgtggatctcgcccaggtggtgatggatgacgaatcgaccggcgaagactacggcgagtcgatcggcgcgaccgcgggcggcatgggcggcatgtgggccggtgctgctgccggcgctgctattggctctgtggtgccggtcatcggtaccgctatcggcgggatcctcggaggcgccctgggcgcctggctgggcagcgaggcgggcggcgccctgggcggcgtggccggatccgcggtcgatcgcctgcgcagccccgacgaggtcgccgcggcggtgaccaatgccgacaaccggcagatcaccttcgcgccccagatccaagtcaacggcgccgaccaggcgaccagtgaggcgctggccaaccaggtgatggcgagaatgcgcggcgagttcgtgccgctgatgatggccgacccgctcgccgtgcggcgcggggcggcgctgacagatgggagtgactga

SEQ ID NO: 353364 - DNA, 390 bp, Pseudomonas aeruginosa
atgcgacagcagatggcgctgggcgagttcgttttcgggctcgcgaccggcttcccgtatgagcgcctctcgcgcaagaccacgggcggctgggtagatctggacatcatcagcagcaagccgatgtcgcacaacaccggccagggcctggagtccctgcgcctgagcggcaaggcccagctgggcgccggcatggccaagctcgacgagctacgcgccatggccgacgcccgccagccctacaccctggtcgacggaatcggccgcgtgtggggccgctggcgaatcgacgccgtcaacgaagaccaggagcgggtgatcgacgacggtaccgccacgctgctgtcgtggacgctcgagctgcaggagttcgtcaatgcgacgggttag

SEQ ID NO: 353365 - DNA, 213 bp, Pseudomonas aeruginosa
atgcgacgggttagaaccatcgccggagactcggcaaacgtgctgctttaccgggagctgggacgctccgacgacgaggtcgaggaggctttctggctggtcaacccggggctggcagagcacggcgcggccctgccgtccggcctctgggtcaacctgcccgagctggccagcaagccggcccaggcggcgccgatcactgcctgggactga

SEQ ID NO: 353366 - DNA, 198 bp, Pseudomonas aeruginosa; identical to SEQ ID NO: 353332

SEQ ID NO: 353367 - DNA, 1020 bp, Pseudomonas aeruginosa
atggctatcggatacaccccggcggtggagatctacggcgccaacgcggcgctgattaacgcgcgcctggtcgattgggagcacgtcgacgccgccggcatcgagtcggacaccctcaagctgacggtgaacatcgagggcctcgaggggctgccaagcgtcgacggcaagatcggcctgcgcgtgggctacaaggaaacgggcctggtcgacaagggcgagttcgtcgtcacgcgcaccacgccccagctgttcccggcgctgctgctgatcgtggccaccgcggcgccgttcaaggtgaaggacgagaccggcttcaaggcccggcgctcggccagctatgccatgaccacgctcggccagatcttccgccagctgaccaccaagcacggcttctcgccgcgggtagcggccgagttggacgcgatcccgatcgttcacgtcgaccagtcgaacgaaacggatatgggctttctgacgcgcctcgcgaggcgttacgacgccgtgacgaagccggtcaacgacctgtacgtgctggcccgccgcggccaggtcaagtcgctgagcggcaagccgctgccgccggtaaccctctcggtaacgaaggacaaccgcccgggcgatcgcgcgttcatcgcggcgagcatcgaccaggacagccgggttcgcttcaagggctgcaagaccacctggtgggacggcagcgccggcaaggaatgcgtggtggaggtgggcgaggcgcccttcaagacggtgcgccagcggtaccaggacgaagctgaggcgaaggccgcggccgagggcgagcaccgcaagacgaagcgcgaggcggcgaagttgcggatcgactgcccgggcaatccggcgttcggtgctgaggggctgctcgagctcgacgacagctggccaagcttcatgcgcggcacctggtcgatcgacaaggtgactgccagcggatcccgccagcagagctaccgctgcacccttgaggcgtcctaccccgacgggcggcaagagtga

SEQ ID NO: 353368 - DNA, 366 bp, Pseudomonas aeruginosa
atgaagaaaagcaccaagattgtgctcggccttggcgccgtggcgatcgccatcggcgcctacaaagacctctcgggccgagagaccaacgggctggccaacgcccacaaggcggccggcttcgagcccgcgtgcgagaccctgcaggccgacggcgagacctgggcgctctgcgcgatcgggcaaggcgcgccggccgtatggctgcagcgcggcgaggcctgggcgaccggcaacggcgtggcccagggcgtggcccagcgcctcgaggcgaacggcccaggcccctaccagcacctgccgcgcctgtacgtcgaccgcgaacagcccgtcatcatgccggcgctggtgcgcgccaagctgtag

SEQ ID NO: 353369 - DNA, 141 bp, Pseudomonas aeruginosa; identical to SEQ ID NO: 353331

SEQ ID NO: 353370 - DNA, 285 bp, Pseudomonas aeruginosa; identical to SEQ ID NO: 353328

SEQ ID NO: 353371 - DNA, 324 bp, Pseudomonas aeruginosa; identical to SEQ ID NO: 353326

SEQ ID NO: 353372 - DNA, 657 bp, Pseudomonas aeruginosa; identical to SEQ ID NO: 353325

SEQ ID NO: 353373 - DNA, 699 bp, Pseudomonas aeruginosa
gtggacaccaaaaaagctgaattaaaaaagaaaatactagaactagttaacgaaggccatactcaaaaaaaccaaggaacactactctccaccctaggcattttaattacaaaaaccggaattcaactaaaggaagttctggagaatcagaagctaggtgacttcatagctcgtgaattatccgaggaaatcgaaatcatcggagccccccaaaacccagcaataaaaatagcactcttgcgatctttatccccgcaaagtgaggatctaattccggaaataaagaaatccgaacccagcgaaaaaaatcgctatataagagcgatatggtcggcactttccaatgaaatcgaccccggatttaaaagagtaatcaagctaggcgatcaccctcaatataaagacatcccagaaagcacgaacacaccagaaaaccatattgaactacccagcaaattcataactacagaaagtaaatttccggaggaaaaacttcgaatagctgagctcgatacaaacatcaagagatgggcagaggaaagcggaataagtattgagtcgcttgtatacaaaaagcagcagagagaagaaaagccacaaaaaagtcgacttgaaaaaattctttcccttttcactcaggatgagttgaagcgagtaacgcttccgctcgacattgtggagaaactgctaaaggagtag

SEQ ID NO: 353374 - DNA, 888 bp, Pseudomonas aeruginosa
atgagatttgttttcggatacgcagggattccatccgaaatctacgacagcatctacaaatccaggctctcaatcactgggcaaaatgctgacttcgaaggaactccaggcggccctttcggcacacaactaaacaagagtcacgccattaagctactacacaaattaaaggaccgagcaacaaaagagacccgccaagaaagtgaaaacactgcttacgcggtcgtttatgtaaaaaacccttattactcccccaccgagtttgagcagtttttcttcccaaacaccttcatttacccagtagagtgggagccagactggtcaaccacaaccagcattcagcaatccaaaaacaagcttgcaaaaaaactaagagaagcaacttcaactttaaaaccaatacttcaagcattaaaaaaagaagttaccgagaaatctaacagaacaccactactccttcctaccaagaacttcaagtcagatgcactcttaaactatctgaaagaacttcaatgccaactagttaccgagggtgacccaggagagaagataaggcaaataaacacgtcctttgaacgcaatcatccaatgcaaaggactgacaacaaacaaaggccatgctttatagatgatgctcaaatagagttccactcacctggatcggcgagacatgggattctaagagccacccctgaacacaatgcagaatgcatcttaggcggaataaggcgcctaggcgcgccctatcaccctgcattccattatgactgcattaaaggaaaaggaaatctgaagggaatcttccataattgccatggagaagagccaaaagcaatggaagggaagccacacttgaatatagctccaaacaattttgtcaggatctag

SEQ ID NO: 353375 - DNA, 351 bp, Pseudomonas aeruginosa
atgcttcgctcgatcaagatcatatcgacctaccctgatctgcctgcgcggatccttgagcttcgctcactgacccttgacgatgagctggacgcaacaatcaccctgaccaccgcacacaaggccaaggggctggaatgggatttcgtttgcctgtacgacgacttcaacgcggacccgctggcccccgacaccgacccaggcaagcgcgacgatgagctgaacctgatctacgtcgcagtgacccgcgcgatgaagatcctcgccatcaatagcctggtgctatcgatcatgcagcggtacgtggacgacagaaagctgaaggagcagatagctagctgtgaaaaatga

SEQ ID NO: 353376 - DNA, 1326 bp, Pseudomonas aeruginosa
atgaggctgtcgcgctttcccatctcgacactgctggactcggcctcgggacatctcgaggcccatttgtataagaagcggcttgctgccgaaagcggcgaaccgctggctcaacaatattccggcatcattttcagcggtaacccgcatgaaaccgttcctcggcgcctgctgctggataaacgcctcaccccgctggaacggaactgctggcaagtgttccgcttgctcattaacgacgacgggctgaccgcgttccctacatacgagcaactacgcccttatctcggcatgcagccgggtaagatcgcctcgcgcgaaaccatcgccaaggcactcaaggtccttcggctgacacgctggctcagtctcggccgccgcctgcgcaacgacctcaacgggcaagtacaaggcaacgtctacatcctccacgacgaaccggtatccccggcagaagccctggagctggaccccgactacatgcagttgctgagccagtccaccggcgacagcaaccgagccatacgcgaaatcggccaggtcacatggcgggagttcagggatgacccggacgtgggtcgccgcctcccaacccatctggagaagctcgagggacgcttgaaccaccagcaatgggctattgatagtcagctcgaagcggatccagcggcagagttcggcatccgaactctgcccgatctacctcattcaaccccgagttcggatgccgaactcagtgaaatcagcggcaagcaatgcgctttaccgctgagttcggatgccgaacccagacagaatccgccgagtacgcccttggttcggatgccgaactcatatagtacgtatacatacaaacaaggttctgtatgtaaaaagccagtacaaccgcgaacacgcgaggaagcacatccgaactggcagggcctcttgcacacactggaggccgagcaacggatccaagccgtaagcgcgctccgacgggtgtccgaggatcttcggctacccatcatcgagcaatggcagcaccgatgtgccggcggaaccgtcggtaatccgttcggctacctcatgacgctcatccagcgtgcagtccagggaaagttcaacgcttcttgggctccggaagaaccggctgaacgaaccatcccagcagcggaacgccccagtcgtgctccggcaccatcaagccccatagcgcctacacagcctcaggtccagcccaggggggatacccggacagggagcgaggtcctcagccggctcaaggacctcattcggcccaggcacggatcgagcgtgccatccgagcggggtgatgagccatga

SEQ ID NO: 353377 - DNA, 696 bp, Pseudomonas aeruginosa
gtgctgcgccggtcgacggcccaagtcagaagcttcgaagacatcggctatccgagcgaagtggtctccgccctgatggatccgcagttgcagggcctggtcctgttctgtggcgatatggcgaccggaaaaacctcctctgccgcctctctgatcctcgcccgactgcaaaccctgggcggggtgggcttcaccgtcgaagatccgcaggaaaccaatctcagcggccagcatggactcggccgctgtatccaggtcaggacctcgcgacgctcgggaggctacagcgaagccctgttgcgcacgctgcgtaccggagccgacctggtgctgattggcgaaatccgcgacgaagacaccgcttatcaggcttgcaaagcttcgctgaacggcaacctggtcatctcgaccatccacgcgaaaaactgcccccaagccatcgaacggctgatcaccctggccaaaccgctcgcatccaatgcttacgatgtggtcgccgagggcattcaggcggtgatctgccaggaactggtaagtgatggcgccgctcgacggctgcacgcggaaccgttgctcttcaccagtgtggattccgtcgccatgcgagacaagattcgccggcagcagattcacctgcttgaggacgacgtgaatcgccaggctcgcagaagcctgtgggagccaacctatgaataa

SEQ ID NO: 353378 - DNA, 300 bp, Pseudomonas aeruginosa
atgaccctcgacgcgctttcggaactgatggacgaccagcaaccgcgggcgttctacgactacatccgtaacaaggactacggcctgtcgccggaaatcccggcggacaagcgcaccctcaaccagttccgccgcttcaccggccgcgccgaaggcctgtcgatcagcttcgaggcgcacctgctgggctccaggatcgagtacgacgaggagcgcgacacgctgagtatcagcagtctccccactcagcttcgcgaccagctcaagcgccgcaaggcggagcaggagagcacgtcatga

SEQ ID NO: 353379 - DNA, 528 bp, Pseudomonas aeruginosa
atgaacactgaagcccgctttccgagtatccacgcctcggccgcgttcaccgactcggcggtggttcatgccaatcaagttggggtcaatccgatcgaactggacgccctcagccaagtgatctcgcgcctttcgcgggacgagagcacggtcgcgcccagttcgatggagcgagagcttcgtgagctagaagaactggggtacgtcgagatctcgaccacccaggccgggaccctagtggtcactacgcgcgctccagggcaactgctttcggcctacttctggtcggtatggatcccgcgccacctgttcagttgctcgctgaaggtgagcttgatgtcacacctctgctgcggcactcaggactcccagcacctcactgcggtgttccgcattgcaggcagcaaggacgccgcacgtgagttcctgcatcagttggccaacaactaccccgggcatgagcccgagttgcccgaactggtggctgtacaggtcggtgatgcactcagcaaggaggccgaatcatga

SEQ ID NO: 353380 - DNA, 291 bp, Pseudomonas aeruginosa
atgaacgtggtccagcagttctaccagctactacagacagagctgcagacactccgcgcgctccccagcgcacaggacgaaccacgcgcaagctcgaccgccaatgtctcctcggcaccgtccgacgacttcctttgcggcaagtgcggtctgcccctggttcaccgcaagaaaaccggcaagggcggcttcgacttctggggttgcagcggctttcgcaccacagggtgcaaggtcagctaccccaccaagagcggccggcctgacttcgacaacccgcgcgggctatag

SEQ ID NO: 353381 - DNA, 123 bp, Pseudomonas aeruginosa
atgccgcgcagccgtttgaggaatgccgccaactccttgtgctggttgtcgtccagttcgtaccggtacgacttgccggtggcgttgtggcgcaccttcgtgctgcgggtcgagtggacgtag

SEQ ID NO: 353382 - DNA, 1083 bp, Pseudomonas aeruginosa
atggccgaagccgcacagccgggacaccgtggcgatcgacgcctgggcgtcctgcagcagggcgcgcgcggcctccaggcgaacccgctcgacgtagcgaccgggcgccacgcccagttcctggagaaatacccgggacagcgtacgcgggctcatgcaggcctggtcggcgagggcttccagggacaggtcgccggcgaggttggcgggaatccactccagcagcgcggccaggcgcggggtgcggttcggttccggggtcagccaggcgctgaactgggcctggccgccaggacgcttgaggaacatcaccaggcgtcgcgcgacgctgagcgccaggctgcggccgaggtcggcctcgaccagcgccagggccaggtcgattcccgccgtgacgccggccgaggtgaagatgtgggcgtcgccgtcgcggcaccgcgggtcgtaggtgtgcaggcggtcgccttgcacatggacgccgggaaacccctggcgcagcgtcgccacgtcggcccagtgggtggtcgccgggcgcccgtcgagaaccccggcggcggccaggatcagcgctcccgaacacaccgagccgagccgccgtatgcacggttcggcggctttcagccaggcgagcaggtcggcgttgcgggtctgcgcctcgacaccgaggccgccgggcaccaacagggtgtccaggctttccggcggacagtcgcgccaggcgaggtcggcgcagatgcggatgcccgcggaactgggcaccgcttcgctacgctcgccgagcacctgtatccggtagaaaggcggcaggccctggcgctggcgttcgacgttggccgaggcgaatacctgcagcggtccggtcacgtccaggctcatcacgtcgggatagatcaggcaggcaatcaggcgcggttcgggcatggcacaacctcatggcgatggcggcagtctggcgtccttcgggcctggccgcaatgccagtcggcccacggatcttgccattcgctcgccggggcgtcccgctgcgccgatggttggtatcgcctcggcacgccgcatgccctattgtctggtaacgggtga

SEQ ID NO: 353383 - DNA, 630 bp, Pseudomonas aeruginosa
atgcccatcactgagcagcagctgatgcagatatttcctcacgccggtcctcgagccggcgtttttgttggtgcactgaaccgcgggatgacgcgcttcggtatcacgtcgcctgtgcgtgcggcggcattcctcgcccaggtcggccacgaaagcggccagttgacccgcttggtggagaacctcaattacagcgcccaaggcttggcggcgacctggccgagccgctatctcggccccgacgggcagcccaacgcgttggccttgcggctggcgcgcaaccctcgggccattgccaacaacgcctatgcctcgcgcaacgggaacggcgatgaggactccggcgacggctggcgtttccgcgggcgcgggctgctgcaggtcaccggccggtcgaattaccgcgccgccggcgccgggctgggccagccgctggagcaggaacccgaactgctcgagcagccagagttcgctgcgctgtcggcggcctggtggtgggccagtcacggcttgaacgacctggccgaccgcggcgatttcgccgccatcactcggcgcatcaacggcggcacgaacggtcaggcggagcgcctggcgctgtgggagaaggccaaggcggtgctggcatga

SEQ ID NO: 353384 - DNA, 243 bp, Pseudomonas aeruginosa
atggttcaagtctatgaactccgcatcacctatctcgcagggaatgcggagatcgctgtgctgaagggaagccaagaagtgggtgttgagcgattctctgggaaggtttgtggcggccccggctatcgccggatggttcatggcgaggtagggcttaccgcggagttgaagagcggggagtgctccttcgacttcaggctgtctgggccgaaggatgcacgtatcacgctgacggtggagtga

SEQ ID NO: 353385 - DNA, 441 bp, Pseudomonas aeruginosa
atgaacactgagcagttcatccgggagtccgccgcgcgcgggctttcccggcgcgcaacgatgcaggcccttggcctgggccgctggaagttcgacctgatcatcggagccatggggcccattgagtgggccaagaacggcacgacgctcggcaaccgcctggcctacgaagcgtcgcgcggcaggttcacaccggcgcaggccgcagcactggagcgcgcacacgaacgctggagcgagagcagacgcttcaccgtcgacgacgtgaccgggaccatcgccgagctggtggagcacttccagagcccggtccacgcaacgaccgtccgccgccgcgtcgccgccggcatgagcctgcgcgacgcactcctgaccccgcgccagcagcccaagcccgggcgccggcatccctggaaccgctcacagcaggtacagccatga

SEQ ID NO: 353386 - DNA, 660 bp, Pseudomonas aeruginosa
atgaaagaacgtccgatcctgttcaacgaccagatggtcagagccatcctggaaggccggaagacggtgacgcgacgcgccgtgaagggctttcagataccaaccgaggacaaaaccacgcctcacgagggcctccgctggagtgcgctcggccagcgccacctgcgctacgggttcaacgtgttcggatccacggaggaggaatgcgcgcatgagcttgctcggtgcggggtctgccctttcgggaagcccggcgaccggctgtgggtgcgtgagacctggggcttgcaggttaggagctacggcgggggcgcgggcgagttcattgtttaccgcgctaccaacccggacgccatctattgcaggtcgtctgaggggcgcgagtacccagttaagtggaagccaagcatccacatgcacaggcactcaagccgcatcctgctggagatcaccgccgtgcgcgtcgagcgcctgcaggatatcagcgaggagcaggcacgggccgagggatatcccgccgagcgcgaatgcgaaaccggcggtagtggcttggatgcctggctctggttccgctccctttggggagagatcaacggtccagaggctttcaccgccaatccctgggtctgggtcgtcgagttcaagcgggtgacgccatga

SEQ ID NO: 353387 - DNA, 489 bp, Pseudomonas aeruginosa
atgagcgccatcatcagcgaatgcggccagtaccgttaccttctgactcgccctggcgactgcctggccgacaagggcacagcggttttcctaatgctcaatccgagcaccgccgatgccgcgctcgacgatccaacgatccggcgctgccgcaacttcgcctcggcctggggctgcaacgggatcgccgtcgtcaatctgtacgccttgcgcgcgacgaaccctgccgacctctggaggcacgacgacccagtaggcccagacaacgactggcgcctgcgcgcgatcgcccgagagtacaccgacatcgtgtgcgcctggggcgccaatgcgaagcccgagcgagtagaagccgtaaccagcatcctgaccgccgccggcgggcgcctctggtgtcttggcacgacgaaggatggccacccgcgccaccctctgtacgtgcctggaaatcaagcgctccagccttgggcgccgagggtaacgccatga

SEQ ID NO: 353388 - DNA, 1080 bp, Pseudomonas aeruginosa
atggcgggcggggaaagagaaggcattgccaacattgcgacaaaaatcgcagaagaaatcactccatggttgaaatggaatactcatccaccatatagccagaattttacttgtcagcaggcgagcttgcataaaagtaaaaagcaagatgatgaaagcgaaaaggttgaagatcataaccatccggctgacgcggtttattcatacaaagatccctatacaaataagcaaattattctaaacaccgatctaaagagctacgcaaagggctcaataaagcagggtacaattagatcggcgcttaaatcaatggcgcagacaatagattgtgcgagattgagtaaggaatggcgcgatcgttactctattccggaaagagatacagatataagagggatgttgtttgtttacaaccatgatggtggttgggatagcaatttttacgaagtgttctacggtaaaaagaataaaagaagaactgggaaatcgtctgaaaatgagcaggatattaatattcagaatattgatcttcagaagggtcagcagatccatattatggagccagggacaataaaatatataagaacaataattgacgacttcctgaagctgcgagcaaagggggagttcaatacaaaagactatcagttccattatccagatttaaatcttcataaagtcagtatgctgccaaatgagcggcctgcgactttggagcttatttcagccccctttatgattgttgagtatcaaggtagaactctttatggcgaagatgggcgggttgccgagactattgagcccggacataaagtctactataaagagaaaataaaagattggaaagagatgttctttttgatcgactcgctatcgaattaccagatacttaataatagtaagaaaatttcgattagggcgatagggcaagatcaggatgatgcagctagaagtttcttcaggagtgcggcagatgaatatgtaaggagatggggcaagtctgagataataaaaagcatagagttcgaagtgataccgactgtgagcgactatttcagcaaagaagatatcgggtggtaa

SEQ ID NO: 353389 - DNA, 1116 bp, Pseudomonas aeruginosa
atggaagagaaaaatttttacatgccaaatgacaaggctatctacgatgctgttaaaagcgccaaagttagcagtcagagcttgtcagaactgttttttaaaagaggtataattgtttcccctaagacggaaagagaggagctggcgtcttattactccagaatgtttactggttatcgagattatgatgagttgacttcaaatcttcagtcaatcactcatcgggagaagataactaccaagtttatagctggctcagattcgagagaggtcattaatgcggctagcgagcttgagggtataattaatgcaaaggattatcctaaagatgcttttgctcaggttcaaaagctaggtaatgagatcattattacgataacctataacaaggttaaccctaataaaagccagcttcagcaaactgttacgaaagaagcgaccataactattacagagctagcaggtgagcttgtgatgaggtcgcaatgtaatgaagactcggatcagtggtctaaacactttttagagcttttagtcaaaaacagttcaggaaaaccaacgattgaagctattagtctggaatttatcgaggacgcaaaagataggtcaaaatttctggaggatctgataaacaatatagatggctttgaactggtagacgtttcaaaggtctctgtttttaatccggaaaagaaaaaatctgattctggtagtgagcttggtgattctgactcagatgaagcggaagatattgatagtggcactcatgttttcaaggcttctttgaatggtaaaggcgttctgagttcaaaggaggttgacctgctgcatagcaaaggattttatagctatcatgctgtttggacttgcattgaaagtagtgccactccagacatttatgaggttgaggttaaattcgaagattctgaaaactgtactgtgttctcgcaaaaggttaaaggctactatcggtatatttctcaggggaaccactctactaatagaattgctccgccaggtggcgtcgagagagagctgcatacaaagatagaaaacactgcgaggaagctgataagtaagttaacacagcaggtggcccctaaacccgcaagctga

SEQ ID NO: 353390 - DNA, 690 bp, Pseudomonas aeruginosa
atgcacaagctatttaaccttaattttgaatcagagtcgcatgaggttgtagagcgcctaagaaaaaataaaaactatgaggactctacaaagggattatacgacctgaatataacagatggagatgtgtcaggcttcttttggtatcgagaggaaattgttgtattaaatgagtctgatattcactcgtctgcgcagaccataaccttctttaaagttagtcgttttttatttagacttcggcatgtttctaagagaaattaccttctgcagattgaatcctcttcaaaatctattaaaccatttcttaaggctttgaatgaaataactcagtcaaagttgtttgtatctcaaatagacgttgatctggaaaaattttcaaacaagattataagcttaaatttgccgttgacgaccataacgcacgcttacgcatcgagccaagttatatctgcaagtgagaagattacattttatttgtatagctctaagaatgcgattgagtcctctcaagagcttcttggtaaaaagaaaattcgttttgataggataaaattgcaatcttcagagagtgggagaacaattgtattggatataagaagcaattgtctttacaacgtttccgaggcgaattctgaaatcgagagacgatttattgattatgtgatttccactcaatataaaagttag

SEQ ID NO: 353391 - DNA, 867 bp, Pseudomonas aeruginosa
atgatatttacaagaagccctagtggaatggcaaattttagtcgatttgccggtgctgacattacgctctatgtcgaagggaggctcgaggcggtaactcctgtagaagactcaagtcgggtggatactaagttttataacgctctatgtgcagtgtatctgcctgatgttaaagttaaggtaaagctcactgggaatcgaaaaagcgctttggattatcattcaaaaataattaatgagtcaatacctaattccttcgtgattgtcgatagggactatgatggattgctttttagttcatttgaaaagccaaagctaattttgacctatggttatagctgggagagtgatttctggactgagcggcttttgataagtactttgaacatgtctaccgcatcagatgcgcgtgtacttgagcttgcttcagtaaagttgcgtaggaccttgcgacggcttgcaaagctgagtgcactaaatgcggctgcgcatattaatggtgagtcaatatttccttctaaaaagagctcaaagggtgtgtgtatcagtgcttcctcggagtttcctatatctcttgacgagtataggcgagtatccaagagcctttctagtatgtgccaggctatggtggctgtgtatcgaagtgctctgaggttagctccggaaaaaattattcaaggtcacttgttggagtatgcttctctattcttgatttcgtatgtttatacgaactcgactggtactatgcttaaaaacaatactatactaatgaatattgctctaagcttgttttctgagaggccgtcttactatatttctccggatgttgatgattattataggagagagttttcgcgtgctatctga

SEQ ID NO: 353392 - DNA, 957 bp, Pseudomonas aeruginosa
ttgggacgctcgttccgaaccgatgacagcacgcatagcgagctcattacccgtgacgcagtcataccgtttctggaatcccgtggtttccaaggcatcctcgaatttcgccgaattgccggaactgccatcacacagattattgaggccagcaatccggatggtcaggcggtgaaaattcgcgttcgtctctgctggcgccgagttactacagatgatctgaagtactccgccgctcagctacgcgcgcgattaattaatgaggactggggggcaacattagaaaagatcatgcgtcgggatcaagagcagcaggtcacccataaccttctccttcagcgtgatggagcgctaattgtttatgccgccctgatacctagccatgacctcaaaggaatattcgacactcaggccgaggttagtcaggaactgattgaaagtggacagatgggacgacgcaaaaaaaatcacgccaagaatggcagcagcccaaccctgtatctgatggacgaaagaacacctgcggcgcatcgcgtcgctgacgtcctttggaactggccgggcgttatagacttgatgaagctgcctcaaaaggctcccacaccgaacagccacgacgctatggacgactgcccacttccggaggattactcaatgttaggtaccgataccccattgcaacgaaccgtactgcgggctgagtatccccgcgatccaaaggttagggtcgaagtacttaaacgcgcttcgcgctgcgagagaagtgggtgcaacgactatcgggcctataaaggctttctagatgtccaccacatcctgggtataaagatgggggatcgggtctggaactgcgttgcgttgtgcccgaactgtcatcgtgacgcccatttctcacctgaggccgatagcataaattttgaacttctaaagtatgcggaaaggtttgggcccatctga

SEQ ID NO: 353393 - DNA, 1188 bp, Pseudomonas aeruginosa
atgaagtcgaagatcacccagtccctcgtcgagagggcaccccggcccgagccgggcaagtcggccctgtacgccgacaccgagatgagggggttctacctcatcgtcacccccaccaagcgcagcttctacgtgcagtccctcgtcaacgggcgtcaggtcaggacgaagctgggcgaccacccggcgatggacgccaagcaggccagggacgccgcccggcagacgctggtcggcatgcggggcggcaccaacccgaacgaggagcgccgcagggcccgggcgcgcggcatcaccctgcgggaggggctggatctgcacctcaactcccggcggctggccgacaagacccgcagcggctacgagtaccacgtcacctattacctcaaggactggctcgacaggccgctggccgagatcggcgcggaccgtcagggcgtgcgcgagcgtcaccggcggatcaccgagaggagcggcgccacctcgggcgacaacaccatgcgggtgctgcgctcggtctacaaccgcgccctgcggcagttccccgacctgccgccgaacccggtgggcaacgtggacatgaacggcatgcgccgccgcgaggtggacgccagccccgacaagctcagggcatggggcaaggccgtgctgtcgctgggcaacccggtgcgccgagacctccaactgttcatgctgctttctggcatgcgccggacggcctcgtgcgaagcgaagcgcgcggaccttggcgacggccacctgcacgtcccgaaccccaagggcggtgccgccaagaagttcgatctgccgctgtcgtcggcgctcgtcgacctgctggcgcaccgcgaggagaacgcagacggcgtgaggcgaaagacgccctacctgttcccggccgactcggcatcgggccgggtggcggaggtccagcagcacgagctgggcgaccttaccggccatgcgctgcggcacgcatacgcatccctcgcgttgcaggcgggcgtgccgctgctggagctgcgcttcctgctgaaccacagcgcgtccagcggtggcgtcacgatgggctacctacacccgtcgctcgaccacctgcgcgagcatcaggagaaggcatcgcgctacatcctcaacgcgctcggcatggtgcacgaaccggggacatggccgccgagactggcgtcctga

SEQ ID NO: 353394 - DNA, 516 bp, Pseudomonas aeruginosa
atgacactagagcaaatgagcatgaaggacctgctggccctgcacaaccgcatcgccgacaagcctgctggccccaagacgttcgcgacgcgggcgaagctcgcggcccggatcgagcagatcgcggcagccaaggacatcgacctcgccgcgtccaggcagccgaagaagcctaaggcgaccgcgacgcgcgcagagccgaaggcagaagccatcgagacgccagaagcgaccgagaagaagccgcgcggccttggggtcggggcgctcgcacgcgcgatcctgatggatcctgcgggttacccgcacgcgctggtggccgacatggtcaacgcgcagatcgagggcgcggcggcgacggccaagtcggtgcgctggtacgccaacgacatgcgcaagaggggcgtcgaggtgccgccccgtcagaagcaccatcccgctgacatggacgaggagcagtccgccgacgcgctgtccaccgtccgagtggtcgagcccgcgccatccgacgactga

SEQ ID NO: 353395 - DNA, 1077 bp, Pseudomonas aeruginosa
gtgaagaagcaggcaagaatgctgctggataaggggatcgactcgctggtactcgcggtcgagcacttcaacaggccgtgggaccgtggcagaaaggaggccgtcttgatcctcctagaccggggattcgagctgatcctgaaggccgcaatcatccacaaaggcggcaagatccgggaggcctacgagcgggagacaattggcttcgagaagtgtgtaaggaaatgcctggatgacgccgacgtgaagttcctcagcgtggacgagggacttaccgtccagatcatcaacagccttcgcgatgccgcccagcacgacgtggtcgagctctccgagcaggagctatatctgcacgcacaggctggcgtgaccctattccgcgacatcctcggccgtgtcttcgacgagaagctcagcgaccacgtgcccgagcgcgtactccccgtttcgccgaatcccccgcctgagctgcactcaatgatcgagaccgacttcgagaagatcagccagcaactccaaccctactcgcgcgaccaagtggaggcgaaagcaaagctcaaggccctcgcgatcgtcgaatcctcgctttcaggggtgcgttctcagccaagcgaactcgaggtgaacgcgctcgcgcgcaaggtcaaggaaggcaaaacttggcaggagttgtttccagggatcgcgacactgcgggtctcggctgagggcgaggggataaacgtcgccatccggatcacgaggaaggagggagacccggtgtgcatcgtcccggaaggaacgccgggtgccaccgtgctcgcggtgaggaagatagaccctctcagcttctactcgctaggactcgccgatctcgccgagaaggtcggcttaagccaaccgaagactcttgcagtggtgaaggagctggacatccagaactccgaggattacttcaagacgttcagggtgggcaagtcggcgccattcaagcgctactccccgaaagccttggagaagatcagagaggagctcggccagctagacatggacgaggtgtgggagagacacaagccaacgggtaggcgcaggcgatga

SEQ ID NO: 353396 - DNA, 282 bp, Pseudomonas aeruginosa
atgactgaccgacgcgcccactacccgccgtgccacccggcgatgctggcactcgccgccctggtcgcggcgatccagcacaggtgcgacccgttccccgagcttgaagccgccgcagcccgcaacggcgtggccgtcggctccgagcagttcgacgaggcagcggcgctggccgggcagccctactgccgcgcgctggacctgtacgtggaccgcgagaccaagcgccgggcggacgccctggggtcggggatggcgcacctggccttcctcccggcctga

SEQ ID NO: 353397 - DNA, 726 bp, Pseudomonas aeruginosa
atgaagatcaccctcagcgacacccccctcctcagcacccagcagatcggcgagctcgcctcgaccctggacctgctgcacaagcgcaccctcgccgcgatcgagcggctgaacaaggacatcgcgacccgcaagcagcagatcgccgcgcgctggaagagcgcccccggcatcggcggggctgacgtcgcccgctttgccgagcacgagaccatcgccaccgtccgcgagatcaaggacaactccaaggccgagctggacaagatcctcaaggacgcgggcgccccgcacgcccagctgatcggccagcgccagttctacgactccccggcgaaggtcctggcccgcgccgcgttgggcgatcccaagcgcaccgagtacctccagcagcttcagcacgccggcccggcagaactggcccacatggcccaggtcgccgtcggcacacgcaacgtcgccttggcgtcagccgtgctgtccctcatcgaccgcatgccctccaaggaccgtccggtcggcccggtggagctggcgtcggcgatgaagcaggacgacttcctcaaggtgcaggagtacatcaagctgggcgacgcgcgcctccagggcatcctggtcgccatccgggcctggaactcgggcaagtcgaacccgctcagctcggtccagctcgccatgcgcgagcaggagatcgaccacgacctgatcgggggcgacggcgatgactga

SEQ ID NO: 353398 - DNA, 429 bp, Pseudomonas aeruginosa
atggcagtgtcaaccgcgggcactaacggtcacgcggtcgccgtcgaggtggacggggtgcgatacccctccgccaggtcggcagcggcagccgtggggatcgggtacagcgccgtgacggcgcgctgccacgaccccaggcacccgaactaccgatggctcggcgcaacgccgggcaggcgagagctgaggcccgaggacaggcgcatcgccagggcactcgtcgagccggcccgctggccctgcgacggcggcacccggcgcgccgacgtgctggacctcaacgagagtccgaccaaggtggtgcgccgcatcggctggctccgctgcatgtgctgctcccgcttcaccttctcggacgacgtggtgcgcgtgcgcatgtgcgaggagtgcggcggcctgggcagcgcgccagccaaggacgcctga

SEQ ID NO: 353399 - DNA, 246 bp, Pseudomonas aeruginosa
atgagtgacaagctgagcgtcgccgaggccctggccaaggcggagcagatcgaggtcatgctgggcgcgatcgagggcacggcgcccgaggcggtcgcggcgatgggcgggcgcgacgcccttgcccgtcgcagcgagatgacctgcatcggcccggtgccgcgcctggacgcggacgagtgggagcgcatgtcgcaggagtacgaggggcggcgcgagcatggcagtgtcaaccgcgggcactaa

SEQ ID NO: 353400 - DNA, 519 bp, Pseudomonas aeruginosa
gtgctttccatcccgaacaccttcacgcccgagcggcgcgagctgttcttccaagtgctggaggacacgtgctcgcccaagcaggccgcggcagcggcgggcatcagcaggcagacggccttctaccacaaggccaacgacatcgagttccgcacgcggtgggagaaggccatcgaggtcgctctggacgcgctgctggacgaggcgtacaggcgcgcggcgatcggctacgacgagccggtgatccaccagggacgcctcgccaccaccgcggacccgacgaccggcgaggaaaggccgctcaccgtcaggaagcacagcgacaggctcttggaggtgctgctcaagttccgctacggcgagcagatggcggaccggctgcgcgtcagggtcgaggacacgggcctgtcggccgacgcgctgctggcgatgcccgccgacgagcgcgcccagctcgtggcgctgctctccaagtacaacgcggcgcggccgcacgacgaggaacaggacgatgagtga

SEQ ID NO: 353401 - DNA, 2367 bp, Pseudomonas aeruginosa
atggccgcacaagaaaacgcccgcgtgcaaggcgggcgtaaggttacaactgaccaggagatggagcctgccgaagctcacggggtcaatgatgccgagaggcgttccgccgatacgccatcattcgacgacgccgagttcctggtccgtgccggctacgagctgatccccttgcgggacggcagcaaggcacccagggacaaggactggccgaaccgccggtacgaacccaccgcagtggtcgccgaggcgcgcgcccgaggcgccaacctgggcgtgaggctgcgcacggccgacctggtcgtggacgtggatccacgcaacggcggcgacgcctcgctccgtgcgctggtcgccgactgcggcctggacctgggcgcgtgcccgcacgtcgccactggcggcggcgggcaccactactacctacgcaagccggaggggttcgccacggtagggaggctgccgcagtaccccggcatcgacttcaagaagctgggcgggcaggtcgtcgcccccggctcggttcaccccgacaccgggcgtcgctacgagtccgagttctggatgctaggccccgacgagacgcccggcgccccgcccgcgctgctcgaactgctgcgcgtccgccgggtcgagatgccggccggaacgggcgacgtggaccgctggggcgagatcacgccggagcagctcgccgccgcgctggccaacctgccgcccgacgactacggcgagggcacgcacgacgactggttccagctcatgtgcgcctgccaccacgcgaccgcaggcgcgggccgtgaggagttcatcgcctggagcacgcaggccgctggttacggcgaccacgccgagagcatcggctaccgctgggactcgctcgcgtcccgcaccggccagggcggcaggccgacgacagtgcgccacctgcaccaggtgctcgccaagcacggtgccggggtgccgcacgccgcgccggaggacgacttcgacgcgtacgaggacccgaccgaactcggccggggcgtggacgacgcgacgctgcgtcagccgccgaagcccgaaggcaaggccgctgtcctggaggaaatgaacgcccagcactgcgtcgtcatggaaaacggcaagttccgcgtcttcaccgaggagttcgacccggtgctgggcaggcacttctaccagcgttccaccaaggaggacttccagaacctgtactgcaacagcttcgtggagcaggtcaacgacaggccgacgacgcgtgcgcagttctggctgaagcacccgaagcggcgccagtacaagggcgtcatcttcgacccctcgggcgaccatgcgggatggctcaacctgtggcgcggctgggccgtcgatccggcgccgggcgactggtcattgctggaccagctcatccgcgaggtgctgaccgacggtgacgcacagggctaccgctacgtgctgaactggatggccgcgatgttccagcggccgcaccagcccgcggaggtggcgattgcgttccagggtgcgaagggaacgggcaagggcacgctcggtcgcgtcctccagcacatcgccggggcgcagggcttgcacatcagttcgccggagcacatcacagggcggttcaactcgcacctccagaactgcatctgcctgttcgccgacgaggcgttctgggcgggcgacaagtccggcgaggcgaagctgaaggcgctcgtgacggagccgaccgtcgcctacgagggcaagggccgcgatgccgtgatggggaagaacctgatccacatcgtcatggcctccaactcggactgggtcgtgcccgcgggcctggacggcgagcggcgcttcgctgtgttcaaggtgaatgactcacgcaaggacgaccatgtgttcttccgtgacctgaaccgccagctcgacaatggtgggcgtgccgccttcctgtacgacatgctcgcccgcgacattgagggatggcacccgcgcaacgacatccctcagaacagcgcgctcgctgaccagaagttgcgcggcatggacgtcgagttctcatggtggcactcgctgctctacacgggcgagctgccggggtacgacgagggcagggactggcaggacgggcctgtcgaactcgacaaggccgacctgtacgacagctatctggcgttcgcacgcaaccgcaccaagcacccgaggccgctgcctggcctggcgaaggtgttgctcgcaaaggtcgacgtcagtgcgcggcagatcaggagtggcgctcgcaagggcaagtgggtgtacgtcgtccctgcgctcgaccaggcgcgcgctgcattcgccgagatcgtgggcgcgaatccagaagagctctgggtctga

SEQ ID NO: 353402 - DNA, 303 bp, Pseudomonas aeruginosa
atggcctacgaaccgaagaagttctcccctgctgagctcgccgagctccacgcactccccgacgacgcgctcgttaccgcccaggaggcatcggccttcctgcgcctcacctacggaacgcttgcctggtacaggtgccagggcggtggccccaagttcacccgcgtcgggccgaagctgatccgctacagcctgggcgacctgcgcgagtacgcgaagggccaaccgatgggcgagggcatgaggcgctgcgcgcaggcggcgctcgccgctcgcggcctgtccccgaagaaggagggctga

SEQ ID NO: 353403 - DNA, 474 bp, Pseudomonas aeruginosa
atgggacttcctaggacgttcgtcggcttcagcagcacggatattcgctactacaggctcatgcaggcatggaaagctaatgagcacatcgacttcaacttcactgattgccagttggaaaccgagatcaactcggagaacgaagcgtatatcaagagcaagtgtcgagagcggatcaacatggctggcaccttcgctgtcttgatcggccaggacacccggagcaagcacaaatacgtgcggtgggagatggaagttgcccttgagaagaagtgtcgcatcatcggcataaacctcgacggctctcgtcgtgtcgttgacgcgacatgcccgcccatcattcggaacataggtgcgatctttgtgccgttctctccgaagatcgttgcccacgcattgcagaactgggtgatgcaacccaacgacgattggcactacaaagacgagatctacaggcagctcggctatcagtga

SEQ ID NO: 353404 - DNA, 864 bp, Pseudomonas aeruginosa
gtgcaagagcaggatttccccgccctctaccgatcagcagatgagctatccctagcatctcagcgccatttcttccgggcactgagggtgcacctgataacgctggtagttgcagcggtcttgtcgatcgtcagcattccgcactggtccgtagcagcactccagcttctcgcgctgcttggcgccctcggttgctcgatctacttgttcgccatgcgcccggatcgattctggtatgcgggccgggcagtggccgagtccatcaagaccatcacgtggcggtacgtctgccgggctgagcctttccaaggcgacgacgtgaccgcccgcagcgatttccgccagactctcaagcagatcgtcgagcagaacaaggaagtctgccagtcgttgaccgaacacctggacgaggcgcagttcaccccggtgatggagcagatgcgtgctcagtcactggaagagcgccgggcgacctacgcggactgccgaatcaaggaccagctcacttggtatgcgaagaaggcggccttcaatcgacgcatgtcccgctacttcttctgggcgctgatcgccgtgaacgccatcgccgttgtctgtgcggtgttgcgcatggcctacgtggcgctaccgttctggcccacggacgtgttcgtggcgatggcggccagcgtcttgagctggatgcaggccaaaaggttctctgagctcgctgcctcctatgcgctcgcggcgcacgagatcggcctaatcaaggagcagtctctgctccctgatacggatgagaagttctcgctgttcgtcggtgacgccgagaatgctttctcgcgggagcatacccagtgggtggcgcgaaaggacgtctag

SEQ ID NO: 353405 - DNA, 462 bp, Pseudomonas aeruginosa
atgaagcggataggggttcttctggtcgtcctggtggctctggcctggatcgggtcgaagctggtgccgcgcagcgagcccgctgtcgccgccgcgcccgcagcggtggccgaggggccgcgcaagcaggcccagcagccagaggcgccgaagcccgagccggagcgccccatgacggccgcggagaagaaggcgcagcaggagaagtggttcggcgccgagactatcgtcgcggcggagcgcgccgttaggcgcgagctgaaggacccggacgccgcgcagttccgggacgtgcgcgccaactacaccgaggagttcggcgtggtcgcctgcggccgggtcaacgccaagaacgagttcggcggatacacgggattccggcgcttcgtgtcgggcggcaagagcgtcatcctagaggggcgggataacgtcgccgacgcatgggtcggggcgtgcttgtag

SEQ ID NO: 353406 - DNA, 288 bp, Pseudomonas aeruginosa
atggcccaatcgacccacaaccccgattaccagctactgctgaccgtcctgaaggcggcccgcaagcgggcgggcgtgtcgcaggtcgatctggccgagcggcttgggaacacgcagaccttcgtgtccaagtgcgagcgtggggagcggcgcatcgacgccgtggagctggtcgagttcgccgaggcgctcggcgtcccgccgctcggcctgctgggcgagtacctggagcagcgcgcggccagactccagccgaagtccagaaagagcagcgcgaaggggcgctga

SEQ ID NO: 353407 - DNA, 1341 bp, Pseudomonas aeruginosa
atggctacgattaccgacaagcaaatgaatgcaaagccagataagccgacctggctaatcgaagatgcgccgcgtggttgcggtcgcttcatggcaaggctccgaccgagtggggaacgccatttttactttcgctacacgagctcaagcagtgaacgcatttttcttccgctcggggtgtatgacccagctggagtcgatggattaacactaaaggaagcccgggcgaaggcaggcgagctttcgcgcctctatcagggtggaaatcgcgatctgcgggaatacattcaggccgaagaagatgatcgaaaagcggcccgtgaagcagagcaagcccgcgttgcggccgagaaagcggcttccgaagaagcacgggctcgacaagccgctagaaagaccgtccaagacctatttgatcactgggccaaggttgacttgatcaatcgtaaagacggcggagacgaagtgcgccgcatgttcaataaggacgtcttgccactcttaggcagcatacctatcgatgaggtaaagaaaggccatatcaccgaagtgacagacgctttgcttgcccgtggcgtcaaccggatggccaagatgatcttcagccttatgcggcaaatgttccgattcgccgtggacagagacttaatcgatcacgatccaaccgctagcatccgcaaagcgaagatcggtggcaaggacgttgaacgagacagggtgctgagcgacgaagaaattcgtgctttagcgaagcaagcaccagcagccggtttgctcccctcgacagaggcagcaatctggatcgcgctctccacatgttgccgtattggggagctaacaaatgctcgctgggagaacatcgacctcaatacgggtgtttggcttattcctgcacaagacagcaagaacggcaaggctcacagtgtcaccctctctgaatttgcgattcagcagttcgagaaagtcaaagtatttagcggcaaaagtcaatggtgctaccccaacacaaaaaacactggccctgtttgctcgaagaccgtgaccaaacagcttggcgacaggcaacgccaaccagatcagcaagttatgagcaaccgaagtgccagcgctcaagcgttaattctaaaagggggcaaatggactccacacgatctaaggcgaacaggtgcaaccttgatgactgcgctgggcgttattcctgaggtagcagagcgctgtctaaaccatactgaagaaaataaggtgaagcgtacttaccaacgtcacagctatacaaaagaaatggctagcgcctgggacgtccttggcaagcacttatcggaactctgcagaaaacgatga

SEQ ID NO: 353408 - DNA, 1038 bp, Pseudomonas aeruginosa
atggaaaataacgatagcaaactagtgccagtcaccgacatccgtaagaaatataagctttcagggcttgacctcaaagaaaagcttatagaactaaaattagaccttctagttcgccgccctgcaaatgttgatatttacgcatcaggctcagtaatcgctcctagcgaaaataaacccaaaacatttaaagactatcacaagaagcaccaagggactccatttagcgacgaacatgatttttacaccaagctgagagagaacgttagctttataaccatctcaccagcagaatggtttgagatgatcaatcttggcaaagcattggtgaatagagtccagtcaatctactttcaatccaccgatggactgcttacaaagaaaacagcccaacagataattaaaaatactccatcaccgcctgcttcgttcgtgatcgactcaggcatattcttctcatcacggtcaggcccgttatcagcaatggatattctcctagccgaaaacgacatttatatcaaatcgcttgacgcagacaagttactaaaagaccatctagcaggtagctccagaagcaactcaaactcaaccccaaaagattattggatgtcggaaaaacttgcggatctaaacttagcatcagaattatttatttcaacaatagccccggaaaccaccacagataacatactcaaaaccgttgaagactggctaagagcaagatgggacactactagcgaacgcctaatagaacaagccgcgctagctataattccagatgggccttatgaatcagtctcaaaaaagccaaacaacgcaactggtggcgtttatcgatcaaggaaattaactattattaacgaggttgcgaaagccatcgaagataaatttttggaaaccggcggaaagcgggaaaaagcaacaacaatacaacttgaacttataaataaacaccactttacaacaaatcttgccatcgcagcctccaccataatcaatttaaaaaaacgaaaaaacaaaaaaattaacactcgttaa

SEQ ID NO: 353409 - DNA, 966 bp, Pseudomonas aeruginosa
atgatgagatgcttggagatgagtgaagaggttgagcttttctcatgctccaatgttcggaatgatgtgagagtaaaagctacaaggctagggagggattttatatcgaacctacttcagggagtgtcaaaatttgattatcattttccagttcatgagatgaatccttacgttgaggttttttacaagtgtattaataagttggaaggctcgaacatgctgaatggttgggctgatttaataaatgaagatgctttgagttttatagttcagatgaatggtattgtttgttttgctcgttgtgaattgtctagcaaggctttcaaaaaaataagcaaaaggtttgtgaaggcttctaagaagagatctaagagccttgaggaatatatagatgctctttttgttgagcactctaggatgcttgtggtaagaatcgacctttcttatcgttctggcttctttaataagggggacgggtttgatgataaattaaaattggttaggtctcattgggctggtatgcaaagggatctacataagggaaagccggttgatggtctgcttgggttcgcttgtaagcttgagtatgggcagttgaaaggatttcatctccatcttttactcttttataacggctcagttcgtcgtcaagatggagtgctggctaggatggtgggggagcactggagagactcaattactaatggggcaggggcgtatttcaactgtaatgccgtaaaagcaaagtatcggcatttgggaataggtatgattaacttcgatcaagtagaatacattgatgctttaaaaaggcgggtggcatcatatcttactaaggttgattactgggttcgcttatctccgcgaaagggaagagctttctttagaggtaatatgcccaaaaaaactgcggtgaagagagggcggcctagaaagctctgtaaattagttgcttctgaggtttaa

SEQ ID NO: 353410 - DNA, 1500 bp, Pseudomonas aeruginosa
gtgttttctaaaaaagaaatatggaatcaagagtgcgttgaggtcgctgataacgggcgaactgcgcttgcctctcttccattgctgagtgctgcgataaatgaagctgagataaatatacaggcgccgagagggttagttataaactctgcattaacggccatctcaatagctttgcaggggcttattgatgctagtaaacctaacgctcagagggtgcctgtatctctcatgctactcgctatagcaaattctggagaaagaaaatcgactgctgaaagtgtttttctgaagcctattagggagtttcagtcaaggcaggcgagagttttttctgagaagctactggtttggaatgcgaagcatgactcttgggtggttaggcgtaaggcagttctaaaaaacattgagaaaaaaatgtcgaaaggattatcgacaaaagaagatgaaacggtgttgttacaagtagatcgtgagtgtccagtgaggcctaaagaatttaaaattctttatgaggattcaacgtctgaagctttgttttatggcatgtacaagaatttaccaacggcagggttggtttcgagcgagggaggaggcgtattaggaggtcgagcttttaatgatctttctaagcaaaattcaatttggagtggagatgcaattacggtcgatcggaaaacatctgaaagttttgagcttgtaggaggtaggctaaccgtttcaatgatggtgcagaaaagtgctttttcagaatacatgaataataaaggcgagcagtctagagggtcaggtttgttggcgcgcttcttaatttgccatcctaaatctaggcaaggaaataggtttattgatggcgcaacacagtcatgggagtgtttagatagatttaatgcccgtattgaatatttactggatagaaatcttaaaaaattttcagataagagcatggagaaggagctgattcattttgattgtgaggcttctcgatattggataaatattgcaaatgaaattgaatcaaagatttgcccaagaggaatcttagatggattgggggatcacggatcaaagcttgcggatgtgatttgtcgattggcagcgctgtttcactgtttcgaagggtttgcgggagatatatcgataactacgctgcgagcagctgagggggttgctaagtggtattcagataattttattaaattattcggccgtgcatccaaagaggaggaggaggcgcgagagttgaatgagtggctagacgcgcttcgaatgaccgggaggcggttagttaaaaagaattacatcaggcagtatggcccgggcaaatttaggaggaaagatgttcttgacaggctgcttttatatctctcgacaattggagttgtccaatactgctcctacgttggtgataaaacaatttatctagatatttgtccagggcagagcgcgatgccgcttattccgctctacgcaaattccactaacttatcttcgatctag

SEQ ID NO: 353411 - DNA, 498 bp, Pseudomonas aeruginosa
atgagactgcacaaaatcaaggccggcgagaccgctggcacctacctgatcgaatcaccggtcaccgaagctgacatcttgctgatggccaaacagctagccagcctgcgcctacgccgaggacggcaactgaccgcgccacgggacgtattcagccaccttcagacgctactggaggcttatgaatacgaggtcttcgctctgctgatgctggactgcaagcaccgggtcattgcctttcacgaactgttcaggggcagcctggacggtgcaagtgtctaccctagggaagtcgtcaagatagctctggagcacaacgctgctgccatgatcctggtgcacaaccacccctccggcgatccagaaccgagccaggcggatcgcacactaaccaacaaactaaaggatgcgctggatctggtcggcgtgcgcacactggatcacatcatcgtgggccatgaaggctgtgtgtcgctagcggaacagggctatctgtag

SEQ ID NO: 353412 - DNA, 1998 bp, Pseudomonas aeruginosa
atgacctctgatgatcgccgtcgtgctatcggcaaggtcgtatctgttgcggccgaccgattggtcgtagagctgcatggtggtactgccaactttacagttgtcgggtttgacgatattcactatgtagctcgactgggttcttttgttgtaatgccggcacaggccgagtatgtggtggccgaggtcgtcggactcagggagaaagattcgcccagttcgcgaagctccgtgatagatcccgtcgagatggacaaagcttcatctgcaaaataccttgatctggtacccgttgggatgttgccgcagcagcgcgacggctcgttccggttcggtgtatcgacgtttccatcattgtatgccgatgcgctgtatgtgcttgacgaggagcttgatagaattttcgaggtccagagcgcacgggaggttattaccgcgccattgggcgacggaatggcgacgcggtacaacgcactatcgattggcacatcagccgtcttcaaagactatgacgtcaagatccgcattgatgaatttttcggtggacattcagcggtacttggcaacaccggaagcgggaagtcctgcaccgtggcgacggtgctccagtcgctatttgagaaaaaggatgaatacttcgcgagaggtgccgccttcctgctgctcgacgtcaatggcgagtatcgatcagccttctgcgaattgcccggccatattaaacgtcattatttaaagcttgaaacaaatccgctgactaaatcaaaggagccgctcgattcctccgaaacaacagctgtgtttcgacttccgcattggttcatgtcggtcgaagagtgggagctgctgttgcgggcgagtgagcggacccagcagcctgtgcttcgaactgcgttgggcctctcaaccttgtttgcaggtcacagcagcgcagagttggacgagttgcgtaatcacatactcgcatcgtgtctactttatgtcatgcaaagtgatgcagggacgccgtcgaagaaagaccggatcatagcgctattatcgaccttttataccgacggcctgaacatcgacggagtacgcacgaagatcgaggtgaagtatggcgagatggcggatgcgaagggcttcagtgagttactgacgagcttcgtgaaaaacgaagtgacgttgccgaactatgcgaatcgtcaatttgcattcgacgatctggaaaaggcactcgacctagctttgctgtacgaggaggcccatgggaatcgtcagatccgcgattactgttcgcaaatgatcactcgcttcaagtggattcgcgagcgggaagagttcgctttcctacgggttcatccagaccaattacaggcagatgaacgtgatgtctctcagttcgtggagcgatgtatcgggctgtctagaggcgccgggaagttgaaaaagtcggcccaagttatcatcttggatatgaacgaggctcccgacgaggtggtcgaggtggcttcggcagttatcgcgcggctgatattcgaccgcttgcgcaaagcggagccgagaaaccggatgccggtcaatttggtactggaggaagcgcaccgctatgtggctgagaggccgtccggctacgcgattgatgcgagccgcatcttccagagaattgctaaggagggccgcaaatacggacttttcctactggtcgcgtcgcagcggcccagcgaactttcaaaaacggtgctttctcagtgctccaacttcgtggtgcaccgcatccaaaaccccgatgatctgcagcacattcgccagatgacacccttcgtttcagacagcgtgatgaaacggctgccgtccctacctaagcagcatgccttgatcttcggaaatgccgtcaacctgccgacaacattcaaggtccgggatgtgaggcctaagccaatgagcgacgacgctgcgatccgggagctttggttccgcccggatggaactgccatcgatatgccgtttcctgactga

SEQ ID NO: 353413 - DNA, 1098 bp, Pseudomonas aeruginosa
atggctccgttggccactgagtttctaggcaccgcacccggcactgacgatgcacagtttccgagtgaggcggagcgagatgcattgtccgtgcatcttggcttcgatctggaagccgaggaattcgagaacaatcttgagcgtctaatggaagtgctgtatggcttccaattcgtgctcaaacgaagctccaatcaagaacttgtcaaaggggctgaagccattgattcgcttattgggaaggtgacgaccttcgtgacaaaaagatgctctgaggggctcttcgagaacggggacacgcacgttgtcaatctctatcaagccttctaccgaaaactcgcttatcgtgatcgaacgcttcctcgaccttgggtctttaccaccaattacgacttgttcagcgaaactgccatggatcgtttggggatgccttactgcaatggcttctcgggaactatagaaagacggttcaaccccaccacataccgctatgcgcttgctgaacagcttgacttgacgaatcgtaaatgggctgcagtcgacagcttcatttacttgtgcaagctccacgggtccatcaactgggttgaagagggcggaagtttgtttccgatacgggaggtgagccccgcgaccgcagtgaaggccgaccgtgtgatgatctacccaacaccgatgaagcagaacgcgagcttcggttcaccttactccgatctgttccgtgagtttcaagcgcggatcgtcagagagcaaagcgttcttttcacgcttggttacagcttcggtgatgagcatgttaataacattatcttccaggcactcactgttccgaccttccgactagtcgcctttttgccgcctaacgccacgggcatcccagagaagctaagggccctaaacgatcctcgcatttggctgataggaggggacggacctgctgcgggatcaaaagctcattatttcgatacttttgtcgaaaaattcatgcctgaatcccctggaaacaaggtggacaccgctgttcagaaggtgcttcaggaattgatcgcacagggtaagaaagccaacttttccgaagagtctgaccatgacctctga

SEQ ID NO: 353414 - DNA, 3060 bp, Pseudomonas aeruginosa
atgaaactgaaatttaaacagcagccgtaccaaacccatgccgtcgacgcgtttgccgactgttttgctggccagccaaaagcctcgggcgtgagctatcgcattgaccccggcccaaacccggtaaaacccgtcacgccgcagcaggccgatctctatggcatgccgggtgctgttgagccaactgaggctggcttcaagaatgccgatctggcacttagcccagcccagctgcttgagaatattcaggcagtacagcgccggcagaatctgccgcaatcgactgcgcttgtgagcgacaagcaaaccggctgcccgatcaacctcgatatcgagatggaaacggggaccggaaagacctattgctacatcaagagcatgttcgagctgaacaagcgctatggctggagcaaattcatcgtcgtggtgccgagcatcgccatccgtgagggcgtgtacaagtccctgcagattactgccgagcacttcctggaaagctacggcaagaaggcacgcttcttcatctacaactccaagcagctgcacaacctggaaagcttttcctcggacgcgggcatcaacgtcatggtcatcaacgtccaggcgtttgctgcccgtggcgcggatcagcggcgaatttacgaagaactggatgactttcagtcgcgccggccaatcgacgtcatcaaagctaaccggccgattttgtttctcgatgagccgcagaagatggaaggagccaagacgctggcttccttcagcgagttcaatccgctgatgatcgtgcgttactcggccacccacaaaaccgagtacaacaaaatccaccgcctcgatgcgctggatgcttacaaccagaagctggtgaagaagatcaacgtgcgcgggatcacgatcaagaatctgaccggcaccaacgcgtacttgtttctgcaggacatcgaggtctccaccaacaagccacccatggcgcgggtggagtttgaggttaagcagaacagcggcatcaagcgtgtgctgcgcaagcttggccgtaacgacaatttgtatgacctgtccggtgggctggatcagtacaagggctatgtcgttgccgacatcgacgcgcgcatcgataccctgagcttcaccaatggcgtagagctggtcgctggcgatgccgtgggcaatgtggatgaggccgccatgcggcgcattcagatccgcgaggcggtaaaggcgcacttccagaaagagatgatgctgttcaatcgcggcatcaaggtgctgtcgctgttctttatcgacgaggtggccaagtaccgccagtacgacgaaaccggcgaagtgccgggggagtacgcgaagatcttcgaggaggaatacaacgcctacctcaccgaggtgatgacgctggaagacacgccctataaccgctacctcaaaggcattcaggcgcgacagacacacaatggctacttctccatcgataagaaaagcaagcgcctggtcgatccctcggtgggcaaaaaggctaccgagaccgatgacgtcgatgcctacgacctgattctcaaggacaaggaacgcctgctatcgttcgatgaaccggtgcgtttcatcttctcgcactcagcattgcgcgaaggctgggacaacccaaacgtgttcgtcatctgtgccctgaaacacagcgataacgctgtctcacgtcgccaggaagtagggcgcggcatgcgcttgtccgtgaaccagctgggtgagcgtatggataacccggccacggtacacgagatcaacgaactgaccgtggtggccagcgaaagctacaaggatttcgtcagcgcgctgcagaaagacatcactaattcgctttcagcccggccacgtgtggctgacgagaaatacttcaccggtaaggttctgcagagctccggtggcgatgtcgaggtcacaccgcaactggctaagcagatctataaatacctgctgaagaacgactacaccgacgataacgatcagatcactcaggcctaccatgaggccaagcgtgaagagcaattggccgagctgccagccgagctgcagccttatgccgagcaggtgttccagctgatcgatagcgtgttcagcgccgcgcaaatgccggagatcggcaacgaccgcaaagccaagctcaacccgctgaactcgaactttgagaagaaagagttccaggcgctgtggaacaagatcaaccgtaaagcggcgtacaccgttcacttcgaaaccgatgagttgctggacaagtgcgtggctgcgttggatgccgagctgcgggtcaagccgatgcagtacatcatcgagcgcggcacccagctggagaatgccagcttcgatgatatgaaaagcggtacagccttcaagatcgctgaaagctcgaccgagaagtacacgcactcggttcattcggccgtgaaatacgatctgatcggtaacctggcggaagctacgcagctgacgcgcagcaccattgccagcatcctcaggcgcttgaatgtggccgtgttcagtcagtacaagaccaacccggaagacttcatcgccagggctggtaccttgatcaacgagcagaaggccacggccatcgttgagcacatcgcttacgatcctgtggacgacacccacagctccgacatcttcaccgccgagaaaccgcgtgacgatttcagcaaggcgttcgaagccaagcaccacgtttacgactacgtgttcacggactccaacatcgagcgcaaattcgttgaggaattggatgccagcaccgaggtggcggtttacgccaagttaccgaagagcttcttcatcccgaccccggtcggcaactacaaccccgactgggcgattgccttccaggaaggcaaggtgaagcacgtttacttcgtcgccgaaaccaagggctcgatgtcgtctcttgagctgcgcgacatcgaaaagtccaagatagcctgtgcacgaaaattcttcgccaagatcacctcggatcaggtgaagtaccaggtggtggatgggtatggagctctgatggatctggtgaggtag

SEQ ID NO: 353415 - DNA, 870 bp, Pseudomonas aeruginosa
atggacaatcaagcactgactcaattgcagcagcgtctggatgcgctggtgcagcgcgtgccggatgaaaatatcgaattctggttcgctcgtgatctgctggagccgttgggttatgcccgctgggagaattttcttactgccatccagcgtgccatggcctcttgtgaggcaacggggcaagacgtaccagaccattttcgtggcgtcacgaaaatggtcaccctgggcagtggagccaagcgtgaaatcgatgattttatgctcacccgttatgcctgctacctgatcgcgcagaacggcgacccgcgtaagcagcccatcgccttcgcccagagctactttgccctgcagacccgcaagcaggagctggttgaagaccggatgcgtctgcaggccaggttcgaggcgcgtgatcgtctgcgcgagtcggaaaaagagctgtcgcagaacatctatgaacgcggcgtagatgacgaaggttttgcccgcattcgttcgcgaggcgacaccgctttgttcggcggcaagagcactcaggccatgaaggatcggtacggcatcgtcaaggctcgcccgctagccgattttctgcccacgctgaccatcgccgccaagaacctggccaccgagatgaccaatcacaacgtgctgcaggctgatttgcagggcgagtcggcgatcagcaaagagcatgtgcagaacaacctcagcgtgcgcggcatgcttgaccagcgcggtatcaaacccgaagagctgccagctgaagaagacattcgcaagctggagcgccgcgtgaagtcggaagaaaagaaaatcgcccagcaggcacccaaactgcctgtggacgatgcgagtacagaagcatga

SEQ ID NO: 353416 - DNA, 1965 bp, Pseudomonas aeruginosa
atggacaagctgaaaatgcactctcccaacctgacagatgccaatatcgccaagctagccgaactgttccccaattgcatcaccgaagcgcgggatgccaaaggcgagctgacaaaggccatcgacttcgatttgcttcgtcaggaactgtcctcttctatcgttgaagggccacaggagcgctaccacttgaactggcctggcaagcgcgatgccttactagcggccaacgcgccgattgcgaagacactgcgtccttgccgcgaggagagcgtggacttcgacatcacaaagaacctatttattgaaggcaataacctcgatgcgctgaagctcctacaggaaacctatcttggtaaggtcaagatgatctacatcgacccgccgtacaacacgggtaacgatttcatctatgaggacgactttgcggaggatgcaggcgaatatttacgtcgctcaaatcaagtggatgataagggaaatcggttggtttcgaatgcggcttcgaatggccgctttcattccgactggctctcgatgatctactcacgccttcgtctcgccagagggctgctcaaggatgatggcgcaatctttatctcaattaatgacgcggagttcgaaaacctaaaaagtgtagctaatgaaattttcggagaagagaattttgttggcacgatggtttgggctgccggaagaaagaatgactcgcgctttatttcggcgtcacacgaatacattatttgctttgcgcgcagcatggatgctcttaaagagcgtggagcatcttggcaggttttgaaaaaaggtctcactgaaattgagaaaacctattcggatctgcgtcgccaatttggtgacgatgatgctgctgtcgaaactggcttgcggaaatggtacagcagtctctctgatagcgacccaagtaagcggcataagcactatcaatacgttgacaagcgaggcatctattttgcaagcgatctccgtaagccgcagcctacatcgcgttcgcgctatgacattttgcatccagtaactggaaagccggttaacatgcatcctaatggatggtcatttgccccggagcgcatgaatgagttgcttgcagatgaccgtattcgatttggtgtggacgaaaagactcgcccaacattgaaaatatatctccaagaggcaaataaagaggccgcctacagtgttttctatcaagacggacgtggtgcgtcaattcgacttgatgccttgatggaggcgcacgtttttgattttccgaaggacgaaactatcatccaaacgctagtggaaatgacaactgcaggaaatgatttggtgatggacttctttgctggatcagcaactacagcacatgcaactattgccgcaaatatcgttgatggttcatctcggcagttcattatgattcaactgccagaagaggttagtgagaagtcagaggcgttcaaggcgggctacaaaaacatcgctgaggttagcaaagaacgtattcgtcgcgtaggtaggaaagtcgccgcagatcttgccgttgccaacgtggacaccggcttccgcgttctcagaatcgacacatctaacatggccgacgtttactacgcgcccgatgttttagacaaggccaatcttgagctcttcgtagataacatcaaacctgatcgcacaccagaagacttgttgtttcaggtgatgctggactggggcgtggatttgtctcttccgatcagccaacaaagcatcgctggcaaaaccgttttcttcgtcgacggtaacgccttggccgcttgctttgacgccggcatcgatgaggatttcgttaagcaactcgctgctcacaagccgctgcgcgtggtgttccgtgacgccggctttgccagcgacagtgtgaagatcaacgtcgagcaggtgttcaagctgctgtcgccggctactgaaatcaagaccctttaa

SEQ ID NO: 353417 - DNA, 681 bp, Pseudomonas aeruginosa
atgagttcgggtgatcatgtgcctgcgctgtttaactttcctgtgcaggcccgtgttgctcgcgtagtgcccaaaagcaaaatctacgagcacggcccggtgaattcggcgttgcgcgataagtttgtcggccaggtggagcagataacctgggcctacaagctggcaccggaaaccattaacctgccggcccgcggcggggtggcggaaatccaggtgttcgacatcacgcttaaagccgccgagctggacgaggacgtgttgcgcgctatcgaccgcgccatcccgttgccgatcatctttcagttgcaccacgagcagcgcacccgcatggtggcggcttttaagcgtcccagcgaagccgatgccagcaagtgggtgattgatggctactttgcaggcggctggttgccaaccgacggcccgcgtcaggctctgccggtagcactggatctgcaggggctctacgaacaactgctgcgcagcttgctgcctagtccggctaggccgggcgagagcctggccgagcaactgcagcgactaaaccgtttgcgtagcctccacagtgagcgcgctaagctggatgcgcgcctgcacaaagaaaaacagttcaaccgcaaggtggcgctcaacgcccagctgcgggaaatccagaatgaaatcgccgacctgagcgcctaa

SEQ ID NO: 353418 - DNA, 3291 bp, Pseudomonas aeruginosa
atggaactgatcgacaacatcaacaccctgcttggtgaaaacctcaaaggtacgctcaagccgggctcgaagctgaagatcgccgcttcgtgcttttcgatctacgcctacgtggcgttgaagaaggagctcgagagtatcgactccctggagttcatcttcacctcgccgaccttcgtgcccaacgaggtcagtgaccggatcaagaaggaacagcgcgagttccatatccccaaggctcagcgcgagcgcagcctgaccgggagtgagtttgaaatccagctgaagaatcagctcactcaaaaggccatcgccagggagtgcgctgactggatacgccgtaaggccagcttccggtccaaccgtggtcaggctccgatgcagccctttatcggtacgcgtgggacggcgggcgatgccgtctttatgcccgttcaaggctttaccgctgttgacctgggctaccagaaaggcaacgcgctctcgaacatcgttactcgtttcgatgagccggcccataccggcatgttccttaatctgttcgagcagatctggagcgacccggagaagcttgaagatgtgaccgccaggctctgcgaccacattgcctcggtctatcgggagaacgccccggagcggatctacttcctgatgctctacaacatcttccgtgagttcctggaggacttgagtgaggacgtgctgcccaacgaccgcaccggctaccaggacagccttatctggcagaagctgttcaacttccagcgagacgctgcaaccggcctgatcaacaagcttgagacctacaacggctgcatcctggcagacagcgtgggcctgggcaaaaccttcaccgcgttggcggtcatcaaatactacgagctgcgcaacaaatccgtcctggtgctctgcccgaagaagctcgccgacaactggctgaactacaaccgcaacctcaagaccaacattttcgccaaggatcgcttcaactacgacgtgctctgtcacaccgacctgagccgcacccgtggcgagtcgctgggcatcccgctggatcgggtcaactggggtaactacgacctggtggtgatcgacgagtcacacaacttccgcaacaacgacgtctacaaagacaaggaaacccgctaccagcggctgatgaatcaggtgattcgtcagggcgtgaagaccaaggtgttgatgctttccgccaccccggtcaacaaccgcttcagcgatttgcgtaaccaactggcattggcctacgagggcgacagcgacaacctcaacgacaagctgcgcactgaaaaagacatcgacggcatatttcgccgcgctcaggcggcattcaatgcgtggtcggtcttgccgccagaaaaacgtaccgctgcagcaatcctcaataccctggacttcgatttcttcgagctgctcgacagcgtgactattgcccgctcgcggcggcatatcgagaccttctacgacaccgcagacatcggcagctttccggagcgccgtaagccgctgtcctttcactgcccgctgacccatcgtgatgatgtcatcggctttaacgagatcttcaaccagctctcgttgctcaaactcgcggtgtatgcaccggttagctacatcctgcccagccggatgaagaagtacgaggaaatgtacgacaccgaagtggagggcggcagaggcaagctcaagcaggttgaccgagaaagaagcctgcaggcgctgatgaccaccaacctgctcaagcgcctggaaagttcggtcgaatctttccgtcggacactcaaaaatctgcaggcgactcaccgcagtgcgttagacaaaatcgcgaccttcaagaaaaccggcgtagtcagcggctttgctgacgttactgccgcgtttgaggatgcggacttcgatgatgacaacctgccgatgccgggtgacatcagcatcggcaagaagattcagatcagcctggaagacatggacgtgccgtcctgggagcaagacctgcagggcgacttggtcttcatcgaagagttgctggctgaaatggccaaggtcacgccggctgatgacgccaagctgcagcaccttaaaacccagatcaccagcaaactgacctcgccaattaaccccggcaaccgcaaagtgctgatcttcaccgccttcgccgataccgccaactatctatacgacaacctggccgagcacctactaagcagccataaggtccactcgggcaaggtcacggggagtgatgcccccaagtccaccttgggcaatatgcagggcagccggcagacctatgactttcaggggctgctcacgctgttctccccgcgttccaaagagaaggccgccatctacccggatgagccgcgcgagatcgatatcctgatcggcaccgactgcatctccgaagggcagaacctgcaggattgcgattacctgatcaactacgacatccactggaatccggtgcggatcatccagcgctttggtcgtgtggatcggatcggctcacagaacgccagcatccaactggtcaactactggccggacatcagtctggatgaatacatcaacctcaaggagcgggttgagaaccgcatgatgatcgccgacgtcactgctaccggcgatgacaacgtgctcaatgcccaggccaatgacgtagcctaccgcaaggaacagctacgccgcctgcaagacgacgtgatcgaaatggaagacatcaagaccggcgtctccatcaccgatcttggcctcaacgacttccgcatggatttgctcaactacatcaaaaccaatggcagccttgagcaggttcctaacggcatgcacgccgtcgtgccagcacggcaagagcttggcctgctgcctggagtgattttcaccctgcgtaatcgcaaccagagcacgaggctcaaacaacaaaatcggctgcatcccttctacctgatctacatcagcctggaagggcagatcatcagtgaccagaccgaagccaagcgcctgttggatctagcccgtagcgcctgtaagggccacagccagccgatgcctgaggcctaccagctgttcaatcaagccaccgaagacggacgcaacatgcgcgtctactccgacctgctcgatcaggccattcgctcgatgatcgaagtcaaggaggagaaggacatcgacagtctgttcagtggcggtagtaccacggctctcgttgacaccatctccgggctcgatgacttcgagctaattgcctttatcgttattcagggggtggcatga

SEQ ID NO: 353419 - DNA, 615 bp, Pseudomonas aeruginosa
atgtctgcgttagaggatgaatacgcaagattcatggaatggttgcggcttgccgagccagcagatgatgtcagcaggattgctaaaatcatcaatagtaatcttcaaacgatcgctggcacgagcagcgctggggggcagcgtgccaagcttctttctccgctatggcgcagtggccttagggtcacagatgctgttattccccctgcaaatgaacgggcgagccaggggcctttagcatggacaattctacaaaaactcactgtcgggccttttcgtggattccgtcggcctgaagagtttgatctgcggaagcgtgtagtgcttttttacgggccgaatgggagcgggaaaaccagtctttgtgaagctatcgagctagcccttctcggtgaggtggaagaggcgtcggctaagcgcatcgattcaattgacaactattgcgataacatccatgaggggcggcatgtccggcccgtgcttttggctgctggtggcccgaacggggtgcctgttgttgctaacaaggatctgctgcggttcgctatcattgagaagaatcggattgagggttttgcccggcttgcagctagaagtaccgcacaggctagctga

SEQ ID NO: 353420 - DNA, 2448 bp, Pseudomonas aeruginosa
atgagtaagcactcggctctgctgctcctcgcctcggagcaggggcagtcacctcgaattattggcgaaatcctcaatctgctaggcgctcatcctgagctcattgacctgccacgcgccattgatcagcttctacgagttctccgcgcatgtaatgttggcatgccgattggttttgagaattctgatgtgctcgtgtggcgtgaggcatgcggatggatcgtctccctggcccgtaaaccaaatatccgagaacgtctaggctggcaattttggctagggaataaagggtcggcgaacaatcctgttctacataaaggcgtaaaaacattcggatttccatacgccacgttcctgcacatattcagagaccacgaaaacaaacagaactatgagcgactgcttgcacagttgctcgttgcatctcagaaaaccgctactaatcgcttgctagaccagcgttatgatgtttacaaggccatcggccatctgtgcaaactgcaaatcgtctcaatctcttccgaactaaatattcggggaaccactgaggagttcgtcgcgagctgcagagattttttacctagtaagtcaaaatcagcgaatgccgatagttttgctgctatcgccagatttgttcgttactgcaacggcgagttgccacgcgtgggtggcggcggaggcggtcatagaggcaagcgtaaaaagcagagcttacctgagctgaaccactacatcagtgaggatactcgcggatttgtgctgggggatcccgatgatcctgaccagctaccaggtcattacgacgtcatcgttgggcatgctgatactgctggggaggatctggcgcccggagaaatgagtccagcaaccgagatttgggttttggatgatgatggctgtgaacggccatatgttgccgatctgctaggtcaacaaaatgtcgaggcgcatattgtccgcagccgacagttcctgccattttcatataatcagctcacgctgatggagttgcggaatttattgtttggcgccagcgacctattccattcgtgtctgcaagaactgtcctgcacaaaagactcagctcgaatccagctccgaatggagacaattgttgctctgcatatcagcctatggctgggtcagtcgatgacgcaggtcgtccagttatccgtcgttgatgatgagacagatgacgcggatggtctggcattgatcttaggggattcggcgcagttcagtatggtagttaagcgcccagatttggctggcgacgatcgttggcaggcctcttctggtgtccgactatcgttactgcgagttatattgcccgatctatctggtagtgcccagttggtaaagcaactgatcagggcattccctcactcagacaaccaggtattcacttatcaagctgagcagctggacgcggagatcagggcactgctgcaggaattgggtgggggggatcgacgctatacgcgaaccaaattgcgcagttatttgttccaccagatagtcgctgatactcaggacgtagcagcagcatccatgctgtctggcgttgaaatcccctcggcgcaaaccccgcgctattaccttcagctcgatgccaatcacctcagcaaaatttataccacctcactggtacgagtgctgacgcaggtttatgcctgcgctggtctcgcatatgaatatgtcgacctagattcagaccaacagggtgggttgggagcaactcattgcctgctgcctgcaaccattgcgagcaatgtcagtgcaatggccagggtcttgaggaggaaagcgaacgggcgtctcagcgagatggtcgcttggcacaactgtttcaccctatggacagtgcagatgttcatgttggtcacttcctgtagggcggtccgcaaccctttgatgctcatcgacgagtttgattctgtgttgggcatgggcgcgctgtcagacaaggattctggcgatcgtcatatgagtcggctgatttgtatgccgccgatgttgaggcggcaaataacaagctacttcgcgcattgcgcttctatcagccgacaattgattggttatctgccacaggatgaggaggatcatcagtggtcgcggggatttttcctgcagattagccaggctggagtgcgccgcgctgagattaccccgggcaatatctacgaccagatggggctggtatctggttacaccacgcatcgggtcaatgcccaccggaaattcatccgcacggaactcacggagcggggctgtccttcagaagcgctggctgcgttcatggggcactggctcaggggtgaggagcctcaggacgcctattcgacgttctgccctgcggtatacgccaaggttctagatgagtggattaccccactactcagggagcttggctggtcggccataagcagccagtgggtgacagaatga

SEQ ID NO: 353421 - DNA, 753 bp, Pseudomonas aeruginosa
atggccatcgagaagcacaacatcaagctggccaccttcatcgccgcgctcttctatgacctttccacccagaaacaggtacgcattcccacccagatcgaaaaacgggatcgcgaactgtacgagctggtgaagaagagcaagcgccccgtggccctgttcgttgatgaagcccatgacctcaatggccataccctgaccggtctgaagcgactgctcgaactggtcgaagacgacagtggccggcgacgtttgtccattgttctggccggccatcccaagctgcgtaacgatctacgtcgtcccacgatggaagagattggctaccgcaccgacattttctcgctcgacggcattgccgggagtcagcgtgagtatcttcattggttgttggacacctgcacagaaggacgtgccagggctgaagaaatcgtaaccgaagaagccctcgacctactggccagccggttgcgcacgcccctgcagatccagttacatcttggactggctctggaggccggttaccagaccggcgaaaagcctatttcggcagagctcgtccagtccgtactctctcggcaactggatgacttggaacccacgctcacacgccacggctacaacgcgaaaagcctggcagagcagttcgatgccaaacctgccgaggttcgtgcgttgttcagcaatacgttagatccggcacgagcggctgagcttcgggagaagatgcaatcggccgggcttcccgtgtga

SEQ ID NO: 353422 - DNA, 768 bp, Pseudomonas aeruginosa
atgcgatcctggttccacttcctgcccatctgcctgctgctggccctttccggcccggcagcggccgtcccgacagaacccctggtgctcggcgccgaagacgactggtatccctataccgcctacaaggacggccgcatccagggcatgagcgcggacatcgtgcgggccgccttcagggctgcggacacgccggtccagctcaatccctacccctactcccgctgcatgaagctggccctgaaaggcttgatcgccggctgcttcaatacctcgccgaacccgcacatcctcgccgactaccgtctgccccggcatccgttgttccgcgcggagatccagctctgggcgcgacgcgacgaagcgcggccggtgaatgcggagcaggcgctgagcggacggaaagtcgcggtgaccctcggctatgaatacggcgacggcttcgatcgccgccacgacctggtgcgcatcccggtgcgcaaggactactacggtttcctcatgctccagcgcggccgcgtcgactacgccctggcctaccgcaatacggctcgccagttgttcagcgaacatcccgaactggaaggccagttccagccggtggccacggtccaccgcccggagctgtacctgtcgttctcgcgccgccacccgcaggccgagcatctgctcgaacgcttcgacctcggcatgcagcgcatcctcgccagcggcgagtaccagaagatcctcgacggctggagccaggccgccgacgctacgccctag

SEQ ID NO: 353423 - DNA, 639 bp, Pseudomonas aeruginosa
gtgattcgtcgtggaaaccaggcaatcgctgccgcctacatctcgcaccgggatcgcctgccgatggtgtacgacctctcgatggaacggggtgcaacggttgcaccgggtgcaaatgacgacgtaacggggtgcaaaccacgacgtaacggggtgcaactgacgacacaacggggtgcaacggttgcacccgatccgtcacttaaccaccaaagaaccaccaaagaacctaaagagcatgtccaaaccggcgaaaccggttcggacgacgtgggtgatcggaagggaaaaaccgagtctgggaaacggccggccaagcccaatcctctggatggtttcgaggagttttaccaggcctacccaaagcacaaggatcgagcgaaggcggagaaggcttggcggaagatcgaccctgctctgcaccctgtgatcatggcggcgcttccgaagcactgccgacagcgtgattggctgaaggacaacggccagttcgttccgctgccggccagttggctcaacgggcgacgatgggaagacgagatagcccctgatgctggcccggcatcgagcttcaccaacctccccaaacacacccccgacatgtaccaggaccgcgacgatggcagagcaaatttttaa

SEQ ID NO: 353424 - DNA, 231 bp, Pseudomonas aeruginosa
atgaaacgagcaaccgttgtaaccgaactgccggccagcaccagccgggacatggacaagttcgttgtccgactgccggacggactgagggccgaggtcgaagccgaggccaagcgagacgagcgcagcatgaactccttgatcgtcgttgccctgcgcgagtacctgcatggccagcgccgaaagcatgcgctactcgacgccttgaccgctgccgccggagatcgctga

SEQ ID NO: 353425 - DNA, 192 bp, Pseudomonas aeruginosa; identical to SEQ ID NO: 352385

SEQ ID NO: 353426 - DNA, 672 bp, Pseudomonas aeruginosa
atgtcagaacgcgaaaaaccattgaagtggctacgcgagcacgagggtgagtggcggtgggctgccgaatatctcgtacaagcgctcaagcctgagcacataaagtcgttggagcccaatgcgttcaatcgtcttgagacgtacgaaagtgtggtttccgttatcaagaagctccagagggaacagccggagcttgttttcagactgcaagggaacatacggcagcgccgctatcgctcggacaacaacggcaggaggccgctgacgttcacccttagcaacgagacaatcaccaaactgacatctctcgccaggcgacacaaagttggcgaggcagcgctggtctctgcactcatcgcccaagagggtgaagccgtcgaagcccaaaagaattatgagaagcagctcaaggccgcagtcgcattggaacgcaaaaatggtcagcagcgcgccgcctgcctaacagctcagttggatgaggcgctgaaacacctggagcgatgtctagagcttgttgctcgctgggaactgatgtggccagacgataagccaccgacagccagcgacgatgacatcaagaaactcgttgagcctagaatgaaggagctcaagaacgcgctagcctacatcgccttcagagataccctgacgaccgaacgccccgtgccatga

SEQ ID NO: 353427 - DNA, 1347 bp, Pseudomonas aeruginosa
atgctgtccagaattctcgatgcaaggctaaggctcattgatcatgattcgaagttcgtccttatcgctttctggcgatgctatggggccgccacccctcagcgccgttcggtgaagcagctcgctgaagacctgaggcttccggcgcaagctgtctccaagtcattggctcggctggttgaggtcgaggtgctgacggtatccgcacggccagaaggaaaggggaggcccaaatgcatcttcgaggtaagtgaagctgctcaatctcagctacgggagattaaggagaggcgtttaaggcatccggagttgcttgagcggcttctgagaggcgagcggatcagggcaacttgtgctgattggaaggagggtctcgactcgacgtcagcctccaatcctagctcgagggaagagaaacgaggggcgcctgtgcgcttggggcaactcagcttggcgaatcgtttgttgctcatgatcttggttagccatgcggatccgttcggggttgtcagggggctgagcagtcgagagctctgtttaatggctgggatagatgtcgactgccttaagcaacgcttgcgaagactgactgcgctgggtttcattcgtaggcatattcctgggattgcgagctccgtatttgccaagaagctcaccagcatctatttgctcaatttgaaccacctacagctatctcctttatgtgacgtggtatccaccgctgtgcatcaggcgcttgatgacccgaatcgagactgtaaccacgtgacggctgtttggtgggatcgggaatcctttttgaagcggcgtgaataccacattcctctgagtgtggtgcgccttttcaggaaggcgcccaagcacgcatttgatcagcttgagttctttatctgcgactccgcatcaggcttcctctcgcgccactgggccggtgctgacccggccgtatggagaaaggtgcgtggtgttgattccacggtgaagcagcaggtcgctgagttctttcggcagccgatggttgatccgaaggatgggacggctttggatcatgacgagctcgtcgactttttcaagcgactgatatttcgagtcgcaaacgagtatgccaggcgcttttcagggttgtccgtcgtttcctttactgaggtcaacttcatgctgctgccggttcatgtggcgattggtcacgagcacgtcgctatgttgtttcaggggccacaggattgtgatcaggagcattggcagatcatcagggcgtatgacgatctggagattacgagtgtgtcgagagaggcggatatcgaattgaacgttcgtcagaaggcggggctgcttacaccgccataa

SEQ ID NO: 353428 - DNA, 231 bp, Pseudomonas aeruginosa
atgaggatcatccgtctgaaagaagtcatcgattcgacaggtttagcccggtcgaccatctacaaatacgtcgcggaaggcaccttcccgaagaaggtatcattaggcgaccgttgcgttggctgggtcgagagcgaagtacacgactggatcctggcaaggatcgaggtgcgtgatctgacagagggggctgcgacgcgctctaccggccatctgagtatggtgagttag

SEQ ID NO: 353429 - DNA, 591 bp, Pseudomonas aeruginosa
atgctcaacgatgccgatactatccagcgctacccactccgtcatcccaccaataccaacctccatttgtactacggagatacctttgaaggtttcccgctgatgcgtgacaaagggcctttcattcgtgagtacctttccgatctcaagcgcgtcatcgagttggccttggctgagtatccgagggtattggccttcagggtggatctcaggctacctcaaggtatcgagctgcccgattacgcctatacgaaccaggtcatcagccggttcttcgagtccttcacgaggaagatccagtaccatcaggagagggtggctgagcgttgttactcgcgtggctgcaaagtccggtacgtctggtcgagagagattagtcagggacgcaggccccattaccacgtgctgattatgttgaaccgtgatgcttattacacggtagggcggctgggttcagagagggtgaacatgatcagccgtatggaagagtcctgggctagtgcgttggggttatcagtcgatcaagtgagagggcgggtgcacatcccggagaatgctgaatatcgaattgatcgtaaagtccgtttgtag

SEQ ID NO: 353430 - DNA, 2604 bp, Pseudomonas aeruginosa
atggaatcattgcctcaatcaaaatcggctcggaaagtaattttctcgagcctataccagcacagggatgatgttttgacgacctccatacgcgctttcttatctcatagcagtaaagacaagaatttggtaggcccaatattcaacagcttaactgctgcacacgcacattatgatgaggctactttcgaaaagggcgaaacaagcgcatcggaaatttacaaggcaattaacaatactgaagtatttgttttgtttttgtctagaaactcggtacgctccccctgggtgcagaccgagttagtgctcgctcagcagaaaatatattccggaaaaatcaagaaaatcttggtttttttgcttgattcatttgatcatagcgacattcctgagtggctgctggagtatgtatatcgcaaaacctcaagtccgggcatcataacaaccgcaatccgctcagcgttgtttgatgtggctctggcggaaaatgctaatttatctgtattcatggggcgcgataaagaaattagcgtgcttaaagagtcactttcaagcttgtctgcagattcacctcaagtaatttttctcgctggaaacgacggcattggtagacgaacgctcgccaaacgtgcgcttcaagatgtgcatcctcagcttattagactgccgattgagatagttttacgtgactcggactcggaaatagagttttaccgtgcacttcttagtcaaggtgagcacttaaccattcttcagagcatagataagatagagcaatttacattgctaagctcaactgatcgtacagagcttttggttgaattgattgagaatatttctagtcagagacaaattgtctttttacgaggaaaggagtcactagttcgtgaagatggtagcttctccgagtggattagctctatcctatctgggttggcaccatcgccatggcctaagttagctataattgcacggagaatgattccagctgcgaagagaagaaattatcctaatgtggctttctttccaattaatagtctggatgagagttcgtctaaaaggctgttgtcaatatggttgaaacattatcaggctgacatagatggggcacttgtggatgagatttctgagtatgtaactgggcatcctagaaatattcaaattgctgctgcgcttgctgcggaatatggatccgcaaggctcaaggttcaaagacctgatttcttggaggctatccgtcagcaggccaagtcacttattgagggtattagttttgaccctagccaagaaagtattctagcgctatttagagagtatgagtacttgtctgcggaggatatttttgttgcacttggaacagtggatgaggcgaatttatctagaactctaagctatctttcggatcatggtattctagagagcgaaggcccatatatcagaatggcaccttatctccttgacaccctgtcgaggtataattggtcagatgagactcgtaggtttatagttgaatgccgagatcggcttctggatcgggttaataatatatcaattgatgattacgctagcatatctacaatagatgcgtgggtactatcctctttaaggcaggagaaatctacggataatattattctcgctcgctgcctattgccttcgcacctactgcgcgttagtagggagttttacgatcgtaaagatttttcccgaactattgaacttgcgcagaaagcgttgaatggaagtaataagctttcgtctgaggcgcaggttgagtcgctaagattaattggcctttcaagtgtacgtttagggcaggataagacattacattcttctcttgaaaagcttacagcttatggacatacctctgcgctgaggactgccgctttcataagaggttttaaagcaaggtatgatggaaatatcgatatcgcagagcgcgagtatcggcaggcctttgatctcgatggtaagaaaaattttcatattctccgggagcttgcacaaatactcaagatcaaagaagattatgtcgaggctgaaagattctctcgagcggcgcagaatattgcggggagaaatccatttatcttggatactttgctcgagataattatcgagagaaataaggacgatcaaaaattcctgagggatgataaagagcttcactcgttgttcgaggtcttgagggacgcggcacatcgtgaacagcgcagcttctatgaaagtaggcttgcacattactactcatgtttacatgatcctacagaggcagaaaagtgggcgattgaagctgaaaaaatcacgccatcccacgtgccagttttgctaacccttgcaaaaatccaaattaatagcaacaataccttcgatgccgaaaaaactttaaataaagttcataaaatagtggctggcgctggaaaaaatgctgacaggcgaaatgtggccgaattagataaattgagaatcctactgctgacccaaagtggggacttcagtggtgctagagcggtacttcagcgagctagggctctccctcaaaaaattcaagagtctctattgaagaagattgatatcgcacaagcttaccaaggaaaataa

SEQ ID NO: 353431 - DNA, 210 bp, Pseudomonas aeruginosa
atgaagctactacgaatctttgccaccgtgttcatgttcgccggcatcctcgcgggctgcctggcccttctgctgctggtgcttttgctggtgcgctttccgctcctgctgatcgccatactgctgacgtgctggatcttctgccgtctcatgaagacgttggcacccggaaaagcaacggcagagcccactactgcgccaccgaactaa

SEQ ID NO: 353432 - DNA, 219 bp, Pseudomonas aeruginosa
atgaacagacagtgtctgatctgcgactccagcgccgtgctgacaagggacgcagccaaagggccgcccctactggccgggctgttcaatggcgcccacgcgaggggagcagaggatgtcgtaaggtttcacttcgccggcttcgactgcctatacctacactgcgaagctttgtccgacgagacagctgaacgtacggaggaccttagccccggctga

SEQ ID NO: 353433 - DNA, 276 bp, Pseudomonas aeruginosa
atggagggcatcaagcttgtagagaccaagatagaggccctcggcatgaagtgccgagtcaggacagatgtcaaaggatcattgatccaaggcggagccctaggagcggtcttcagcgtggtatccacaccagccacattggccctggccacattgactgcggcagcaggcgtcggccatacgctcgccacctacgacccagactacgaaatcgtaaaagactacgtaaataagaaactcaaagtggtccataaaaaacggggaaataaaaaataa

SEQ ID NO: 353434 - DNA, 819 bp, Pseudomonas aeruginosa
atgaaaaacaaattatccaaactgaaagcaataagcttattaacattactaaactcgtttaacgctcaagcggatgttgattacgggtatctttatcctacaatgctgcccaacgaaaaatccatgaacgatttaccttatgcaatcccctgcgcagaagccaaaaatcagtatggcgctaaattctaccgttgcacttggtatacgctacctagaaacatcaccatgtggaacgcccaacagcagcgcgacatcactttcagcaatcagataagtggcgcatgtaagcgcggcacatgccgtgcctccaatgggtcaggtgtctatggcatgtatgggcaagacctcagctttacactttccatttactattacatatatgaaagcgaggatggctacccaatagcataccgcatggatggtggtccacataaaaaaggcaaagaagttacctattcgcaagctcgtacgatacttcaggagttcttacttgatcatggcatcagtcccgcgactgtagcagacgccattgcagcataccggcttgatgcgaataccaagctcacctcttctgtcgaagcttcccctctgcttgatgagaagcccatgtcaaagccaccagaacatgtcgaagtaaaagatgcctggtgcaaccctcgtgcagatgacgattgtacggttaatggtagaaaagtcgaaaaagccaagctccaagattatttacctgaagtttacgagcttgaaatactgaacgcaggaggatactgcgagcatccaatttgttacgacaaaaatgacaaacctgtcggaatacgatag

SEQ ID NO: 353435 - DNA, 1731 bp, Pseudomonas aeruginosa
atgccgctactgcttgaggttaccggagctggctggaaaattgaggtggtcggtaagctgcccgatctgcctccatttattcctattctgcctcaattcgctatcggtgtcgacggcgcagtagcggttgaggcgtttgatgctaaaacaggtaaaatgcgctctgtcgccccaggagagctaatcgagccactttttttcgaagcagttgcctatgatattcatttcgagaaaagtgatgaagctgcaagactaaaacttccaccaggagcggaggcgcgtcgtatacgcgagagtagcgagcactatctgctcaactttggaaataatgttgggtttgctgagctgcttgttctcgcgagcagtggtacagcaaagcttcgtctcgaagttttttcacgtaaatcggattatagaaccgactacattcaaatgcgtgcagatgtctcgtcaatgcttcgcaatctagcgatgacggcaaatgcaaaaacttttgggatggctgcacctgcaagtgactaccagcccacactggtcgagtggttttcactgatacagtcttattttagcgaatacatcaagctgacgagcgcaattgccaagaagccgcacactggcttggcggctaagtctgtattcgaggatactgaacgtgcccgtcgagtttctcgacaggcggttgggcgagcattgcgacgagagaacggaggcacagctattcctagtcttggcatcgccttgccgcgtaagatccaagaaaatgttgctgcgatcacgttcgatacgccagaaaatcgctattataaggcaatgattagagcgacttatcgcaatgtcagggctttatcgaaggtgaatgactcgggtgatgaggatgcagacctattttcagagcgccgtttttttgaatcaatccggccaatactcaaatccatggagcgtcaactcgaagttgcgttgaaagcgccattcctcacacaggtcaaagaggttgtgctcgtgaggccccaatctatggtcttccacaagcacccgctctactcgagattcgacaagctttttcgtctgttaaatggtggtctttcttttgcaggagagataattcctgttggtgtaaaagagacggcgctactttacgagtattggtgttttttaaagttgatttcacttctgcgtgctcgattcgacttggtcagtcagtcggtggtaaaagttaatcgtctgcgaacaaccgtggcgttgtccaaagggaaatcatcaactatggagttcatccataggtccaccggtaagcgtctctttcttgtctataatcgcctttttagcaggttgccgacgattgcccagaagcctgataacgtaattcaatttgcaagtgacacgaaattctacatttttgatgctaagtaccgagttcagtttgataatgattacatcaggcaatatggtgggccagggcctactacagacgatgtgaatactatgcatcgctatcgggatgctattgctattccgcacccgatgcgttcaggagagtaccttcagggagtggtaactggtgctgtagtgctatttccttatccacatgaggagagttatcgtgctcacaaattctataaaagtatcgggcaagtcgagatcggtggaataccttttttacctggggcaacgacgataatggatgaaaaaattgaagctctcttagaagcactgggttacgtcgctacttga

SEQ ID NO: 353436 - DNA, 1461 bp, Pseudomonas aeruginosa
atgacgctcacgaacgacgaaatttttgaaatggcgagcgccgcggttcgaacaatgtatcagcgatatggtgcggactttaaatttccggctgatgttatttggcagaatatacctcaaaacgttgatattccgagcaccaagaggccgcatcaaccagctcgactaattcgtgccggacttttggaaaaaactggaggcatgacgaaggcccaatcagagagtagggctggaagccctacagcggaatatcgctttgggcctgaattggttcagagggcgaaacagtctagacaaagccaggttcccggcaagcgctcgccaagtgagtcgctcacaggtatccaattggctatggacgctgaaggttacgttatttcagtagctgagctagccaatttttatttggccatgagcgtcagcccgcttgtggttctttctggtatctcgggcacaggtaaaagcttgttgccgcggaagtttgcgaagcacacaagttctttatttcatgcaatcccggtacagccgcaatggtccgataatagtgatcttttcggctatgtccctacgttgacccctactaagtatataaagggtgcgctgatcgagagtttgttagaggcaaagaaaaaccctaagaaacttgtaattgcactgcttgacgagatgaatcttgctcctgttgaacattatttcagcgatttcctaagtgtggctgagacgcgtactcgggtggggcaaggaattacaaccgataggctgccgattgagctgcccgatgaagatcaggggcagtcgagtactctagttgaattgctgcgtgaaattcaactaccatcaaatttccgtatcgtgggaaccgcgaatatggatgaaacaactcataccttcagcccaaaagttttggatagagcattcactattgaatttgatgatccagacttgaccgctttcgcgactagtaagaatagaaagcatgatgatggtagtgtgtttgacgagcttgccgctatcgctattcgtgagtctaacgcaatatccgttcaggaggcatattcctctagtcaggagctttttgagcatatagcactacttctgagcgaaattcaagaaatcttagcccccgcgggtatcaagtttggatatcgtacgcgagattctatcttgttgtatcttcacttctggcgcgagcttcatctcaatgatatcttaactggttatgcagcattagatttttgtattttgcagaaaattctaccgaaagtatccggtagtggagaggttcttgcagaagccttgatgaatcttagtgtttggctcaatgctagagcggaagttcaagtggatgaagataggatctttgcagagttctccggtccgttagctaggagtgttcaaaaggtcgagcgaatgtctgctttactcaaccttgatggatcgactcgctactggggcgcataa

SEQ ID NO: 353437 - DNA, 1389 bp, Pseudomonas aeruginosa
atgcttgaaaagaaatactcccttgcagaattcttctgcggttgtggtggaacctcccgcggattcacccgatctgggcggttcaacgcagtattcggcaatgacataaaggccgaggctctacgtacgtttgagttcaaccatcggcaggatgaactgcctcccgtcactctgcgcgaagatatccgactgctggaggttgagcgcatccatgacgcattacgtgatcgtggagtcgcgaggggagaattggattgcatgatcggagggcctccctgtcagggtttttcgcagctccgacgtagcgaacatcgcgaaaaaggaaagattgtaaaatttaagggctatagccagctggctcatgaccctcgaaatgatttggtcctacgataccttgaagtagctgaggcccttcaacccaagtttctggttattgaaaatgtcccccagatgctcaatcatggctttgatgggcgtttgggtaaactatctgaaattgttattcaaatgcttgagcgcgacttgggctataaggttgaagttgctgttcttaattgcgcggactacggagttccgcagcttcgtgagcgtgcggtttttatcgcaagctctataggttcagcatctatgccaagtcctagtcattgtgatccgtcgaatgaaaggcttttgcgagaagggcgttcgccgtgggtgactgtagccgatgcgatctctgacttgccaatgccatctgttgcagaggatgtgctgggcgggcaagcacttcagctatatggcgaaatctcgagcccatatgcgcaacaaatgcggagtgcggaagagtttccttataatcatatcacccggccttacagaaagtcggtgctcgatattataaaggagatgaggccaggaaagacctgggatgctgaaagtgagcgtatgagaagtcaatatgctaagaaaattcaagagttctcaaactccaatcgtctctcattggaagccgcacaagctgaactcgagcgctctggagtaatcaaccctgttttctacaaagactattattggagtgcatattctcgcttggcttgggattccccttctctgaccatcacagcaaacgctaacttcttgggctcaggcaggttcacgcatccaacggagatgcgtggaattacaatgcgagaggctgcgcgtttacagtcctttgatgacgatttctgtttcattacttccgatggcgaaagcatggataccgcacgtattgggatcggaatggatatgattggcgaggcagtgccaccgttgttgtcgaaggccattgcactccatctggctgcgcagttagatggctacagtgcaccggcagatgccactgccaagctggcggcaaaggtaggctaa

SEQ ID NO: 353438 - DNA, 702 bp, Pseudomonas aeruginosa
gtgcgggtggccgatgagcaacgccgaaccctgcttgcgggccagggcgacgccggcctgcagttgtgcggagaccgcttccggtgtggcttcgttgtcgaggaacacatcgcgcgagacgctcgccaggccgatccgctgcgcctcgctggcggccacggtggcggcgctggtgcggctgtcgaccaggtacaggccgcgacgctggagttcctcggcgagccaggccatcgccgggcgcaccgcggtcatgcggctgccctcgtggttgttcaggccctgcacgaacggcaccttggccagcgccgcgtccagccgccgcgcacgctcttcctgggtcagctccggccgccaggcgtagggaccgccggctgggtccatcggcatgtgcaggatcaccgtgcgcccgcgctggtgcgcctcgcgggccagttcggcggcatgcggggtttccgggatgatcgccagggttacgccggggggcaggtcgaggacccggcggtcgcgcgccaggttttgcccgaggtcatcgatgaccacggtcagcagcggcgggcgctggtaggggacggggtcctggcgggcctgggcctggttgaacagcaggcacaggcccagcagggcaacgcggaacgccgacatcagttgccgcgggtgacgctcaggcctttcagcagactaagggcctggctgagctggtag

SEQ ID NO: 353439 - DNA, 318 bp, Pseudomonas aeruginosa
atgccgtcgaagggcgatatctacatgtttgccctggatgaccctgccggccggcacctggaactcaccagttggcaactcgtgggatccggctacgcgatcaagccacgcggcgagtgcgtggccgaactgctctacggggaatgggaggggaccgtcacctgtgccggctcctcggtccggccggtggcggtcgctggcgtgccaccgttgctcaacctgccgccatcggcggcgggcgcccgtgaacctgacaaggtgccgctgaccatcgtccccgattccgaatacgcctcgcggccctggaggcagaaatga

SEQ ID NO: 353440 - DNA, 1035 bp, Pseudomonas aeruginosa
gtgctggatgtacccgttttgctggctgccgtgtccccggactcgccctgtggcgacgatctggagtacgacgccgcgttcctcgaactcgaacgcatcgcccagggccaacccgagcgccagatgggcgatgccgtgctgcccgccgaaccgccggagtggccgcgcgtacgcgcgctggccagcgagctgttcggccgtagcaaggacctgcgggtagccaacctgctgctgcagagcaacgtcgccctcgacggcctgggcgggctcgccgaaggcctgctgctggtccgcgagctgctcggccagtactgggacggcgtctatccgttgctcgacgccgatgacgacaacgaccccaccttccgtatcaacgccctcaccggcctggtcgccgaaccgctgctgcaactggtctgggcgatcccgctggtgcgctcgctggcgttcggcccggtcaacctgcgcgccgcgctgaacgccgccgggctgcaacgcttcgccagcgagaccctgagtcccgagcagatcgccggcgccttcgccgatgccgacgccgatgcgctggccgccacccggcgcgccctggatggcgcccaggaacatgccctggccatcgagagcggcgtcgccgaacgggtcggctcggcccagggcctcgacctcggtccccttcgtcaactgctgcgccaggccctccaggtgttcgacctgtacggcccgcagggcgccggcgagcccttggcgccgggcgccgaagcggccaccggcgagcaggggggcgccgcgcctgtcgcagccgtcgccgcgccggcaccgcgtgccagcggcgagatcgccaaccgcgaagacgtcctgcgccagctcgatcgcctgctcgagtattacgttcgccacgagccgtcgagcccggtgccggtgctgctcaagcgcgccaagacactggtgacggccgacttcgccgaaatcgtgaggaatctcatccccgatgggatttcccagttcgaaaccctgcgaggcccggaaagcgagtaa

SEQ ID NO: 353441 - DNA, 501 bp, Pseudomonas aeruginosa; identical to SEQ ID NO: 83644

SEQ ID NO: 353442 - DNA, 327 bp, Pseudomonas aeruginosa
atgaccctgaccgcacatgacattgccagcatttccgaagaactgatgcgtgtaggcgtctgcgactccatgcaggcggctgggcgtactgcgacttacgcgatggagtggatgaacggcaagacgttcgatttcaacaagtctgccgtgaaaacgcatcgcgcccgtcttcgggctatcggcttcgacatcaagctgcctttcgacgcgtcgcggcacatgttcttcatccacaacgtgcgcgaagtctcccgcaccttcgacgtgcccgcgccgagcttctaccggcgtccggacgtgccgcgtcacctgcggttggtggtctga

SEQ ID NO: 353443 - DNA, 237 bp, Pseudomonas aeruginosa; identical to SEQ ID NO: 340152

SEQ ID NO: 353444 - DNA, 207 bp, Pseudomonas aeruginosa; identical to SEQ ID NO: 329405

SEQ ID NO: 353445 - DNA, 225 bp, Pseudomonas aeruginosa
gtgctccgcaaggtcaagtggccggacaagctacgcaacctggagctgctgagccggcatgtcggcaccgagtctgccgcgctcgacttggagctcaagcgcctggatgtcgcgaagaagcgcgccgaactgaagctgctggagaatcccgaggacgatgcgccgccgaccagcgtcgcggtgaccatcatcgacgcgagggtgcgtgatgccgacgctgaatag

SEQ ID NO: 353446 - DNA, 798 bp, Pseudomonas aeruginosa
ttggagattcagcaaagaaataaaaagatagtggctgtccttgttgctatgttggttgcattagtagcttccccattcttagcgtggtggttttttttaggaaagctcggtgacaatgctataagtttaagtaatagtgactggggggcttttggctcgtttgtaggaggagtacttgctccgccactagcggtcatatcagctgtgtttctatatttaaatataagaattattaactcacaccatgaagagcaaatgaagatcatagcccagcaaaatcgcagagagatgctggtcaggcttattgagatttacaatgtaaagctatcagagccattagagaaatcattctctaagtttattggaagattaaaaataaatatatacactgacaactcattaacatggagcccgtcaagcggtccaattataaatattcttgttgatctaaatttgaatagagggcaaaaccgagggcaagccagagggtttagcagggaatatatagagtttcttaatacagtgctggcaaatgctgagctttgttgttgcaaaataatagatacgctattaagcgccacagaccagagagagcttgaagatctggcggatatagctgaggcattatcagattatcaccccacaaaagccctgtttgagcttggcgtagaaaaactagcctatcatgatgaggttcatctaatggagctattagtaaagcttaatgagcgaacatcttatagtaaagaaattgttggaaattatctaatgttaaaaaaagagaaatccgccagttag

SEQ ID NO: 353447 - DNA, 357 bp, Pseudomonas aeruginosa
atgaggacggcaacccacatcagtactgcagaacgctttggccgctggctcggccgcggctggcggggttatgtccggcgcgaggggcaggccgttgcgtggctgacggcacggggcgtgcccgggttcctgattcaaggagttctgtggttcgtcaaactaggggcacttgccttatccctgtatgtcggaatctggctcactgcgatttgtcttggaatcgcaggcgcagcatggggggcgcgcaacctggagatggatcagcccgagcctgaatggcgaatggggcactccggatttggcctctatcaaggcgacatgcggatagacatgggtgatcccttcgaagacgattga

SEQ ID NO: 353448 - DNA, 1002 bp, Pseudomonas aeruginosa
atggatatagaagaaataaccaaactcttcggaagaagtgccgcagacccggccgtcgaagctatgttccaatcgctgggcatcaagcgccggcccgaactggcacgacctgccaaaagcccttatgaagcgattctgcgggtgaacgcacagggcatgctgttttccttcagcgagcgcaactattgggaaggactgcaggttacgtcacatggcaagagcgatacgctgatttttaccaacgtggcagtcacagccggaatcccggatgtcatgcgccgctatgtgggcagtgaattgcccttcggtttgcagtgggaggatgaccgggtcaaggccagggaaaagttggctgcggccggatggagcaatcgactgcacgcttacaagcgagacgcctggtggctgcccgactaccacattcgcctgacctatcaaccgggaagtatcgaccaaccggaagagccaggcatcttcgatatcagcctaggcattccgatgccggcttcagctgagccatttccaccgcggtactatcccatgccggaccaagtgtacgacctgtttggggaatcacccgccagccccacattccagagcctgtttcgcgacttcgatcccatcaggctcatgacagaagcagagctggagatcgtcgataggaagcatgagtacggtttcgctttgtatttcgacaagacacggcgcactcccgatggacgcccctcattcgccggcatcaacatgtgccgcgaccggctcgggacttcaacggcctggagaggaccgttacccttcggcctgggtttcgacgattcaccttccgtttttgagcaacacctcggccagaaagccaaccactgggacgacaacaagacattcggggtcgcccgctggttcttcccgaatttgttgatatggataaatttcgacaatctggataactgcatcgagtcggttcgcatattgcgcgccggatacagagatgatctgcgcgattga

SEQ ID NO: 353449 - DNA, 1746 bp, Pseudomonas aeruginosa
gtgtatctggccgagttgaacataaggaactttcggaagctgaaggcggcgaaactttgctttcaggcaggcctgaacgtattggtgggggctaacaacgtaggtaagacggctgtcgtcgatgcactccgtgccctgttggctggccatgaggagtcctacccacgctttagtgtggatgaccgccatcgacccaaggtggggcagcctgacggcgacatctccttccactacgtattccgtgacctcgatgcagatgacgaagcagattttttggcagcactccagccggggaacgaaggcaagctggaagcgcatatctggattcgatactcggatgcggacaagggagggcgcttcagaatcaaacgttggtgtggaagccatgaggatgtgggcctcacgtcggacatgatggagaatctgcgaggcgtttacctacagcctctgcgcgatgcctctcagagcctgagaccaagccgaaacagccaactctcccgactgttgcagctgctggctgatgaggcggggcgcgcgggcatcaatgatgcccttaagcgtcttgatgatgagctgaaggcacatgcgcccattgtccgcactcaagacgcgatctcaacgcgacatagctccatgcttggtaagcagctggcacagatcctggaagtcgggctgagtgcaagcgatttccaaaggctgtcgtcacggctgtctctgtcggtggactcgtttgagatcgagcagaatggcctaggtttcaacaacctgatttttatggccgtcgtcctcagcgagttggcaaaaaatccggaagccacgtatcgagggttggtcgttgaggaaccagaggcacaccttcatcctcagcttcaggccgtgctattgcgctacctggagagcatccagatcattgccggggagaaacccgtgcagttgtttgtgaccagccactcgcccaattttgcaagcatcgccaacctggattgcctcacatgtttggtggaaacggatgagggggtcgaaacgttcttcccacgaacgatcaagttcggcaagggaaagcgcgagaagctggagcgctatctggatgtgacccgagcggagttgttttttgcccgacgggtgatattcgttgaaggcgcggctgagctgatgctgatagatgccctagcaacgaaggccggccacaacctcagggaacacggggtcagccttatcagtgttgaagggttgaacttcgactcgtttctgccgctgtttggcgagcaagcgttgaagattcctacagccctgattacggatgctgaccccgtggctgaagcagccgagggagaagagcccgaaacactgtatccgggagccgacgacgttgtgcaagtgtctgacaacacggcgaagatgaaggcgctcgaggataagttcgtgcaagtgcgccatggtgtgaagacgcttgagtacgatttggcactgtacgcggacaacagagatgcaatgctgaaggcgcttgcagaaatgcacccgaagattgctgtggcagtaaaggcagcggtggatgcggcaggtagcgatgcggagaaggctcgggcccttttctccggcatgttcgagcgtcctcagaacaacgtgcagaaggggcgattcggtcaggagctcgcgcaagtattgaaggatggcgcagcttgcgtcgtacctgcttacatccgtgaagccattgagcacgtctgccaagtccgggtggctccatga

SEQ ID NO: 353450 - DNA, 1731 bp, Pseudomonas aeruginosa
atgaacgagctttctccggaacagcgggcgattgtcgatgcccccatggcgccattggcggttatcgcgtgcgcaggcagtgggaagacaggaaccgccgtgcatcgagtcgttgaaatgcgcaggcggcttggcgaagagcgtggcagggtggcgttgctttcattctccaatgttgctgtcgagacgttcagaaaaggctatcagtcattggctcaggtgttgcccgctggcgctgggcgcagtcgcgtggacattgatacgctggacggtttcattaccgccaacgtcctacggccacatgcctatcgaacgatgggagccacgcagtctgcatttctagttatcggtagtgagccgtttctcaacgggtttacatactggacaggccagtatcctcttcccgtgacgaaaatacaggtggcgtttcatgaaggcgcaccgatcttctactacgacgtttttgggaagcctgaactgctgaatcaagccgtcgcccgtaagttggtcgatcggctgggccgtgtgggtgcctacacccatgactttggccggtattgggtctatcgaacgatgcaagagcaacccgccatcctgcgggcactggcgcgtcgctatcctcatatcgtcgttgacgagtcgcaggacattggtacggcccaccaggccatcttggatctgttagcaggtgccggcgtgcaaatctcgctaataggagaccctaatcaagggatttacgagttcgccggggcggacggaacattcctaaaggggtatcacgctcgtgctggcgtcgctgcgtttgcgctgacccgcaactaccgctcactcccttccattcttgacctagccaaccgaatatcggggcgcggtgacacaccgggacgagaggctggggaggaaggaggtggcgcctactttatcggttacgcaaaagccgagctaccacagttgatggacgcgttccacgctgaagtggccaacttggggcttcgtccggagaaatctgcagtcatctgtcgtgctagagcgcaggccgacgagttggcaggtgtggacgcccctgcgggccagggtgtggtcaagggatttgcttctgcagctgttttgcgcgacaagcagcgggactatcattcggcgttcaagttggtagcaagctgcattgtcgcgctattggatagtcccccggacgggttgttgtcgaagcttgccaagcccgcccactttccagaagtaaaaggccttcatcgattgttgtgggcatttacgcgcaacgccggtgttggcctgccatcgtctgaactcgtcgccgcgaaagagtggcatgcagcgttgttggagcggattcggaatctgttggaccgagttcaagcggatttcggttttcggccagtgggcaaccttggcagaaagctggcaaagagagggctgccggagacgccgcttgcgttagcggaagacttggccgcggaccgcggcaccagaattcgcgtggataccgttcatcaagtcaagggcgagagcatcgatgcggtactttacgtcgccacaaaagagcatgtcttggccatgctcgacggtgttggtaccgagcttggacgcattggctatgtcgccattacccgagcaaggaacctcttgtggataggtgtgccagccaacgcgctcaaagagctaaggccggcacttttggcagctggccttcaggaagcaggggcaattgcgacctga

SEQ ID NO: 353451 - DNA, 252 bp, Pseudomonas aeruginosa
atgaaagagccgaacccgcgcgaaggccagagcgatgatctcgccttgcgtacctacaccttgatcttcgacgccattctgcagtgcgagtccgccaaggaacagcgacggatgatcagcttgttcctctgccaggcagccattctctgccgcttcttggatggaccgcagacgttcgaggacttggtgcgaaagattcgggacgtggatatcggctcagattggcttctgcaagtgatgcagatgcattag

SEQ ID NO: 353452 - DNA, 330 bp, Pseudomonas aeruginosa
gtgaaagccggcaggctgttcaaccggcggggttggcgcacgttgctttggactttggcgctgctcgctggcgcagtcatcgccaacatagtgggcatccacctgctcggcagtccggagggctggcaacgctggctgagcgaaacctcgctctacttcttcgtctggcgccttctggtctacgcggtgacggtaagcctgtggctgcgcatgcgccgccgtctgctggcgcgcgagaccgggacgcaggcacgcaagcggctcatccgggcggagatcgccggctgcctgacgctggtactgcttgaaaccagcctgttcagcgcatag

SEQ ID NO: 353453 - DNA, 1395 bp, Pseudomonas aeruginosa
atggcatatcgaaacaggacctctatcgcgcgccgctcgcgccacgcacgagcgcccctgctggttggtacgctggccctggcgagcagcctggcgttggcgcaaagcggcggcttccaatacagcggcaacgtcatcggcgatgaagtcatgtactccatcggaggcggcaacgcggtctcgatgagtggagccgcaggcatgcgctcgatcggcgtgggtgtcggctggaacagcaacctcatctgcggcgacatgagcatcagcaccacgatccagaaccagctcaacgggctgaccaacggattccagaacatcatgagcagcgtgatccagaacgccaccagcgcggtagcgtcattgccggcgctggtcatccagcgtgcagatcccggactgtacaacctgctcaccaacggcgtgctgcaagccaggatggatttcgaccgctcgaagctcacgtgccgcgccatggcgcagaagatggccgacgtcgcgggcggccagctcggctggagccagctcgccgaaggcatggccctgcgcaacgccgttgccagcaccgatgcggtctcggcggtcgaccaggcggagaagagccgcggcaaccagggtgtgccctgggttggcgggggcaatgccggcggcgccggccaagcgccgatcagggtggtcagcgacgtcaccaaggccggctacaacctggtcaatggccgcagagtggctgacacctcgtccattgcctcttcgaactgcgcaagcctttcctgcaagacctggtcctcgccccaggcggcggccaactgggcaacgcgcgtgctgggcgagcaagagcagcgaacctgcgccagttgcacaaagacccagaccgtgccgggtgtgggcctgaccccgctaatccaggaagaatacgagaccaagctcaaggcgctgcagacgctgatctccggctcacgcaagaccacggtccagaacctgaacgaggcgggcagcgcatcgctgccgatcacccgcggcgtcatcgaggccctgcgcgaagaaccggatcaagatgtcctggctcaccgcctggcttcggaagttgcgctggcctccgtgctcgaaaaagccctgctgctgcagcgtacgctgctcaccggcaagaaagagcccaatgtcgccaccaatcagttggccgtcgaagcagtcaaccaggagtccgacacgctcgatcgcgaaatccgcaacctcaagaccgaactggaactgcgcagggaactggccaacaactcgccgatggccatcatccagcgccatggcgcgcgcgcggccggctctcgcggcgtctacgaaggcgacccggtgccggaccgactcgaccgcctgcaacggcccagcccgaagaaggcaccgtga

SEQ ID NO: 353454 - DNA, 939 bp, Pseudomonas aeruginosa
atgaacttcctccgtcgatgccgcctccgcacgatcatggccgcactgctgctgagtattgccggtccttcgatagcactggataccgtgtccataagcacatccacgctgtcgccgagctgcctcgagtaccgagttgtgggtatttgctactggttgcagtgtggcttcggctgccgggtacgcacctcggtgaaggtccgccacttcgtaccggatgcggtcgtctccagctacagcagcaccggcaagaacccgtgggtggaagtccgagcaatgagcctgcccaacccgactgcacgcggcggcggagacggaacgacgaaccaggaaggcgagaacaacctggccaagttcaagaacgccgatgtcatcggacaccctggcagtgccgcgttcagccggttcgccgcgagcttcggctacagctgcgctggcgcgggaacgcctttcatgccctatctgctcagcacgctggacacactggcgtggcgccacaatgtgcccgaggccgtatacccggaggcactggtgcccggcatgcgcgaaatcggcgcacgcacgaccatgaatctgtggggcaatgtctacccgcgcggcggcctgctgcaccaaagcgacgaccacaaggcagccgccgtcgtcgctcaacgcgccggcgacatcgtcacgcggcgcggccagctccatgtctacaagccgctgctcgccagctcccgccccggctactggcctgcgggcgcgctgatggaaagccgtgcatcgacgggcaagtggcaggaactcacgcccaagctctccaccagttgcgaggtcttcccgcacaaccgattcctccagcaagcccagcaaggcgactacgcctgggccttgtggcgcccatacagctgctgccgccgccgaggccaggtgttcctcggctcgaccgacttccagtag

SEQ ID NO: 353455 - DNA, 1029 bp, Pseudomonas aeruginosa
ttgactggagtgaccgcagatgaagccatcccccgggatctaacccatctcgatttaccagcagcgatcgatcgcgttgttaccggtttgtgcgatctgaagctggacatggaccgccatgggcgcggtttcatcggccagccgtttcttgacgactggatgggggcgtcgaacacctgcgcttatttcggagatggcttcttgaaactgatcctgccgttcatgggctgggaagacgagccgcgcagctatttcaaggcgtatgtaaatccgcggtatgtgctgggcgcaagcatcaaggggctgcccgaacacgtcaaacccgagcaggtggacgataaaatcacccactacgccagccattttgggtccaccggcaataccgcctatgtctgggtcaagccgctcggcatcttctgcgcacacgaaggcaagcatcgggtggccttcatgcgggcgcacaaccagtccgctattgcagcctgggtgcgcgaagccggctatccggcagcggatcgactggccatcatttgtcccacggaagagcatgacgaatggctggctatgctggacgggcgctatctgcaagtgctgcgacgcccgcggacgacgcggctgctgctggaagcctatggagtgaaaacactgcggtggcgcgagattccggacgccccggaagagcgggccgtgcgccaggaaatctatcgtcagcgactccatctacgcccccgcacgagggccgagagcgaacggacgctcgacctcgaagcgccccggcagcgggagcaggacgacaaccgaatcgtcgccaggaatgtcttgggccttgcaccgtaccgtttcgcctggcgccggtttttcacctgcatagcggtccctttctgtcttgggctggcgctgagtgcctttgagcacgattggttgcgtggcgctggcctcgtcatgctcggcgcgagctttgggctactgctatcgctcaatgtcatccaactcctcggcccaaggaagtttgggcggagcggaaactga

SEQ ID NO: 353456 - DNA, 840 bp, Pseudomonas aeruginosa
atgtgctattcatcgcaggtttgggccgactaccgaaagttcgtgcgtgcctacggcgcggtcatcgacgtggaagagttctatcgactctattgggagcgagcccagggcagcggcgccaaaatccccaagggcatggaccacgcattcctatcggccatgagtgggcgcgaggcggagattgccaggttgatcgccgagtggaatgccacagtcgtcagcgacagcgaaaagaagctgttcacccaggcgaagcgtctggccgatgcagagcgcaaactggccgtgaaggaaaccaaggctgctctaaacgaccagcgtgtggccgggaacaagattcagcagttcaaaggatggattgccgacgcccagcgaacccaacccgagcccatccgggacgatcgcatctggccggactggtactgccccgtcatggtagccgagggaaaccgcctggtggtcaagccaatgcgctatcactgccggcctacggggaagcccgcctcgattgacagaacgcgggacggcaaagtaagcggcacctacaatgctcgtcgcgacaacctggagcgcttctggaaaggccagtttgggcacacccacggcgtcatgctcgccgagaccttctacgagaacgtcgagcaggaggacggcaccaaccgggtcgtccaattcccccccgcagcggtgaaacgatgctggtggcctgtctgtggtcgcgctggacagggcctggcgaagagttgctgtccttcgccgccatcaccgatgagccggagccagaagtggctgctgcgggccacgatagaactatcatcaatctcaagcctgaatatctag

SEQ ID NO: 353457 - DNA, 609 bp, Pseudomonas aeruginosa
atgcctattgcccatgccagtccttgcagatgcagtaagggcgactatcgctatttctcgcacgggcattgtcttgcctgccagggaaccggtatcaaaaacgccaaccgggaaaaagtgcttaagcacaacgccgaggcgaaacgtcccagcatggcagactacttggctttcgatggtgcccactgccgcaatttgtacaagggcttggcagaagattggcaatgccctggatgcagacgcacgaaataccagatactgcggtggaccacgttgttccccaagattccgtcggcacgacgacctggctgggcgggcggttaccacacccatcatgaccacgcgtgcgacagatacggtttcggtcggacgcctgtaggctataccccacgcttcccaccaacggttgtttgcgagcagtgcaactccgccgatgcgtcggcgaaacgccagctcaagctacctgagtatttttcgttttctcccgaggagattcgccagttcgtgcttccgtatccgcacggaaagcacttacttgactaccggattgcgcagcagattcatgcctcgcttcaagtgtcatctaccccactgttttggcccgactga

SEQ ID NO: 353458 - DNA, 810 bp, Pseudomonas aeruginosa
ttggcctcacggattgcccccttcgattcacagcagcttgaagcggcctgccgggtgctggccgataccgcgaatggacttagcggcacccaaattgggcggctgctgcaagaaatcaatgtgccagatccgtcgtccgacatgacgaaatggaagcgtctgttcaatgctctggcggggatgcagaacaaacatcaagccgggaaccatcttattcagttcatcaatctggcgatgaaccctgtgagttatgcccgggatcccggggcgttcgcctggcgccgcgatgagttgaacgttgtgttggccttttcaggtttctacgtccgtgatgatgggaaggtcgcccactcggctaaagccacgaccctcgatgcagcgcgagcgcgtgccggtcgcttaaaagccgccctagaaagccgtgccgttcacccggaagtgctgacctactgccgggccgaattgatggacgacaactactttcacgctgtctttgaagccacaaaaggagtcgcggagcggattcgtatcctgtcgggtcttaccggcgacggctccgaattggtaacgcaggccttcatggggcagcagccgcttcttgttttgggtccgctgacatctgagtcggagaaaagcgagcaacgtggctttgccaatcttctgataggcctgtttggagccgtgcggaatccattggcacatgcccctaaaaccaattggcccatgtcggaacaggatgcactggacatcctgacgttggtctcgcttatccagcgcaagctggacagcgtaaggaagaacaacctgtaa

SEQ ID NO: 353459 - DNA, 702 bp, Pseudomonas aeruginosa
atgcctgggaacccatccaattcgcgacgtcgctggcgcttgtccatcgcgttggcgctcaccctcctggcaggcaccggtggtgccgtcttgctgaccaagagtctgcagcagaacactcgtcccgaaacacccatcacctcgaaatccggtcccccatggatctacgggcaccaagacgcgcggtacatgctggtggcctatacagacttcgaatgtccatactgccagacctacatcccgcagcttctgcgatgggtagagaccactgatgacgtggctctgcagtggcatcaccttccactggcgagccatgaaccagtcgcctcgggtttggcccgcatggctgagtgccaaggggaggtaggtggctcagccgccttctggaaatcagtgcgctggatctacgcccatacgcgcggcggcggccagggtccggcagccaaggatcattcacccggcatcaccccagcggtgcaagcatgcctaagcagtgagcggcccgcggccatcgtacgtgctcaggcggcagaggccgcaacaggcggcatcaatgtcactccaaccctgcgcctgaaagacagccgcaccggccgcatgctaaagctcgaaggagcagtcgaccaagacacgctgctgtcggcactggactggctgtcgcaacctgaagaagaaggaccagcagccagcacagcattctga

SEQ ID NO: 353460 - DNA, 2769 bp, Pseudomonas aeruginosa
ttgccagagcctggagccgcagtacgcggcgacaagcctgccacccttgccgatgagcaacggctctacgatgtgacgccgtcctttgtcgggatgttgccctgggtcgagtacctgccacggtcgaaatccctgctgcttgaggatggtcagtcggtcgccgcattcttcgagctcacaccgttgggcacggagggccgcgaagcggcctggctgggacaagcaagagatgcgctggagaacgcgcttcaggacagtttcgacgagctcgacgtaaacccctgggttgttcagttgtacgcccaggacgagaccaactttgaccagtatctcgacacactgcgaggctacattcagccgcgtgcgcaaggctcggcattcaccgacttctatctgcgcttcttcgcccaccatttgcgtgccgtggcgaaacctggcggccttttcgaggacacgacggttacgcgtctgccttggcgcggccagaccaggagggtacgcatggttgtctaccggcgcgttgcgggtgaatcgcagcgccgggggttgacgcctgagctggccttggagaacgtctgcgaccgcttggtcggaggcctgtccaatgctggcatccgtgcgcaacgcttggaaggggcgcagattcacggctggctcctcaaatggttcaacccccatccctcccttctgggaccaaccgaggaggaccgtgaacgtttctaccggcagacggcatatccttccgacgaagagggagcggacgatatcgagctggcgagcggtcaggacttcggccagcgactcttctttgggcagccacgctcaaacgcagaacaagggctgtggtacttcgacggcctgccacatcgcgtaatggtcgttgaccgcctacgcacaccgccggctatcggtcacctgacaggcgagaaccgtcgcggcgatgccgtcaacacgctattcgatcagctccccgaagacaccattctctgcctcactctcgtggccatgccacaggacgtactagaagctcacctcaatcatctggctaagaaggctgttggcgaaacgttggcatccgagcagacgctcaaggatgtgcaagaagcccgctcgctgattggcagttcgcacaagctgtatcggggcactctggccttcttcatgcggggcaacgacgaagctgacctcgaccgacgtggactgcagctcgcaaacgtgatgctcaacgccggactgcagcctgtgcgagagcaggacgaagttgctccgctgaacagctacctgcgttggctgccgtgcgtatacaacccagcactggaccggcgtcagtggtacacgcagctgatgttcgcccagcacgcggcgaacgtggcaccggtgtggggccgcaaccaggggaccggtaacccggggctcaccgtcttcaatcgcggcggcggactgatcacgttcgacccattgaaccgtctcgaccggcagatgaatgcgcacctgttcttgtttggccccaccggctcgggcaagagcgccacgctcaacaacctgctcaaccaggtcaccgcggtctatcggccgaggttgttcatcgttgaggctggcaatagcttcggcctgttcggtgatttcgctcggcgcctggggctgaccgtcaacagggtcaagctcgcaccgggctcaggcgtcagcctggcaccgttcgccgatgcgcgccgactgatcgagacacctggcgacgtgcagacactcgatgccgacgcgttggacgaagagcaacctacacaggtcgattctgcagaggccgatgagcagcgcgacgtattgggcgaactggaaatcaccgcgcgcctgatgatcacaggcggtgaagagcgcgaagaagcgcgcatgacgcgtgccgaccgttcgctgatccgccagtgcatcctccacgctgcacagcagtgtgtaccacaagggcgcacggtgctcaccagcgatgtgcgtgacgccctgcgcgagcgtggcggcgaccctaccttgcccgaagtccgtcgcattcggctgcttgaaatggccgacgcaatggacatgttctgccagggcgccgatggagagatgttcgaccgggatggcacgccatggccggaggccgacatcaccatcgtggacctcgccacgtacgcgcgcgagggctacaacgcacagctctccatcgcctacatctcgctcatcaacacggtcaacaacattgctgagcgggaccagtatctgggccgccccatcatcaatgtgacggacgaggggcatatcatcaccaaaaacccgctgctgtcgccctatgtggtcaaggtgacaaagatgtggcgcaagctgggcgcgtggttctggctggcgacacagaacattgatgacttgcccaaggcagccgagcccatgctcaacatgattgagtggtggatctgcctgtccatgcccccggacgaggtcgagaagatcgcaaggttccgcgaactcacccccgcgcaaaaggccctcatgatgtcggcgcggaaagaggccgggaagttcagcgaaggcgtcatcctgtcgaaatcgatggaagtcctgttccgcgccgtgccaccaagcctctacctcgcaatggcgatgaccgagcctgaggagaaagcggaacggttcaggctgatgcaagagcacggcatcagcgaactggacgcagcgctcaaggtcgccgaggcgatcgacagcaaacgcggaattacgcctctggcgctcgacgtccggatctga

SEQ ID NO: 353461 - DNA, 435 bp, Pseudomonas aeruginosa
atgctcaggacctggattaagctcattgcgctggcgtgcgttgccgctctccaggttggctgcgcgacgaacaaggaagacatgcttccccggggcgaccacacgatgcagcagctttggcaacgggaagcgggtgacggcggcaatggccaggcagcgcgtcgccaattgctggacgctcgccagaaactacgccgcccgctaactaccaccgacattgaggacgctccggcacagcagacgcagtacacacggacagctgcgaacgaaatccgccgccagttccccaggctcccgaatcccgacctcgtgatgttcgtgtatccccacctggctggctctgaccccgtacccatccccggatacagcaccgtgtttccgttgtaccagcgcgtgcagtacgccatgcccggcgaacgcaccgaggactattga

SEQ ID NO: 353462 - DNA, 1425 bp, Pseudomonas aeruginosa
atgcgcagtaacggattgctcaaatggctgatgattcctgttgcgcttctggtcctgttcgttggcgtccgattgttctccggaagctccaagtcgcccaatgtgaacgatgctacggacgccactgcacggctgaccccagaagaaatgaaggcgctcggcatagaaggtgatacccccagggacaccgttgccacgcttgtagcccaggtccggcaattgcgtacggaactgcagggtgccgttgccgacaataagtcgcagcgttcggagaacgagcggctacgcctccgcgaggcggagatcgaccagcgcatcaacaccgcactcgaatccgagcgcgatacattgcgtcgagagcaagcacaagccagcaccgaccgtgagcaggctgaagggctgctccaggatctgcagcgtcgattggaggggctgggcggccctagtggtcaagccgatctgcccgttgggcttggcctgcgcgaaggcgacggaatgggtcttccgggcgaagctgtccgctggattgagcccgaggatgccaagccggccgatccacgcaattccaaccgtggctcgagctttccgacacgttttggccccgcccagcagacactcgaaggcgccgctgaagcactctccgcaccaggtccgaaggttgagcaccaataccagcccggagcaaagtccgccaaggccgtctacacggtaccaacgaactcgacactgatgggctccgtcgcgatgacggccctgatcgggcggattccgatcgacggcacggtcaccgacccgtatccattcaaggtgctggtcggccccgataacctcaccgcgaacggcatcgatcttcccgacgttgccggtgccgtattcagcggcacagcggcaggcgactggacattgtcgtgcgtgcgcggcgcggtcaggagcatcactttcgtattcaacgacggcacgatccgcacagtgcccgacgacagtgatggcaagcagcagagcaaccagggcgacggtctgggctggatcagcgatccccatggcattccttgcgtcagtggcgagcggcgcagcaatgcccagcagtatctcggcacgcaggctctgatcactgcagccggcgcgggcgcggcttcgctcatcaagtccgacaagggtgtgtcggtaagcaacaacggaagcggttcgctgggtaccgtgggcatcaccgcagacgaagccgtcggccgcattctctcggccggcgtccaggacatgtcggcctgggtcaacaaactctacgggcaggcattcgccgctgtatatgtgcgtcccggagcccaggtcgcagttcatctcgatagaccaattgccatcgactacgagcctgagggacgcaaggtcgaccaccgtatcggaggatcccatgctcaggacctggattaa

SEQ ID NO: 353463 - DNA, 852 bp, Pseudomonas aeruginosa
atgaacatgtttatccaccacacgttgacgatgctggaggatgccggcatgtccactcgttacccggaaatccggcacatcacgctggacgaaaacggcagaagcacggtgcactcgcaccactccctcatacagggcaagcgggtgagcatcgagcagaaccagcagatgaagttcctcatgctgttcacactgctggacttccatgtggatgccgtctatcccgagctggagggcaaaagctatcgccagaagtacctgaaccttccagtccaaggcgactacaaccttgtcctgagccagttgttcagggtggcgaaggtcatcaggaatgcgctcgtccacaaccagtcgtcgttcgccatgaccgacggccatgtctcagtgggctacgcgcgcgaccagcagcacttctgcctgaaaatgtcatgggaggcattcaaggacttcctcactgcgatcatcatgtacgtcaggggcgacatgggcaagggaagctatttcctgggcatcatgcgctcggtgtacgcgagcatcctggcgggtatcactcaattcaacgacgagttcggcagtgtgctcgcacaacccacagccggcatcaagatgaagcggcgtctgcggcaagtcgtcctgcatcccccctatgaaatctgcggtgacgcgcttcgctttccgagcgcagcccgcccgattgcagagtgggaaggcatggatctctacttcgttcacaacggcacggagcttctggtgcctcgtgaagcgctggacgaaaacctgtcgatcacagagcacgaccttatcgctgactggaagcgcgatggtcactatccgcaggtcaaggcgcggtag

SEQ ID NO: 353464 - DNA, 1746 bp, Pseudomonas aeruginosa
gtggcaggcagcatcatttaccttttcatgtggggatatcaagcaagctacagggttcacatccagattctggcaagaaatgtactaaagaaattaggtgccccggctgacgcagaagtgctgctggttggagcgcgccaccccagcagcgaaaatgcgaacccggtatgcgtagagccagaagacggtaagtggcagctatctttatttgacggcttgctggattcagttgaatcgacttaccagaatcatcagttgcagaatatgtttttcggcgatgagccaagcatgcgcgacaagccggagtggatgcgccgcgactcagtgcggacatcggttagcaaggcactcgaagcttttgattcagagcacaacgtgacatcattttgcggaaaggttaggcggataggcgactactacgtcaccccagtcatacagattccgaacgtcactttcgtgcagttccctcccttaccccccaagcctgttgataagggccagcaaggaagtggatatcgcagcctaatacatgcagcgatgcatgcagttcttcatgaggctaccgaggaattgcataacccagaccctgggcgctttacccatggcagcatgagagattcggaggaaatcgtacgggttgctgcaaaaaacttcctgcacacgccagggctatcgatcgaacgacgatacatgtctactgatcttttcgatgccttgaaccttgtctcatctctcatgtacgagggagtgaaaggcattggtcagctcattctcgttgatccagataacgatgcggttgagtttctggcgaagttcgttgagccgattccatttcgtgagccacgatgggttcggaaagtcttgcagatggcggccgcaggtgtcggaattatcgcaaacagccagtacatatatggacttgggcgattgaaagaatcgcatgactccagtgcacaagatgcgttcacggttgcctttatagatcactatcactgggagttgtactgcggtagccaggcactgcttcgcagtcactatgcagtgcccaaacttccgcaggaacccttcgacaaaaatgccttccttgcaaactatgcgcggctatttccgttgtcgtcacaagagagcggcttgcacctgtggagcctactgcttacccagacccgtcaagatcatggcagcatgattgtcattgcggaagacgcggccagtgaggcgtaccgactcagcaagcaaggtaccaccatcgtgccaaccaagctcactgaatcgctccttcgaagtgtcagcggtatcgacggcacaatactgctcgatcccgctggattctgccacgctatcgggatcattcttgacggtgaagccacggatcaatgcacgccatccaggggatctcggtataactccggcgtgcgctacgtacagacggatagcgctcggaggcttgcgatcgttgtgtcggacgatcgaacgaccgatatcattcctccaatcaggcggttggttagccgctcaagaatcgaacaatgtgtcgcagtactggaggcggcaacgctcgacaactatcatgactcccggaattggttaaacgaccatcgcttctatatcaatgccgagcaatgcgctcgaatcaatgcagtgatagatagactagatgcccttccgaaggaagtaggtcttatttatgtcggaacgaagagatttgaagttgatcccgagatggacgacagttatctaaccgactga

SEQ ID NO: 353465 - DNA, 894 bp, Pseudomonas aeruginosa
atgggaatacctgaatctcagctagagacatggtcccgccaaggatctatcacacagtctgcctcaacctatggcactataaagagtgcattggagagcgcaggcactgagtatcacggaaagaatttcaaggtattccttcagggttcctatggaaatgataccaacatctatgcggaaagtgatgttgatgtggtcatacggcttgacgatgtctactacagtgatatcacacggctatcgccagaagacaaagctgcatacgaccgcgcattcgttccggccacctactcatatgaccaatataagcgggatgtccttaaggctctcacagaccgtttcgggtctgatgtaaaggccggagataaggccatagctgtggcagcaaatggaagtaggcgcaaagcggacgttatcgcatcaatgcaatttcgccgttattggaaattcaaggggacttacgactctcaatacgatgagggtatctgcttcttcaatggtgctggtgaacggatcgccaattaccccaagcagcactcagacaacctcacacgcaagcaccagagcagcaataaatggctaaagcccatggttcgcatactgaagaatctccgaagcaaactcgttgctgacggaaaattgaaggctggacttgctccttcgtactacctggaaggattgctctataacgtgcccaacgaaaagtttggaattagctatgctgattgctttgtcaattccatgaattggattcagacggaagcaaataaggacaagctgctatgcgccaatgagcaatattacctgctgtgggagggcacacatacttcatgggagaaagctgacgcggaagcgtttatcgaagctgccatcaagatgtggaatgattggtga

SEQ ID NO: 353466 - DNA, 963 bp, Pseudomonas aeruginosa
atgattgactccattcccccatcatcgcttactacagagtacgccaacgacaatgtatgccgtgttctcgcacttgatggtggtggtgcgaagggcttttacacactgggcgttctcaaggaaattgaggccatgcttgggtgcccgttatacaagaggtttgatcttgtattcggtacgagcaccggggcgatcattgccgcgctcattgcgctgggatacgaaatagaccaaatacacgcactgtacactgagcatgtaccgcgagttatgtccagccggtcagctgcggcaagaacaatggcgctccaagacttggcaaaggaggtctttcaagacaagaccttcgaagatgtcctgacgggtattggtatcgtcgccacccgttggatgaccgaacgaccgatgatcttcaagggtagcgttgcgcaggctcatggccgcaaggggacctttagtcccggatttggggtcagcatcgctgacgcagtgcaagcgtcttgctcggcctatccgttcttcgaaaggaaagtcgtagtcacctcagcaggcgacaaggttgagctgatcgatggaggctactgtgcgaataaccccaccttgtttgcaatcgctgacgccactgtcgctctgaagaaagatcgcagggacatacgggttgtaaatgtcggcgttggcatctatccagaacccaaaccagggctgctgatgcggattgctaagaaatggctcgctgtccagttacttcagaagacccttgagatcaacacgcaatcgatggatcagctacgcgacatcctattcaaggatatcccgacgattcggattagcgacacattcgagcggcctgaaatggcgacagatttgctggagtacagcttagataagctgaatatccttcgacagcgtggcagcgaatcttttgcagctcgcgaggcgcaattaagggggtttctgatatga

SEQ ID NO: 353467 - DNA, 303 bp, Pseudomonas aeruginosa
atgatgacgctcaagccatcgttggccgatgctctgcgacggatcaggagggcgcgcggcctgagccaagaggcgttctcggacgtgtccagccgcacctacctgagttcgctggagcgcgacctgaaaagcccgacactgaacaagttggccgaactgtgcgaagtcatggaggttcatccgctcacgctgttgacgttggcttacgccggtgccggacagcgtgatatcagcctggccctagacagggttcggtacgagctggataccatcgtggagaatcaaggagagcacaaggaatga

SEQ ID NO: 353468 - DNA, 282 bp, Pseudomonas aeruginosa
atgcagttcgatcctgccgtagcgtccctcgagcacttcgatgcgtaccgttccatcctggatttcctgtgccgggaggaaggcgcgcgccagcacatatcctttttcctgatagaaatcgccgatgcgggcggcggcagcgtgcaattggctcagattgagttcctggcctggcaggtcgtgcaggagcgccagcaggcgtcgatcgtcgaactgcctgttgccgctgagttggaagcgcttgaccagcaccgtcgggccgccctcttcggcagcccgtga

SEQ ID NO: 353469 - DNA, 810 bp, Pseudomonas aeruginosa
  misc_feature (64)..(64): n is a, c, g, or t
gtgccgctagagcgccgatgccctgccataacgacaaacattgcgaccgacagggagtcctccntgtccatcttccgtctggctctcggctgcgtcggcagcctggccctgctatgcgctagcgccctggcgcgcgccgaaaccctggtcctgctgaccgagaacctggtgccgttcaacatggcggtgaacggcggcaactacgccaaggacgatggcatcagcggcatcagcaccgataccgtgcgcgccgcctgcgagcgcgcgcagatcgagtgccagctgatcctgcgcttcccctgggaccgggtctaccagcaggcgctgagcgagcccggctatggcgtgttttccaccgcccgtacgccggagcgcgaggacaagttcaagtgggtcggcccgctggcggtcaacgactgggtactgatggcccgcggcgacagcagcatccacctgaacagcctggaagacgccgcgcgctaccggatcggcggctacaagaacgacgccatcagccagcacctggtcgaccgcggcctgcaggtgcaactggcgctgcgcgacaacgagaacgtcgacaagctggccagcgggcagatcgatctctgggtcaccgccgatccgagcgggcgctacgtcgcccagcgcgagggcctcaaggaggtgaaggtggtccagcgtttccataccgccgagctgttcctggcgctgaacaaggacaccccggacgagctggtgcagaagttgcaaacggcggtcgacgcgctgcgcagcgaaggcttgttgaagcagatccgcgagcgctactga

SEQ ID NO: 353470 - DNA, 423 bp, Pseudomonas aeruginosa
atgataagcggccgctccggtgatagcggggcgctgttgcagccggcgagcaacatcaggcagaagctgatcagcccactggcgatagggttcatcgtcacgtttcagatcctcgatcaagcgttctcggatggccagcgcctggcgcagctgctgcctctgctggtccaggtcggcctgggcctggcgctcacgggaaagggcggcctcgagggccgtgatggtgccggcctggcgggaaagctgggcgtcgctggctttcctcgccagctcggcctggcccaggcgggcctgcgccaggtcgatgcgctgctgttgtacccacaggagcaggccgagggcgccgagcagggcggcgccgtacagcacctggcgcagaaggctcacgcgctggcctcggcgcagttggcgtgttgctcgtag

SEQ ID NO: 353471 - DNA, 765 bp, Pseudomonas aeruginosa
atgtctgccaataggaatctaagaaaaaaatggatcaatgccggatacaaatccgacatgggaagtgcagtcgccagccttccaccaaccaaccatagaatgattaggctatataatcttagcaaagccgaatacgcattaagtaacttagaaaattcaagaataaagatatcaacattcaacgacctaaacgacccattcgaactattagcagcgaatttcaaagagtcaatatcccgaaaagtctttagagactggaaatcaaccaccaatgaaaaaacgggaatcatttgcttttctggagactggtcagaacccgtaatgtggagtcattatgctgataagcacagaggaatatgtctcggattcaacgttaacaaaaatatagttcagaagataaattatcagtcagagcgattaatgatcgagctagatagcgacacaaatccggagcatctacctaatgagttgaaagatagcctgctatgcacaaaatcgtcaggctggagttatgaagaggaatatcgaacctttctagaactaaagccagaactcaaaacagaagatctttattttcgagaactcgatgaagacatagagttagccgaggtcattttaggtcctctttgcgaaaaatcaatcagtacaattaggtcattggtaacctctaaatatcctaaggctgttgtattccaagcaaggttagcatttcaatcattcaaggtcgttccagacgaaaggactgtcagttggataccagactaa

SEQ ID NO: 353472 - DNA, 2346 bp, Pseudomonas aeruginosa
atgacgactcccaagtacggcggactgctcaccgacatcggcgcggcagcgctgatcgcagcgagcgaagccgggaagaagtggcaacccacacatatgctcatcggtgacgccggcggcgcgcccggcgagacggctgaccccatcccctcggccgctcagaccaagctgatccgccagcgctaccgcgctcaactgaaccgtctgttcgtctccgagcaaagcgcaaacgtgctggtcgccgagctggtactgccgatggccatcggtggattctggatacgggagatcggcctcgaggacgccgacgggaagttcgtggcggtcgccaactgcccgcccagcttcaaggcagcggtggaaagcggcagcgcgcgcacccagaccatccgcgtgcagatcatcctatccggcatggagcacgtcgaactgatcatcgacgacggcatcgtctacgccacccaggactgggtgacggcgaaggttgccgcggacttcaagggacgcaaggtgctggccggcaacggcctggtcggcggtggcgatctgtctgcggatcgcaccatcgccttgccagcctccggcgtggccgccggcacctaccgcgcggtcaccgtcaacgccaacggtatcgtcaccgccggcagtaacccgaccacgctggccggctatggcatcaccgatgcctacaccaaggccgccaccgatggcctgctggcacagaaggcgaacaaggccaccacgctggggggttacggcatcaccgacgcactgaacgtcagcgaggctgtcaccaccccgacggccaacaagcttctccggctgaacgcggccggccaactgccgacctcgattaccggcaacgccgccacggccagccggctggcggcggctatcacgctcagcgcaaccggcgacgcaacctgggcggcgcgcttcgacggctccagtagcgtcagcggtgccctgaccctggccaataccggtgtagccgtcggcacctacacgaaggtcagagtgaacgccaaaggtcttgtcaccagcgccacatcgttgacggctgacgacattccttggctggatgccagcaagctcgccaccggtattttgcctgtggctcggggcggtactggcaacaccatcggccaggcagcgactgcactcaagctggcctccccccgcacgctggcaatcgctggggatgccaccggcagcgctgcattcgacggcagcgcaaacgccagcattacggttacgctggccaataccggtgtcgccgacggcatctacaccaaggtcagggtaaaccccaagggtctggtcatcggtgccaccacgcttactgccgccgacatccccgggctggacgccagcaagatcaccagcggggaaatggatgcgctgcgcctgcctaaaagtgttcgcggggtggtgacctatgccggcacagcactcgatccgaatataacgacgcagccgttgattctgaccaaccaccagaatggcccagtcgctgagagatttttctacatccagtcgatgttctatccgaccgagacagggaacgtggcacagatcgccacccagtacgctggcgggaacaatgtcgccgagatgtacatccgcttcgcgtatacccagccggtagcggttaacccagccaatcgcgcctggaccaagtgggtacgctgcgatgtaggaggatcatttgcaaaagaacccgatggccgcctcggcgacaaggtggacctgaactatttcgaccagtcgggctgggtttaccagacggcaaacatctatgctcagaacggttcaaactacccgacgccaaaggccgggcgactcatcgttcatagggccgacaatgatttcgtatatcagacctaccagactcatgacggcctttcgttctaccggtgccgctacgccggctcttggatgccatggcgcagaatctgggacgacgcgtcgctgaactggagcaccctacccggtaaaccatcgactttcccacccagcacgcatgttcactccacggcgagcagaggcgtgagcggctggtacaagaacaacgatacgggggtgatatttcagtgggtgaacctgtctatcggtgaccaccctgggggagttatcgatcgggtcgtgacgttccccattgccttcccgaatgcctgtctacatgtcgttccaactgttagagaaaacggccgtcctgccattcccgcctcaactgtaacggttgcagaaaaagccagaacggcgaccaactgcaccatcgtttcaagtgagtacatcgggaatgtgcagaacttcggcatcaatgttttcgcaattggctattga

SEQ ID NO: 353473 - DNA, 1284 bp, Pseudomonas aeruginosa
atgtctgtcgtgaaacgtcactggcgccgttttctggtcgccgccctggtgctgatcgtcggtgccgccctgctgctctggagccgaccggcggcccaggcgaaactggaagccctggacctcgacgacggcggccacgccacccttgccgaacccggcgagaagccgcgctcgcgggtggtggtgatcgccgcccccgaacagcaactgaacgacgcccagatgctgaacctggctcacgacagcgccgcccgggtgatccagtacttccccccggaaaacggcgattgcagggcgcagcagtcccggctcgaagcggtcattgcccacctcggcggcaagccgaacctggtcgccggcatcggcccgggctcgaccaccgcctggcgctggctcgccagccaggacgacgacaaggccaaggcgctctcggtcggcttcgacattgccctggccgagcgcgactgcgacgccccgctgccgcaccaggcgtcgcacggccagtggctgctggcctggaacgacaacccggacgacgacaccgcagtcttcgtccgcaagcagtcgagcgcggaaaccagcatcagcgactacgacaccccgctgtccgacgtgctcgcccatcagttgcgcctgcaactgcaaggcaacgccgaggccctgccggtactcgaggtccccgcggcgaaaccctcggacatcgtcaccctgttctattccggcgacggcggctggcgcgacctggacaaggactctgccgagcatatggccagcatgggctacccggtggtcggcatcgacaccctgcgctactactggcaacacaagagcccggaacagagcgccgccgacctctccaagctgatgcaacactaccgcgagaagtggggcgcgaaacgtttcgtcctggccggctactcgttcggcgctgacatcctgccggcgatctacaaccgcctgcccggaaaggaccagcagcaagtgaaagccatgctgctgctggcgctggcgcggaccggcagcttcgagatcgaagtggaaggctggctgggcaaggccggcgaggaagccgccaccggcccggaaatggccaggttgccggcagccaaggtgttctgcatctatggcgccgaagaaaaggacgaaagcggctgtacccaatcccaggccgtcggcgagaagctcgaactgccgggcggccaccacttcgacgaggactacctgtccctggcgaagaagatgctccaggccatccgcgaccgcgagaacgctcccgacgcctga

SEQ ID NO: 353474 - DNA, 894 bp, Pseudomonas aeruginosa
atgcgcttttcacacaggtacggctatgacccgttaagaaagccaggcgaggtgatagttgaggacgctccagaatggctgcgaagagacttcatcgtgtcaatcctggacccgttgacgttcatcgacctagacagccgtcagaaaaacaccgaagaacgtccgcttggtatcaagacactgaaccaacgactttgcatcgccacgagaactgaaatggatgatcaggactgggactcatggacgtgtcaagccagcctggaactcacccttcttagggcaacatggtggcagttctacgactgtgtagagatcattggaacccaactgcaccaaactgaaaaaaaatacgagagcgatccgttccctgacgtgtgggacgagttcagattccccgcatatcgctcaaaggtaaatgctctttttgagcagcagatggttggatggcgcctcaacgaccaatcccaactggagatggccctcccaaaagaccttgctgatcgtattgaagccaccagtaaaagcttgaccgacgaatttcagtcagcacgagctcactatcgtaaggccaagcgctacattttgggcacaacaaaagatcctgagaattccatcaaggaatcaatcagcgctctggaaagcgtctgtagggtgattcatcccgacacccccactcttggaaaggccctctcaaaaatgaagtcagaagggctatatccaccaatgatgatctcagttttcgagaaattttatgcttattgtaatgatgagccatccgtacgacatggttcagacaaaccatcaagagtgcaattgcttgacgcagagctcgctcttcaccttggagcagcgttcatccgatacaccctagaggtacgccgctcaaaaacttaa

SEQ ID NO: 353475 - DNA, 888 bp, Pseudomonas aeruginosa
atggcaggtcctgcaaaggaaagatttgcaatttcgtatgatgctgatgctggtgattacaagaatcacgagatagatgcactcaccctgagtcgctctattcagggcgtgcatgacatggtttctgaagccaacactctgctaaataaaggagcagaagtcgagttgaaagtaactgcgccggcgaaagaagggtcggtgattgttgagtttctgcttttggctacttccccgcaagctttggctttgttgaaatatctcggattcgcttctggtgctggcgcaatagcaggaggctcactggttgaagtagtgaaaaggcttcggaatcgacgtgttgtgaatgtcacgattgaaggtgattctgatattgcaacgattgaagtcgatggcgagatcatagagtgcgataagtacgtggccaagttggcagtcgataaaaaggttcgagatgcactgcatagcgtagttcaggctccagtggcggggcgcgaaggtgcgtcatttaaagtgctggatgatcaagataatgctgtgcttaagatagaggaagaggaggtaggtgattattctcctttgccacctaagtcgcttgagaaagaggaagttagtaaggagaaaaaaacagcttattttgtgcaggttaacttcgagtctaacaatggttggcgtgtgaaacttgctgatggaaccgagcatgcagtgaccttggctgatgatacgttcatggacaaggttaatcagaatcagcagagcttctctaaagaagatttgtttgagattgtcattgaaactaaagcaatatatcgtcaaactaggtcgacttttaattatacggttctagaagttaccaggcattttgctgataaaggccgaagacttgtttga

SEQ ID NO: 353476 - DNA, 408 bp, Pseudomonas aeruginosa
atggatttagaacgagagaaatctagagccagaatgctggtggtgcttgggtgggtggtggcgtctatatttattgtagttttcttggtgtcagcactgaagagcatcgctataagcctcgacgggagcgattttttcattgctgttaatgttaagaacttgataattgaactctatcgtaatacccagtatccggtgattggctgggtttgggagtattctcctgttttttataattatcaaatttccagtgtttttaccttttcttggctcgtcgtgtttctggggttctctcttggcggtgggctcatatatatggggaaaagaattctaagagagcatgctgaggcaaagaatgatgctagaaagagtaagttgactgaggcgtacaagaagcgactcggttga

SEQ ID NO: 353477 - DNA, 204 bp, Pseudomonas aeruginosa; identical to SEQ ID NO: 324543

SEQ ID NO: 353478 - DNA, 480 bp, Pseudomonas aeruginosa
atggactggctggcgctggcggcggtggcctacaaggagtcgcacctgaacccgaaggcgcgcggttccggcggcgccagcgggctgatgcagatcaccccggcggcggcgcgcagcgtcggggtcggcaacgtgcacgacaaggacagcaacgtgctggccgccagtcgctacctgaccaagatccgcaagcagttcttctccagcaagcacctcgacgaacgcgagcgcctggcgttcaccctggcggcctacaacatgggcccggagcgggtacagaacctgcgcacccaggcgcgtcgccgggggctcgatccgaatcgctggttcttccaggtcgagcgggtggctgcggaagagataggcatgggtgtggtgagttatgtcagcagcgtcaacaagtactaccttgcatatgaacgcgaacgggttcgcctggagcccggggtgcgtgcgaagacggcgacggctcaaaaataa

SEQ ID NO: 353479 - DNA, 339 bp, Pseudomonas aeruginosa
atggctggggtttttaagttctttactgcgctgcttgctaagattgtcgggtttgcaaaatggctgctgctggtattcgctcagatattcaaagatgcgtggaatatggttactgatgttgtttgctgggtgtttgagcagacgctttctattgcggcctcggcactggatgcaatcgcgataccattcaatccgcaaacatattatgcaatgatcccagcggaggcggccaacatgctgggctatgtgggtgtgcctcaggctataacgcttattgtcggcgctctggtcgtccgattcctgttgcaaactatcccgtttgtccgctgggggtcgtaa

SEQ ID NO: 353480 - DNA, 339 bp, Pseudomonas aeruginosa; identical to SEQ ID NO: 353479

SEQ ID NO: 353481 - DNA, 231 bp, Pseudomonas aeruginosa; identical to SEQ ID NO: 326738

SEQ ID NO: 353482 - DNA, 315 bp, Pseudomonas aeruginosa; identical to SEQ ID NO: 326731

SEQ ID NO: 353483 - DNA, 900 bp, Pseudomonas aeruginosa
atgccaggagagagaacggaattctctatcacgaactctaatacatgttgggtttttatatctgactcgaatgaagttcggcatataattgatgtggcatacgctgttttggttctaaagcagcgaggcgttgcagatagcgcaataagatttttcacagatgaccctcagggtgttgcttacactactgcgcttggtatccctaacccgctgcctatttcagcctttcaaggctctatgcagagcgctactggcttcgagaatttatttgttgtcgttgctgggcatggcggggttgaaggtatcggccatccagtcaaaatctctccagctgatttagtgcgtcattctcgtagtgctcctggtatacggctcgtaacaattgcgctgacccagtgttttgctggcgtatttaatttcatcaatgcgcgcgcagaacctccagttgttatgttcggagcggccaatttaggctcaagtataagtactctaattgacctaggggccccagttgtttcgtcggtctctggtaattttattcagcgctggtccgcgaatgtatttatgctgtatttgtttaagtggattcagtctccgcgagatattgacggagatggaagggtttgcttgctagatgcgtataaatattctggtgcatctgcgagcgcagaaattattcgtgtcaagccgaatattttcctggagtccctagatctttctgaaaagcttaaaaagcaagaagcggatattgcatctggcgcggtgcctaacactctcactgagcagctgaaagtcatggcgactcggcaggagctggatggtagagtgtctattctttataccagccaagagccgtggctgttgtacgcggatttggcaagaagtataaccttcgcctaa

SEQ ID NO: 353484 - DNA, 615 bp, Pseudomonas aeruginosa
  misc_feature (569)..(569): n is a, c, g, or t
atgattattgaatgtaatttttgtaaagctcatgttgatgcgaaggttatagcccagcatgagagcttcgaccaagatgatcccgccccctttctcacctctttacttgagtgtccctcttgcaaaaactcactagtagcgggccaatatgtatggcgaagtggaattggcgatgactcgattgaggatgcccctgatcgtgtttggccgcagccgaaaaaatatctatcctggaccattcctgaaggaatcagggtttcgatagaagaggcgcagaaatgtatatcgggaggagcatttatcgccagcgctgcaatgtccggacgagcattggaaggagtttgcaggcacttcaagacaaaaagcaaatacctgcgtgatgggctggaagagctgaagaaaaatgaggtaatcgataaaaggcttctggaatgggggagagaacttcaaaagcaccgaaacattgcagcgcacgcaggtgacgagaagataaacccacaggacgcgatggacttggtagatttcgtaattgctatttgcgaatacgtatttgtattgactgaaaaatncgaaaaatttatggagcgcgcaaataacaatccaagagatacataa

SEQ ID NO: 353485 - DNA, 180 bp, Pseudomonas aeruginosa
atggaaaagcgcgagactgaagagcaactcaaaagccagagtttcgacatagacgaggaaatcgacgatcgcaacgaacgtcgaggctgcaaagttataccgcttggccacgcccgcactgccatggcccctgtccacgccatgatcctcgccgcgcccatcatcgtcggcggtctttaa

SEQ ID NO: 353486 - DNA, 801 bp, Pseudomonas aeruginosa
atgagcagtcaggtcgacatcatcaagcccgaatcgcgcatcgtggtccagttcagttgcggcgcggcctcttcggtcgccggcaagctggccctggcgcagtacggcgatacccacgacgtccagttcctcaatgcctatctggccaacgagcatcaggacaaccggcgcttccttgccgactgcgaggtctggactggccggaaaatcacggtgctacgcgacgaaaagtacggcgccgacgtgctcaacgtcttccgccgcgagcgctacatgaagggccgcactggcgcgccctgcaccaagctgctgaagcgtcgcctgctggacacctggaagcgccccggcgacgtgatggtgctcggcttcactgcggaagaagagcaccgcctggacgacttccgggagcggaaccccgaccgcccggtgatcgcgccgctgattgagcgcggcctgggcaaggaggactgcaaagccatcatcgctcgcgccggtatcgaactgccggccatgtaccgcctgggctacgagaacgcgaactgcatcggctgcgtgaaaggcggagaaggctacttccgggcgatccgggaggacttccccgagcagttcgaagccctgtgcaaggtgcaggacgagcttggcccgggttcgtacctcttccgcaaccgtcagaccggggaacgctattcgctccgcgaccttcctcccgggccgatccgccgcaacgaagccatcccggcctgcagcttcttctgcgagctcgccgaggccgacatcatccataaggaacccgccgcatga

SEQ ID NO: 353487 - DNA, 1797 bp, Pseudomonas aeruginosa
atgggcgtagtccgcttcctcagcgacaagctggtcaacttcgtggccaacttgggcacggagcgcgacaaggccgccggcagcttctacgcgccggtcctactcaccgacgagcaactgctcaacgcgtaccgcggcgcctggttcccccgcaaggtcgtcgacatccccgccaaggacgccacccggcgctggcgggcgtggcaggccagcaagcagcagatcgagaagatcgaggccgaggaaaagcgcctgcaggtcaaggcccgtacgatggaggcgctgatcaaggcgcggctctggggtggtgccgcgatcttcatcggcaccggcgacatcgacaccagcaagccgctggtgcctgatcggatcaaggccggcggcatcaagtacctgacggtcatgagccggcgcgacctctccgccacggagcaggatcgcgacgtgatgtcgccgaactacggcaagcccaaggcctaccgcctgggcggcagcgcgatcgagattcacccgtcccgcctggtgatcttcaccggcgccgacattcccgaccaggacctggccagcggcaaccagttcgggtggggcgactcggttctgcaggccgtgttcgaggccatccagcagatcgacagcaccatggccaacgtggccagcctgatcttcgaggcgaaggtcgacgttatccgcattcccgacttcatgcagggcatgaacgataaggagtaccagaagaaactgctggagcgtgtccgccttgccgcaacggccaaaggcatcaacggctcgctgctgctggacaaggaagaggaatacgacagcaagtccgccaacttcggcacgctgcccgacatcatcgatcgcttcctgcagaacggctgcggcgccgcagacatcccggccacccgcatgctcagccagtcgcccgccggcatgaactccaccggcgaggcggacctgcgtaactactacgaccgcatccagtccagccaggagctcgacatcacgccggccatgtcggtgctggacgagtgcctggttcgctccgcgctgggcagccgtcccccggaaatccactacgtctggaacagcctctggcagaccacggcgaaggagcgggcggacatcggcaagaccaccgccgagaccatcaagaccatcggcgagaccaagctcttcccgccggacgctctcagcaaggccgccgagaccctgctggtggagaacagcgtgatgcccggcctggagtctgcgctcgaggagttcggctccgaagtgccggacgacggccaggaagaggagggcggcactaccaagctgcaggacgccgcagcgcgcacgctctacgtgtcccgcaaggtgctgaacgctggcgcgatcatcgactgggcgaaggcccagggcttcaagaccacgctcccggccgaagacctgcacgtcaccgtcgcctacagcaagaccccggtcgactggatggcggtcgcgcaggcctggaccaacaagccgaacggaaacctcaccagctccgccggcggcccgcgcatggtcgagcagttcggcgagggcgccatcgtcctgctgttcaacaacaccgagctgacctggcgccaccaagacatcctcgacgccggcgcctcctgggattggccggactaccagccgcacatcaccttcacctaccagcccggcagcgtcgaccttcaccaggtcgagccgtaccgcggcgtcatcgagcttggcccggagatcttcgaggagctccgagaggattgggccgacaagctaagcgaggagtga

SEQ ID NO: 353488 - DNA, 354 bp, Pseudomonas aeruginosa
atggacaaccaacaccgcaagatcaccggctatcgcgaactgatcgcagaagagatcgacctgatgaatcgcatcaaggccaagggcgccgagctgcttgcgctgcaggccgagttggcgggtcgcctgagcaccgatcacgaggtcaagctgtccgacgcccgccgctcgatggttggcaaggagtacaacggcgtgccgtacaacgagcacactggtgccagcgacgagtgcatcgagttccgccgcttccaggctgccgagccgcagcgttgggcagcgattgcgaagaccgatatccagaccggcatcatggccatggtgcgagctgtcgcgcagcccgccggcgtctga

SEQ ID NO: 353489 - DNA, 1116 bp, Pseudomonas aeruginosa
atgctccttctcgaccactccctgtcggtgtccggggttcgccggaccactgacggctacctcgttgccgtcgcaaaggtggcccgcatcggcgtgcaggactacctcggttccgaggtcggcaagcctgaaatgccgctggtgcgcgtctaccggccgccggaggcggtgttcgctgaggacgccatgcgctcctacgccttccgcccgatgaccaacgaccaccacggcgaggtgaacgccgacaactggaaggagctggctgtcggcaacactggcgccgaggtccttcgcgacggcgacttcgtccaggtgccgctggtgctgatggacgccaacaccatccgcgactacgaggccggcaagcgcgagctctccatgggcttggaggcctccgtcgtgttccaggacggcgtcacccccgagggcgaaccctacgacgccatcgtcacggacatgcgaatgaaccacctcgccctggtcgacaaggcccgaggcggcgagcaactacgcatcggggactcgcgcagccccgctgcgaaaccccctgcgcagaaaccgaaaggaggccatgacatggctgatgcactccgcaaactcctggtcgatggcctcacgatcgagaccaccgagcagggcgcccaggtgatcgagaagctgcagaagcaactcgaagacaccaagtcctacaacctcaagctcatcagcgaccacgacagtgcgctggcgaagaaggattccgacctcgccaagaaggacgccgagatcgacggtctgaaggccaaggtcctcaacgacgccgccatcgacaagctggtgaccgagcgtgccgacctgctggccctggctgtccagatcgccgacggcgactacaccggcaagtccccggcagagatccgcaaggccgtggtcgtggccaagctgggcgacgctgccatcgccggcaagaccgaggcctacatcgatgcccgcttcgacctgctggtcgaggacgccaatgtagatccggtgcgccgcgccctgggcgatcgcaagaccaccaccgccccgaatgacaacggtcagtcggcctacgaagcgcgtctcaacgacgcctggaaaggaggtgccaaataa

SEQ ID NO: 353490 - DNA, 888 bp, Pseudomonas aeruginosa
atgaaaccagttgaaaaagctaaagctgagaaaactgtagcgcgcatagagtctgggcagttcgatgaaactgatgtcgaatctttgctgattaggcttcgcgcttattgcggtaataagtacatattcagagaggcggctgactttgttgcgcataatgatgtgagaaataagggggttatcagtgcgcatcttgatgcgttttatttgcagttaaaattctttggtgagtttagttatcaacagaagccggtagatctgtacggagatatgccgaaatacttgattcgcctgcttaagtatcaagttgggttgctgtctgacgaagaggtgaagggaaggaatacgacgcgcgagaggatgaactctcagattgataattccctagtttcagcggttgacgcgtgtcggttgaggggaggaaaaataaaaaaaaatcgcattgagttgctaagttatttgcttggcgcgattcgggttaagcccgcgttcagtcctgagcagttgttgggcgatctggtggccgtcttaaaacagaacaaaattgctttctccgagagccattttatgtcccgcggcgagatgattgttctgtgctttatgcttctggtgcacaaaacagagtttgaggtttctgataagagagtggtttattgcacgcttggcatcggggatggcaaggataatggtaaggagggcgagttacttgtgctgggtgtagtgcgcgtggcgattaaggatcgcgaggttaatacggtgttctgtgtttttagaagtggacttctggcagtcgattactgtcatcccgaggttgtggcggggagtgctggcgtcatcgaggaacaccttactatcaatgacgggcagctatgtttgattaaggtttga

SEQ ID NO: 353491 - DNA, 966 bp, Pseudomonas aeruginosa
atgagcaagtttgagcttaggttgcgtctttgtcgggagctcttgttgacagataaagaagtggcgaggcttatttctcgggcgccttatacgtataaggtatattccataccgaagaaaaatggcggcagacgtgtagttgctcaaccagcaagggagacaaaaattctccagaacttcttgatagagaatgtttttaaagaacttccggttcatgagtgcgctactgcttataaggctggttctagtattgcaataaatgcatcggcacatgtagggaattcatatatatctaagtttgatttttctaactttttcccgtctataactatgcttgatctagttaggcatataaagagtttctttgatggcaggttggatgatttagagattattgatattgcaagagtatgctgtattaaagatagggtaactgataggtttcatttgagtattggcgcgccgagttcaccgattctgtctaactctattatgtacttctttgacgttgcggtgcataagtggagttctgaaaggggggtttcttatacgcgatacgcggatgatatgactttttctactaacgaaaagtcaatgtctcgagaaatagagttgttcttagtgagacaggtcgaggcaatgaaatctcctcgtctttcgataaaccatgaaaagacaatacatctgtctaagagaaatcagaggaaggttacaggtttagtgcttagttcggaggggaaggtttctctcggaaggaataggaaaagggagatcagttcattaatacatcggtttgcgttaggtcagcttgatccgacagatgtttttaggctgcaaggtctattgggttttgcaaatgatgctgaacctgattttgttgttagaatgagaaagaagtatggggatttggtcattgcggctctttttgagaagagaaaagcaccctcggttatttcggacggttga

SEQ ID NO: 353492 - DNA, 939 bp, Pseudomonas aeruginosa; identical to SEQ ID NO: 347254

SEQ ID NO: 353493 - DNA, 1110 bp, Pseudomonas aeruginosa
atgggagagccctacttcaagattcggcacaagcttcagcgcttgggtattcgcgcgttctccagcaactacgcgctgtacggcgacatgagtcagcgggtcatgactctccttgaggagatggcacccgccgtcgaggtgtacagcatcgacgaatgcttcgctgacctgaccggggtacctggtgacctggtgcgcgttgggcgcgagatgcgcgctcgggtactgcgctgcacgggcatccccgtaggcgtcggtatcggcacttcgaagacgcttgcgaagctggccaaccacggcgcgaagaaatggcaggctcagactgggggcgtgttggatattcgagatccggcgcgccgtgatcgattgctgcaggcctgcgaggttggcgatgtatggggcatcggccgacggatgaccgagcacctaagcatgatgggcatccgcacggcttgggatcttgcacaggccgacgcctggaccttgagaacgaaattcaacgtcgtcatcgagaagacggcgcgagagctgcgcggcactccctgcctggagctcgaggacgctgctccgccgaaacaggagatctgctgcagccggatgttcggcaagcggctgtatgacctcccgccgatccgtgaggcggtggccacctacgctgctcgggcctgcgagaagctgcgtgcccagggctccgtgtgcaaacgggtccaggtcagtatccgtactggcatgttcaatccagacgagcccaagttcgccaagggcgtcagtatggagctgccgtatccgaccgatgacacacgactcatcaccaaggcggcgtgcgagggactggaactcctctatcggccaggcttcgccttcagcaaagcagaggtcttgctgctggatctccgtcggccaggtgagttcactggtgacctattcgctgaggttcagtcggaacgtgcgaccaaggcaatggcggtgatggatgccatcaatgcacgctgggggcggggtactgttcggccaggcggtgtgcccgcggcgccagagtggggcatgcggcgcgagctaatgagtcagagcttcacgaccaaagttgaacagttatggcaggtgttttaa

SEQ ID NO: 353494 - DNA, 936 bp, Pseudomonas aeruginosa
atgaaagaagatatcttggcactggatgatgtgccgaccattgctgatatttccgccattacaagcaggccaaactaccaagcctcgctgtatttccacccaaaacatattggacgacacttcggaagtattgtagcgccttaccacttaacaggcgccaaaataaaatgcggaatcagcgactgcggtagtccccattggcatgggtacttgatcacaacgagcgatgggctagagacaaacatcggaaaggattgtggcgcaaaacacttcaaagctgacttcaccaccgaaatgcgccgacatgatgaactatatgagagacgcctcaaaatcggaagaatactctcactgaaaaaagaagcgtcatccatattaatggagctacaagcactccaagcagagtacaacttcctgaagtcactgagatttaagttacgcggcgcactatctgccacggacaatcagaagctcatatataaactaaagacgggcgatcataacctatatcgctacgtggtgagaacaaaggcagaaagagatgcatatctagaagccaatcctgcagctaaaaagactggagtagttccacccaaagagataaagattggtgaaatttctggattccagtttcttggggcaacttataaagacgaagaaatatttaactacatcagccctttgaagaatcttgagcagaccaaagaacaagaaattatagaatggaagaggggtgaaattaacaaaactcactcatggttcaaggacgccaaaaaaattgaaacgattcgcagcttaattgaattcggaacgcagttttttactgaagaaaacataaatggacttacacacatcggaatctccgaagcctctctttcttctgcaataactgagatcagaagactcatggcatcttccggaagaagacttatgtag

SEQ ID NO: 353495 - DNA, 330 bp, Pseudomonas aeruginosa
atggagaggaacacccaaggtaaaggacagatctcaccggtggagaaggtgcgtttccgagtatcagcgatggtcggaaacccgcgggctcaggcggagcgccgggcatcaatctggaaggcgcaggaggactcggaagaggcctggcagcaggtgctggaggagttggccgaaaccggtggactcgagatgtcggtaggggaggatggagtggttacgctcacctgggaggcgcctgatgagtgggggcttgaccttatcgatggtattgaattggttcagaaaccggatatggcggctcagtacctgcatgaggaggtgctgttctag

SEQ ID NO: 353496 - DNA, 1335 bp, Pseudomonas aeruginosa
ttgcgacatgggcggagaacagtcatgggtcaattcccgaaatccgttcagccctccaccatcgccggtatcaagcgccgggccaaagcaattcgcaaacagcaacagtgcccctatttggtagcgcttgacgttgcatctcagaatgcaggcttcgaaaactaccaccacgccaggcgagccattgcgcggggggaaacctctaccgccttaccaaacacctgcagcctctacttgtccgcctattggcgtgatcaatccatcacgccctcaaaggaagggcgcgagaccctcaagatcgaactccccaggcctttaacggcctttctcaagaagcatcaggtcggtcgcggtcgcaacctgaccggcttctttctggagtccgcggaccaccttgaagcacgttccaacttcagctctcagtcagcggcgcgagaacagatccagcggacagccctgactctacagttcatcgaagccactggcttgagccctgccacgaatcaacgtcagcgcgccccaatggagcctctccacaagcttccgaatgtcgaccatgaatcgaagtgggtagccgggtcaggcgactggattcacctcgacgaaccctatcatcatgcttgggaacaacccgagttgggctaccgcgaggactgggttacgaaacaggggctgtacggggtctggccgaagtgggatggactgtacttcccaggtcacagccgcccctacctggccgctgccaaccaggctttactcgaccaggtggtacatatcgtggagtcgcttccagccctgatgccgggcgatttgcaggaatggccttggattactggcagctactggtcgctgttcgtcagccctgggagaaaagcatctggactcaagcggaaaccccgagctggtaccacatacggctggagcaagaacgcaacgccgtaccatagcaggatcggattcggcaccttgtggcgacctgacggagttatgcttttggacaaccacgaagcagtaggcagtgagctgaagctcctgtgctcgacctcaattcattgggccgcgcgtatcaggatcaacgggatcagatctgaacttgaaaactggctgtatgcggaacttcgacagcaagaagctaccgcttctagagaagtcgacgacttctactatggaggcgaagcgcgtagcgactaccagagcgagaaagacaagctctcagcgatagatcgtgtacgtgcgatcctggccgcctcctaccccgactgcaaaccgctgcgcgatctactcaagagcctggacgcagcacgcgacttagctgctggaaaaatgaccaagtag

SEQ ID NO: 353497 - DNA, 1920 bp, Pseudomonas aeruginosa
atgcaccttgtaatcattgaagccccgggcaagctgaaaaagctgcggtcccttcttccctccattcgtcccgacgtgacctggcaggtcgaggcgacagccggccacatcagagaccttcccgttcacggccaggatccgcagatgctcaccgtcggcgtgggccaggatttcaaaccgcactaccagatcctctcgggcaaggaaaaaaccgtcgcacggctgaaggatctgcagcagaaagctctggagatctacgtcgcatccgacccggatcgggaaggcgaaagcatcggctggcacatactccaggctgccgggatcaagaactacaagcgcgttgccttcaaagagatcaccaagtcatgcatcagcgccgaactcagctcgccgcgtcgcctggacctcccgaaggtcgcctcgcaggaatgccgtcgcgtcatcgatcgcctggtggggtatctggtcacgccagagttgcggcgcgtgatgggcaggccaaccaccgccgggcgcgtgcagtccgtcgctgtgtacctggtggtcctgcgagagcgggagattcgcgccttcacaccaatcaagcatttcggggtggaactggccttcgtttcgcccagcgacggccgcacctggaaggcggagtgggatccagtgcccacgtttgccagcaaggaatttccgtatatccaggatcgtcaactcgcagaactggtgggggctatacgcaatgtgatcgtcgagacctgcattgatggcgaagaaaccgatatgcctccggcgccgttcatctcctcttcgctccagatggcagccggaaatgcactgaagtggtcacccgacaagacgatgaaagtcgcccagcggctgtatgaacaggggctcatcacttaccaccgaacggacaaccccaatatttcgaaggactcgatgccggatatccgtgctgtcgccaaagccttggggctgaagtgtgtagagcaacagcgaatgttcaaagcggaccaagacgcccaggaaggccaccccgccatcacccctaccgactggatggccgcttccgccggtgagactgctgatgagcaggcgctgtaccagctcattcgagtccgcgcgcttgccagccagatcgaagctgccgtgtacgccgtgagaaccatcaccctccttggcgtcggccccgacaaaaagccgctgcgcttcggcgccaaagggaagctgctgaacgtgcctggctggagaaaactgctgcagggcgatgatgccgaggagcaaaagaacgaaacgccttcaagccccatcccggcgctggagccaggccagatactcaaggtctacagcggcgaggtcctggagaagaaaaccacccctcccaaacgcttcaccgatgccagcctggtgggcgagatgaagcgccgcgggattggtcggccatcctcctacgcctcgatcgtgaagaacatcatcgacaaaggccaggtgcagatgaaggggcgaagcctggtccccggcgagctgggcgaggccaccatcgcgctcctggagcacaacttcagcttcctcagcctcgatttcacccgcaacctcgaggtcgccttggaccggatcgccaacagcgaggacacctacatgaacgtggtccagcagttctaccagctcctgcagtcagagctgcagacgctgcgcgcgcatcccagcgcacagggcgacccgcgagcaagctctaccgccagcgctcccacggcgccggccagtgacttcctctgcggcaagtgcggtctgcccctggtccaccgcaagaaagccggcaagggcggcttcgacttctggggttgcagcggctaccgcactaccggctgcaaggtcagctaccccaccaaaaaaggccaacctgacgtcgatagcccccgtggtctctag

SEQ ID NO: 353498 - DNA, 249 bp, Pseudomonas aeruginosa; identical to SEQ ID NO: 330535

SEQ ID NO: 353499 - DNA, 534 bp, Pseudomonas aeruginosa
atgcgaactgagccgatcggcatggccgtggccgtgctcttcctcctcgcgtccggccaggcctgcgccggcaccgttggcgaacttgcggagatccaggcccaggccatcctcaccgaggccaaggtgcgtctggccacggcgcagcggcaattggaaggcaaaggcgaaaccggccaggtcgtcagcgcccaggggcagacgttcgccatgccggtgccggcggcgccgccgacgatcacgcagccggttccgccagtggtgcggaccatctacggcgccggaggcaagatgactgccacgttcttgttcccgggcgggtacgaggttgacgccgccagcggcgcggagctgccgggcaactaccgcgtcgagtccatctcgctggaccaggtcgtgctcaccgacaaggacggcaaccgcgtgcccgtgggcttctccagcgttgccccctcccaagcctcctctacggcccaaggcgcctcggttccgccagcgctgcccggggctgtaccgcagccgttcattcagtag

SEQ ID NO: 353500 - DNA, 768 bp, Pseudomonas aeruginosa
ttgaatcagcgcgacgccgccctggccagggtcgcctcgcttgagtccaagctggaggagctggagaagctggaaccggcagccccgagtgaccccaagctcaagccctgcccgctctgcggcagcacgaacattcgaatgctggaacccgagctgctcgacaccaatgcctggaactgtgccattgaatgcctggactgccaggtttacatcgggccgtcctactgcgagccagacacagtaacagcgaggtattcagcacaggtcgactggaacaggcgcccaagcgcaaaaaaccacgcggacgagcgtgagcagttcttgatggccaacctgctcgccgccctggaggtcgcactgggcgacgtagcagccctggctattgtcgaccgggtaaggcaggtcgcagaccgaatttaccccacctcgagcctatcccctgttccccaagcatggctcgatgtccaagccgagcgccgccggcagatcgaggccgaaggctggacgccagagcacgacgacgagcacagccacggccagatggcccgagccgccgcctgctacgccctggccggatccagcgctccgaacgatggaaccgccgccctgctggtgtcgctggcatggccttgggatgagcagtggtggaagccaaccaccgtgcgacgagatctggtcaaggcctgcgccctggcgctggctgagatcgagcgcctggaccgcaccgcgcccgtgcagggctcaacctgctgcaagggggacgcgtaa

SEQ ID NO: 353501 - DNA, 225 bp, Pseudomonas aeruginosa; identical to SEQ ID NO: 340271

SEQ ID NO: 353502 - DNA, 159 bp, Pseudomonas aeruginosa; identical to SEQ ID NO: 326423

SEQ ID NO: 353503 - DNA, 1119 bp, Pseudomonas aeruginosa; identical to SEQ ID NO: 327829

SEQ ID NO: 353504 - DNA, 825 bp, Pseudomonas aeruginosa
atgcatatactgttagaagtatctatgcgatcttttcgcgcaatctgctttcggatgagaataaaaaagagttcttctataagatataccttccccaggtgggtgagggagcggaaagcgaagatgagcaggaggagttttataaggaagttctccaaagaggtaaagattgatcctgctaacaagccagatgcagaccgttatacggtaattgtggagggcacgaagcgagaggttcttgctacatgggcacaagctttcgtgcgtttggctgcggatcgggccgtgcatgaggttattgatagtgcaggtagagatttccaggtaagaaatgctgcaatgcagagccgcataaccgtgctgcagaatatggcgaagggccgtcgtgatgatagaattgcacgtttgaaggaggcattgctgattgcggagtcgctcaagatagatggcccgccattaatagaaggggcgtccgagcaacaactctcctcgatcatggatggtgacttgatgtacatgcgaggagctaaggcgctgcgcgctgaaatcaacaatcttgagtcgcgtagtgtagatgctccattcattcctgagttgagaactctccaagagaaactatcttggaactccagtttgtctgtggattctgatgcggtggctgtctacaaggaagacgagggactctctttttcaaatcaacccattaagccgaagaagattcttatagttactataggtactttggcaggattgataattggaattctactcgcagtgctcgctggttttataaggaagcttcgtagcgatggctctcttcgctaa

SEQ ID NO: 353505 - DNA, 381 bp, Pseudomonas aeruginosa
atgaccgaccactcagagctgcggaggctggctaaggcggccgaattcggcggcggtgctcatgaggatatcgagttctccaaccagctggatttccatgccgcatgtacacccgccgcaatcctcgccctgctggacgagatcgacaggctgagcgacgaactatccgcatgcaccgagcatccgggcggatgtgggtattggcgcgaggccgccaagcgtagagccgaagaacgcgaccggctgagggcgcagaacgaggcgctgcggggagcgctacaggcagtagtggatgatccaacctggcgcagcaacgacaacaccctgtggccgaagatcatcaaagcaatgaaccagccaggcgccactagctctccctga

SEQ ID NO: 353506 - DNA, 741 bp, Pseudomonas aeruginosa
atgagcaagttatctgtattctttatatttttgttttgcagcattgctaccgcagcagagtctttgccagatttaaaaattgaaaagcttgatgaaggcgtttatgttcatacttcgtttgaagaagttaacgggtggggcgttgttcctaaacatggtttggtggttcttgtaaatgctgaggcttacctaattgacactccatttacggctaaagatactgaaaagttagtcacttggtttgtggagcgtggctataaaataaaaggcagcatttcctctcattttcatagcgacagcacgggcggaatagagtggcttaattctcgatctatccccacgtatgcatctgaattaacaaatgaactgcttaaaaaagacggtaaggttcaagccacaaattcatttagcggagttaactattggctagttaaaaataaaattgaagttttttatccaggcccgggacacactccagataacgtagtggtttggttgcctgaaaggaaaatattattcggtggttgttttattaaaccgtacggtttaggcaatttgggtgacgcaaatatagaagcttggccaaagtccgccaaattattaaagtccaaatatggtaaggcaaaactggttgttccaagtcacagtgaagttggagacgcatcactcttgaaacttacattagagcaggcggttaaagggttaaacgaaagtaaaaaaccatcaaaaccaagcaactaa

SEQ ID NO: 353507 - DNA, 273 bp, Pseudomonas aeruginosa
atggcaacgcgaaacgtcgtccttcccgatccgctggagcaggatatcaacgagctggtggagaccggccgctatcagaatcgcagcgaagtcatccgggcaggattgcgcctgctgctgcaacaggaagcccagaatagcgccaagctcgaagccctccgcaacgcaacatccagtgggctgatgcaactggagcgcggcgagtacgacgagatcaccagagacgacctggcccactacctcgacgagctcggccaccaggcgagccactga

SEQ ID NO: 353508 - DNA, 273 bp, Pseudomonas aeruginosa; identical to SEQ ID NO: 326662

SEQ ID NO: 353509 - DNA, 633 bp, Pseudomonas aeruginosa
atgctggaacccgagctgctcgacaccaatgcctggaactgtgccattgaatgcctggactgccaggtttacatcgggccgtcctactgcgagccagacacagtaacagcgaggtattcagcacaggtcgactggaacaggcgcccaagcgcaaaaaaccacgcggacgagcgtgagcagttcttgatggccaacctgctcgccgccctggaggtcgcactgggcgacgtaacagccctggctattgtcgaccgggtaagacaggtcgcagaccgaatccaccccacctcgagcctatcccctgttccccaagcatggctcgatgtgcaagcagagcgccggcgccagatcaccgtcgaaggtttcgataccagcaaagacgacgcaagcggtggccagatcgcccaggcggccggctgctacgcgctccatgccggcggcatcggcaccgactggccgggcggcattcggaatggttctgccctgttctggccctggaacgaagagtggtggaagcctaagtcggcgcgcgagaacctggtacgcgccggcgccctagtgctggccgagatcgagcgcctggaccgctccgccaccgagcagggctcaacctgctgcaaggggggcgcgtaa

SEQ ID NO: 353510 - DNA, 609 bp, Pseudomonas aeruginosa
gtggaggcctccagcgagctcggcgagtcggttgtacagcgagtccagttcgggcagcaacttgcccttggggacccgccagtagcggtgcaacggatgctcccgggcgctgatgaagaagccggacagttccagcagcgcgcggttgctgcctgcgatgtaggggatcttcaagccgaagtcgtagccgtcgaagatagcccgctgcagaagcgtcgaaggagtcgcggaggtacggttgaccagacgtggacggctcatcggttttccaaccgagtgagcagccacttcgccgtggcttcggcgaggcccgccttccagcgaccatcggcgaagcgcgtcatgtggacggtcatgtcgggccagttcaggttcgtcgctatggctccagagcgaatccgttccatgaaccagcggtatgcttggccggcaggggagtcggacggcacgggggcattatcgaattcgcgcaattgcaccgtggaaaggtgctgtggattccagggcctacctagaggctcgccatgctcacgcctgagctccaattcggcagaggccagtggacgaccagcctcacgtactgagagcagtcggcagtctcctcggtag

SEQ ID NO: 353511 - DNA, 933 bp, Pseudomonas aeruginosa
atgattgcggaccagctgcagggcattctcgatgacgccgataacggtgcggtgaatgaaagtgcggtgaggaaggtccgccgggagggactttttcaccagcgtctgcgggcccagtccttgaagtttccgtgtctcgcccttgtaggagaggatgatgttggccacgtgcgcaatcgcggggccgaaccgccagctctgggtcaggtagtgctcctcggcgccgaccatccagtcgctgttcagggcatcttccgcgcctctgaaccggtagagctgctggtggggatcgccgacgatagccattctgatgcgctgccagtgggcaatgtccgcgatcactgggttgatgtcctgtccctcgtccaggaacatgcagtcgaagcgctggctcaaatcgggcttgctcagttgatacagcttcaggtagccgtcatggggcatcagcatgccggtgtcctggagatctaccatgcgcctccagactactcgcgccatgtccaggccctgcttgaggaagcgttcctgggcactggtgaggaacgccttgtcgcggaagcgcgggaagtgcggtcggccgagttccgcgtcggcgctggccatgtagttgttcagcgtggccagcacgtcacgtaccaactcccagtcttgggtatcgagtccgcgggcgatatcggtcagacgcaggttcttcgtcttcttgtgggcgtactggatgccgtacaccgcatgagccaggctgtgggcggtcttgcagactacgttgcggggaaacttgcccttcgcggctttctccaccgagctgttgtagcagagatagaggattctcagggtagggttcgccttggcaaagcccaccagggtggtcgtcttgccagtgccggcgaaggcccgcaccaggatcttcgatgccttcgactggatgatcggtga

SEQ ID NO: 353512 - DNA, 576 bp, Pseudomonas aeruginosa
  misc_feature (564)..(564): n is a, c, g, or t
atgaccgtagaccgcatcggcgaacgcctgcgtcgctatcgccgcgccgccaagaagaccctgcaccaagtcgccagcgaatccggtctcaccgcgagcttcctctcccaggcggagcgcaacctcaccggtgtatcgatctcttccctggccaacatcgccaagtcgctgaatatcccgctcaatgccctgttcgaccaaccggcacaaccccagcccgactcccacgaaggcgagcgggtacgctacaccatcgagggccagccgctggcctacgaacgcctgtccagctccttccccggcaacctgatcaatgcggtcaagatgaacatgccggtgggctaccagtcggagctgatctcccatgagggcgccgagttctcctacgtcctgtccgggcagatcgtctacaccatcgaggggcgccagtaccccctcggcgccggcgactcggtgcacttcgacgcgaccaagacccattgcctggccaacgtcggcagcgatgtggcggaagtcctgaccatcaccaccatgggcctgttcgacgaccatccgacgccctgngccagtccgtag

SEQ ID NO: 353513 - DNA, 351 bp, Pseudomonas aeruginosa; identical to SEQ ID NO: 324421

SEQ ID NO: 353514 - DNA, 276 bp, Pseudomonas aeruginosa; identical to SEQ ID NO: 324419

SEQ ID NO: 353515 - DNA, 363 bp, Pseudomonas aeruginosa
atgggatggcttttctcacatcagacgaaggaagacctgctgcgtgagctgctggccccaaccagtactttcgcaggcagcaccgaggtgctggcacacgcagtctccggcaatgaactttggactgtcgtaaaacgaaccttccaccttgccggattctatttcggcaagccggccggtcactcgatcaccatgatcgagctgcacttgctggactgctcggccgggcaatggggctacaagaccattccggagaaagcagggccgttctactacggctgtccgctggagttcctggacctggctcacgatgagaccaaccaggagtggcgagaccgtctgacgcaagaacaccaagcctga

SEQ ID NO: 353516 - DNA, 264 bp, Pseudomonas aeruginosa
  misc_feature (252)..(252): n is a, c, g, or t
atgacctcccggccgacgttcgaaatgcagaccagcggagactccaaagcccagttcccgagctacgacatccagctgttcgaccagaaggtacgcctgcgcagcggcgagaccttggtgctctccggcttcgaccagaccaccgaggataccaacaaggtcggcaccggcgacgccggattcttcggccttggcggcgggctgacccgcaataccaaacgcgaggtcatcgtggtgctgatcacccccgtngtgctgggctga

SEQ ID NO: 353517 - DNA, 240 bp, Pseudomonas aeruginosa
atgaactactccagcctctccacctacgacctgctgaagcaccgcagccaccacgtcgacagcctgacccgcctgcgccgcgcccagccacagtgggacgaggacgatgctcgacgcggggaaatcacgatggccgatatcagcgaccagatccgcgagatcgatgaccaccttcgtccgagcggctgggagtcagtcgacctcgactactccggcgacaccgcaccgatgtgcatgtga

SEQ ID NO: 353518 - DNA, 627 bp, Pseudomonas aeruginosa
atgcatacccaacacatcattctcgcagccaccacgcttgccgcggtgctgatcctgatcaccaccgcctaccttgccgggcgcaaggacagaaagaacgcgcaacagcagtcggtcgacgaggcactctatctctgccgcgtctcgcacggccaggaactgactgcgctgcataccgacctgatcaagctgcgcaccaatgcccagcgcctgcaacaggtcatagatgagcaggaggaagagatcagcgaccagaaggagcttcgtcaaagcatcgaagccgaggccaccgagaaacttgcgaattggcagcagcgccacgaagagcaacaagcggaactgaagcgcctggagacggagctggagacaagcatcgcgaccaatcatcggcaggctgagaccgcgaagctcctccgcgagcagaacttggccgccgaagaactggacgccatccgcaccgccagtcgcctcctcagcggccacgctcgacagttccaaaagaccggcaccaccaagcgcaacgcagacgccgaagcccaacagcagctcgccgcgatcctccagcggctcgccatcacggaactggccagccagagcgcagaagctgaagcgcaggaggcggcatga

SEQ ID NO: 353519 - DNA, 201 bp, Pseudomonas aeruginosa
atgaatcatcagcaagcgataggccccttatctgttggggttgaggagggcgcccgattgatcggtgtcgctcgatcaatgttctacgagattctcgctcgtggggaggttgagagtttcaagcttggtcggcgccggctggtgctggtcagggatctggaagcattcatcaatcgccaggctagggagaactctaggtga

SEQ ID NO: 353520 - DNA, 1137 bp, Pseudomonas aeruginosa
atgttcattgattggttaagcgttactcaggagtttccgtacgaccttccggtcgtgagtgacgtattccgcatgactgtcgatgccttgactggtgagcatctggcgacaagccagccgcgcataactcacgaaggcagctactccacaacggtttctatcagtgtccaggggcgcaagctcacggttgagggcaacccatcccggatcaatcgccgggacaatctttggggttacacccgcatcgagcagtgcatcgctgtttacaaccggttgcttgcggagcgtggccttccgagcttcacacgctgccgtgaaattttcttgcgtgacggtgcgtcgggcgcgaagccgggtgattgggtggctgatggtgcggtgatcaccatgattcacctgactagcaatgtcggggtagggaaggggaatcagctcgattatttgcgcggtctttccagtgttcgttatggccggttgatcccgtttctcttcccgaacggtcggactgtgagttggacgacaaagggggccgacaagggtgcgcggctccgttacttcaaggtctatgacaaggcctttgagcttgaacagcacctgttgcctcggatgcgtcaggagttcggccctgaatccgaagagtgccgctatgccgaacaactgcgtgactactgcctggaacatggcgtggtgcgctttgagcaagagctaaagagcgaatttcttgcccgcctgaacctccgctattggggccttttcgatgaacgccggtttgagccgctgcatgacgaattcctggccctggattcccgcttaaaggtgactgctatggacctcgcttcgatctccgatcagttgttgttggaaaaggttgtggacactccgaaggccgcccggacgactgcttcttatgctctggagtgggcaactggtggcaagttcgattttcataagcgccaggtgaaagaacatgctgcgcgtttgaatcggatcggcattgatatccgccagccatttgatgtgacccgtaactcgctggtcttcgttcgtgaggctcgcgaggtggttaagactttcgatctgatcgcgccgagctggtaccggaagcctgtcggtcatctgcaattggtggcggcatga

SEQ ID NO: 353521 - DNA, 294 bp, Pseudomonas aeruginosa; identical to SEQ ID NO: 353267

SEQ ID NO: 353522 - DNA, 237 bp, Pseudomonas aeruginosa; identical to SEQ ID NO: 340152

SEQ ID NO: 353523 - DNA, 207 bp, Pseudomonas aeruginosa; identical to SEQ ID NO: 328919

SEQ ID NO: 353524 - DNA, 309 bp, Pseudomonas aeruginosa; identical to SEQ ID NO: 327654

SEQ ID NO: 353525 - DNA, 225 bp, Pseudomonas aeruginosa
atgctgacgcctgacgcctccaaccacaatccagacccgcgctacctgcgcgggctgctcaagaaagccggcatcagccagcggcgcgcagccgagctgctcggcctcggtgatagggtcatgcgctattacctgagcgaggacatcaaggagggctaccgccccgcgccgtataccgtccagttcgccctggagtgcctggcgaacgacccgccatctgcgtga

SEQ ID NO: 353526 - DNA, 210 bp, Pseudomonas aeruginosa
atggctgatatcgcggatcacgccaatgacctggtgctcgaacgcatggaggcggcactggctgcccgtgcgctggtcgcggttggcgaatcggctcatgagtgcgagtgctgcggtgagccgattccgccgcgccgccgcgaagctgtgccggggtgccaaacctgcatcgaatgccagtccttcaacgagcggagggggcgccggtga

SEQ ID NO: 353527 - DNA, 186 bp, Pseudomonas aeruginosa
atggccgccgcaaagtcgaagtacatcgtcattagcggttgcgtgcaggacgggcgcgatatctatcggaagggcgatccctacgaaccggccagcgcggagctgcgggaggagttgctggctgcgggcgttatcggcctggccaaggaccacgcccaagcgcagagcggcgaggacggcgaatag

SEQ ID NO: 353528 - DNA, 186 bp, Pseudomonas aeruginosa; identical to SEQ ID NO: 328098

SEQ ID NO: 353529 - DNA, 1113 bp, Pseudomonas aeruginosa
atgatcaagtcccgtgccgccgtcgccttcgcccccaacaagccgttggaaatcgtcgaggtggatgtggcgccgccgcagaagggcgaggtactggtgcgcatcgtcgccaccggcgtctgccataccgacgcgtacaccctgtccggccaggattccgagggggtgttcccgtgcatcctgggccacgaaggtggcggtatcgtcgaagcggtgggcgagggcgtgacctccctgcaggtgggcgaccatgtcatcccgctctacaccgccgagtgcggcaagtgcaaattctgcctgtccggcaagaccaacctctgccaggccgtgcgcgccacccagggcaagggcctgatgcccgacggcaccagccgtttctcctacaagggcgagccggtcttccactacatgggctgctcgaccttctccgaatacaccgtgctgccggaaatttccctggcgaagattcccaaggatgccccgctggagaaggtctgcctgcttggctgcggcgtcaccaccgggatcggtgccgtgctgaacaccgccaaggtggaagagggcgctaccgttgccatcttcggcctgggcggcatcggcctggcagcgatcatcggggcgaagatggccaaggccgcgcgcatcatcgcggtcgacatcaacccgggcaagttcgatatcgccagggaactgggcgccaccgacttcatcaatccgaaggactacgacaagccgatccaggacgtcatcgtcgaactgaccgatggcggcgtcgactactccttcgagtgcgtcggcaacgtgcagttgatgcgcgccgcgctggaatgctgccacaagggctggggcgagtcggtgatcatcggtgtcgccggtgccggccaggaaatcagcacccggccgttccaactggtcaccggccgcgtctggcgcggttcggcgttcggcggggtgcgcgggcgcagcgagctgccgagctatgtcgagaaggcgcagaagggcgagatcccgctggataccttcatcacccacaccatggggctggaggacatcaacgaggccttcgagctgatgcacgaaggcaagagcatccgcaccgtcattcattactga

SEQ ID NO: 353530 - DNA, 225 bp, Pseudomonas aeruginosa
gtgaacaagaacgccgtgccgaacgatccgcagagcccgttcgtcacctccggcatccgcatcggcaccccggccatcaccacccgcgggctgcaggaagcgcagagccgcgaactggccggctggatctgcgacatcctcgaccacctcggcgatgccgacgtggaagccaaggtcgccacccaggtcgccggtctctgcgcggacttcccggtctatcgctga

SEQ ID NO: 353531 - DNA, 1251 bp, Pseudomonas aeruginosa
atgcaacgctactccggcttcggcctgttaaagcattcactgagccatcacgagaactggcaacgcatgtggcgcacgcccacgccgaagccggtctacgacgtggtcatcgtcggcggcggcgggcacggcctggccaccgcctactacctggccaaggaacacggcatcagcaacgtggcggtagtcgagaaaggttggctgggcggcggcaacaccgcgcgcaacaccaccatcgtgcgctccaactacctgtgggacgagtccgcgctgctctacgaacacgcgatgaagctgtgggagggcctgtcccaggacctcaactacaacgtgatgttctcccagcgcggggtctacaacctctgccacaccctccaggacatgcgcgacggcgagcgccgggtcagcgccaaccgcctcaacggcgtcgacggcgaattgttgaacgcgcagcaggtggcggaggagattccctacctggactgcagcaagaacacccgctacccgatcatgggcgcgaccatccagcgtcgcggcggcgtcgcccgccatgacgcggtggcctggggcttcgcccgtgccgccgatgccctcggcgtggacctgatccagcagaccgaagtcaccggcttccgcaagcaggacggcgcggtgatcggcgtcgagaccaaccgcggcttcatcggcgcgcgccgtgtcggagtggtcaccgccggcaactccgggcacatggccaggctcgccggcttccgcctgccgctggagtcgcacccgttgcaggcgctggtctccgagccgctgaagccgatcatcgacagcgtgatcatgtccaacgccgtgcatggctacatcagccagtcggacaagggcgacctggtcatcggcgccggcatcgacggctacaacggctacggccagcgcggctcttacccggtgatcgagcacaccctgcaagccatcgtcgagatgttcccggtgctctcgcgggtacgcatgaaccgccagtggggcggcatcgtcgacaccaccccggacgcctgcccgatcatcggcaagactccggtgcagaacctgttcttcaactgcggctggggcaccggcggcttcaaggccactcccggctccggaaacgtcttcgccgccaccctggccaagggcgaaccgcatccgctggccgcgcccttctccatcgaacgcttccacagcggtgcgctgatcgacgagcacggcgcggcggcagtggcgcactga

SEQ ID NO: 353532 - DNA, 321 bp, Pseudomonas aeruginosa
atgctgaatatcttctgcccccactgcggcgaactgcgttccgaagaggaattccacgccaagggtcaggcccacatcccgcgcccgctcgacccgaacgcctgcagcgacgaggaatggggcgactacatgttcttccgcgacaacccgcgcggcctccatcacgagctgtgggtgcacgccgccggctgccgcaagtacttcaacgtcacccgccatacggtgacctacgagatcctcgagacctacctgatcggcgagcagcccagcgtcgtcgccgacggtgagaagaaacccgccgtacaaggggaaccggcatga

SEQ ID NO: 353533 - DNA, 3018 bp, Pseudomonas aeruginosa
atgagccagatcaatcgcctgtccagcggcggccgcatcgaccgcaaccgcccgctgaccttcagcttcaacggccagcactaccagggctatgccggcgacaccctggccgccgcgctgctggccaacggcgtcgacatcgtcggccgcagcttcaagtactcgcgggcgcgcggcatcgtcgccgccggcgccgaggagcccaacgcgatcctgcagatcggctcccgcgaagccacccagatccccaacgtacgcgccacccagcaggccctctacggcggcctggtggccaccagtaccaacggctggccgaacgtgcagaacgacctgatgggaatcttcggcaaggtcggcggcaagctgatgccgcctggtttctactacaagaccttcatgtacccgcagtcgatgtggatgacctacgagaagtacatccgcaaggccgccggcctgggccgcgcgccgaccgaggtcgatccggacagctacgactggatgaaccaccactgcgacgtgctggtggtcggcggcggcccggccggcctggccgccgccctcgccgccgctcgcagcggcgcgcgggtgattctcgccgacgagcaggaagagttcggcggcagcctgctggacacccgcgagaccctcgacggcaagcccgccgccgagtgggtcgcggacgccgtggccgagctgcaaggcctgccggaagtcatcctgctaccgcgctccacggtcaacggctaccacgaccacaacttcctcaccatccacgagcggcgcaccgaccacctcggcgaggtcgccccgctcggccaggtccgccagcgcgtgcaccgcgtacgcgccaagcgcgtggtactggccgccggcgcccatgagcggccgctggtctacggcaacaacgacctgcccggcaacatgctcgccggcgcggtttccacctatgtacggcgctacggcgtggcaccgggcaagaaactggtgctggccaccaacaacgactacgcctaccgcgtcgccctcgactggcaggaagccggcctgcaagtggtggccatcgccgacgcccgggccaatccgcgcggcgagtgggtcgaggaagcacgccaacgcggtatgcgggtgatcactggcagttcggtgatcgaggctcgcggcggcaagcgggtcagcggcgccaaggtcgcccggatcgacctgcaggccatgcgcgccagcggcggcgaatggctggactgcgacctgatcgccagctccggcggctacagcccggtcgtgcacctggcctcgcacctgggcggcaagccggaatggcgcgaggaaatcctcgccttcgtccccggcgaaggcctgcagaagcgcatctgcgccggcgccgtgaacggcgtgttcgggctcgccgaggtgctcgccgacggctaccaggccgggagtcgcgccgccctcgacgccggctacaagaccgccgccggcagcctgccgaaggtccagccgcgccgcgaggaagcgtcagtcgcgctgttccaggtgccccacgagaagcccacggcacgcgcaccgaagcagttcgtcgatccgcagaacgacgtcaccgccgccgccatcgaactggcctgccgcgagggcttcgagtccatcgagcacgtcaagcgctacaccgcgctgggcttcggcaccgaccagggcaagctgggcaacatcaacggcctggcgatcgccgcgcgggcccagggcaagagcatcgccgacaccggcaccaccatgttccgtccgaactacaccccggtgaccttcggcgccgtcgccggccgccactgcgggcacctgttcgaaccggtgcgcttcaccgccctgcacgcctggcacgtgaagaacggcgccgagttcgaagacgtcggccagtggaagcggccgtggtacttcccgcgccgcggcgaggacatgcacgccgccgtggcccgcgaatgccgcgcggtgcgcgaggcggtcggcctgctcgacgcctcgaccctgggcaagatcgacatccagggcccggacgcgcgggagttcctcaaccgggtctacaccaacgcctggaccaagctcgacgtcggcaaggcgcgctacggcctgatgtgcaaggaagacgggatggtcttcgacgacggcgtgaccgcctgcctggccgacaaccacttcgtcatgaccaccaccaccggcggcgccgcccgcgtactggagtggctggagctgtaccaccagaccgaatggccggagctgaaggtgtacttcacctcggtcaccgaccactacgcgaccctcaccctgtccggcccgaacagccgcaagctgctcgccgaagtcaccgacatcgacctggacaaggatgccttccccttcatgacctggaaggaaggcaaggtcgccggggtgccggcgcgggtgttccgcatctccttcaccggcgagctgagctacgaggtgaacgtccaggccgactacgccatgggcgtgctcgaagcgctcgccgagcacggcacgaagtacggcctgacgccctacggcaccgagaccatgcacgtcctgcgcgccgagaagggcttcatcatcgtcggccaggacaccgatgcctcggtcaccccggacgatctcaacatgggctgggcggtgggccgcagcaagccgttctcctggatcggctggcgcggcatgaaccgcgccgactgcctgcgcgaggatcgcaagcaactggtcggactcaggccgagcaacccgcaggaggtactgcccgaaggcgcgcaactggtgttcgacacccagcaggcgatcccgatgaagatggtcggccacgtcacctccagctacatgagcgccagcctcggccacggcttcgccctggcggtggtgaaaggcggcctcaagcgcatgggccagaaggtctacgcgccgctggcggacggccgcttcatcgaggcggagatctgctcctcggtgttctacgaccccaaaggggagcggcagaacgtggattga

SEQ ID NO: 353534 - DNA, 636 bp, Pseudomonas aeruginosa
atgagcaaggcaaacgtctaccagcaacgccccgaacccggcgtccacgccgaatcgccgctgcaccatgccgagctgcacaagctcgccggcaagaccgccgcgaaggccggtatcgtcctgcgcgagaagaagctgctaggccacctggtgctgcgcggcgatgccgccgacccggccttcgccgccgccgtgcaccaggccctcggcctggaactgccggtggccctgaccctggtcgccagcggcgagacctcgatgcaatggctggccccggacgaatggttgctgatcgtccccggcggcgaggaatacgccgtcgaacagcgcctgcgccaggccctgggcgaggagctgcactacgcggtggtcaacgtcagcggcgggcagacgctgctcgaactgagcggagcgaacgtccgcgaactgctgatgaaatccaccagctacgacgtgcatccgagcaacttcccggtgggcaaggcggtcggcagcatcttcgccaagtcgcaatgcgtgatccgccataccggcgaggacacctgggagctggtcgtgcgccgcagcttcgccgactacttctggctctggttgcaggacgccagcgccgaatacggcctgcaggtagcggcatga

SEQ ID NO: 353535 - DNA, 858 bp, Pseudomonas aeruginosa
atgagccgtacccccgacacctggatcctcaccgccgacagtcccagcctgctgggcaccgtcgacgtggtgacgcgctacctcttcgagcagcgctgctacgtcaccgagcaccactcgttcgacgaccgcctggcgcaacgcttcttcatccgcgtggagttccgcgccggcgacggcttcgacgaagcctccttccgcgccggactggccgaacgggtggcaccgttcggcatgcgtaccgagctgaccgcgccgggctaccgcagccaggtggcgatcatggtttccaaggccgaccactgcctgaacgacctgctctaccgccagcgcatcggccagttgccgatggacgtggtggcggtgatttccaatcacccggacctggagccgctggcgcgctggcacggcattccctaccaccacttcccgctcgacccgaacgacaagccggcccaggaagccagggtctggcaggtgctcgaagagagtggcgccgagctggtgatcctcgctcgctacatgcaggtgctgtcgccggaactgtgccggcgcctggacggctgggcgatcaacatccatcactccctgctgcccggcttcaagggcgccaagccgtaccaccaggcctaccagaagggcgtgaagctggtcggcgccaccgcccactacatcaacaacgacctcgacgaagggccgatcatcgcccagggcgtcgagacggtcgaccacgcccactaccccgaggacctgatcgccaagggccgcgacatcgagtgcctgaccctggcgcgggcggtgggctaccacatcgagcggagggtattcctcaacgccaatcggaccgtggtgctgtaa

SEQ ID NO: 353536 - DNA, 1200 bp, Pseudomonas aeruginosa
atgtctggcaatcgtggtgtggtctatctcggcccgggcaaggtcgaggtgcagaacattccctatccgaagatgcaggacccgcagggccggcagatcgaccacggggtgatcctgcgggtggtctccaccaacatctgcggctccgaccagcacatggtgcgcggccgcaccaccgcgccggaaggcctggtgctgggccacgagatcaccggcgaggtggtggagatcgggcgtggcgtggaaaccatgaagatcggcgacctggtctcggtaccgttcaacgtcgcctgcggccattgccgtacctgcaaggaacagcacaccggcgtctgcctgacggtcaatccggcgcgggccggcggcgcctacggctacgtcgacatgggtggctgggtcggcggccaggccgaatacgtgctggtgccctacgccgacttcaacctgctgaaactgcccaaccgcgaagcggcgatggagaagatccgcgacctgacctgcctttcggacatcctccccaccggctaccacggcgcggtcaccgccggcgtcggcccgggcagcacggtctacatcgccggcgccggtccggtcggcctggccgcggcggcctcggcacgcctgctcggcgcggcggtggtgatcgtcggcgacgtcaacccgacccgcctggcccacgccaagaaacagggcttcgagatcgccgacctgtccaaggacaccccgctgcacgaacagatcgccgctctgctgggcgagccggaggtcgactgcgcggtcgatgcggtcggtttcgaggcgcgcggccacggccattcgggctcgcagcaggaagccccggccaccgtgctcaactcgctgatgggcatcacccgggtcgccggcaagatcggcattcccggcctgtacgtcaccgaagacccgggcgcggtggacgcggccgccaagcacggcgccctgagcatccgcttcggcctgggctgggccaagtcgcacagcttccataccggccagaccccggtgatgaagtacaaccgccagctgatgcaggcgatcatgtgggaccggatcaagatcgccgacatcgtcggggtggaagtcatcaccctcgacgatgcgccgaaaggctatggcgagttcgacgccggggtgccgaagaaattcgtcatcgacccacacaacctgttccgcgcggcctga

SEQ ID NO: 353537 - DNA, 918 bp, Pseudomonas aeruginosa
atgaacaccgatagcccgatcaaccgcgtcgaacaggtacaggtcgacgacctggcctgctggcgcatccacaccgcccatggcgaggcgctgatcgcccagcagggcgcgcaactgctcagctaccagccccacgaacagccgccgctggtctggctcagcgacgaggccggctaccggcgcgggcagtcggtacgcggcggggtgccggtgtgctggccgtggttcggtccgctggagcgcaacccgcaggaagtccgcggccaggtggaagatggcctgaaggcgcccgcccacgggctggtccgggcagtcgactgggaaatcgacgacatcgccgaggaggacggcgacctctgcgtcagcttccgcctcgacgcccccgatggcctccccggctggccgcacccggcggcgctgcgcatgctgttccgcttcggcgagcgcctgaccctgcgactcaccagcgagaacctcggcagcaagccgctggtgctcagccaggcactgcacacctacttcgcggtcagcgacagccgcgagatcgccatcgagggcctggaaggcgcgcgctacatcgataccctggagaactgggaagaacgcactcagcacggcgcggtacgggtcaagggcgaactggatcgcatctacctcggtctcgaacgcgacctgctgatcaaggacccgcgctgggaacgcagcatccacctgcacgccctcgactcgcgctcggcggtggtctggaacccctgggtggacaagtcccggcgtctctcgcagttcgccgacgacgcctggcagcagatgctctgcatcgagaccgggcgggtctgggacgacctcatggtggtcgcccccgggcgcagcgaaagctttggcgtgcagatctggagcgagccgctgaaacgaccctga

SEQ ID NO: 353538 - DNA, 549 bp, Pseudomonas aeruginosa
atgcgccgcttcccgttcgcccgcctgttgctgctcgccctgttgtcctcacccctggcccacgccgaactgcccgagaccgactggctggaactgatgccgccggccgaccgcaaggcgctggaagaaatgcccgacatcatccacgacaccccggaggccgccggcaccttcaccagcaaggggggcctgaagcagtcggaccgaaagatgccggcggtgatgtattcggccaagaccgtcgccagcctggatggcaaggcgatccgcctcggcggctacccggtgccgctggagaacgacgccaagggccgcgtcaccgaattcttcctggtgccctatccgggcgcctgcatccacgtgccgccgccgccgccgaaccagatcgtcctggtgcgttatccacaggggctggagctgaccgatatctacaccccgctgtgggtcagcggcacgctgaagatcgagcaggtgagcaatgacctggccgatgccgcctacgccatcgacaaggcgcgggtgaaggtggtggaggaagcggacctgtag

SEQ ID NO: 353539 - DNA, 246 bp, Pseudomonas aeruginosa; identical to SEQ ID NO: 322365

SEQ ID NO: 353540 - DNA, 1083 bp, Pseudomonas aeruginosa
atgaaaatcggtgtcatcggtggcggccagctgggccgcatgctggccctggcgggaaccccgctgggcatgaacttcgctttcctcgacccggcgccggacgcctgcgcggcctccctgggcgagcacatccgcgccgactacggcgaccaggagcacctgcggcaactggccgacgaggtcgacctggtgaccttcgagttcgagagcgtgccggcggaaaccgtggccttcctctcccagttcgtgccggtctacccgaacgccgagtcgctgcgcatcgcccgcgaccgctggttcgagaagtcgatgttcaaggacctcggcattcccactccggacttcgccgacgtccagtcccaggccgacctcgatgccgccgcagccgccatcggcctgccggcggtgctcaagacccgcaccctgggctacgacggcaagggccagaaggtcctgcgccagccggccgacgtgcagggcgcgttcgccgaactgggcagcgtgccgtgcatcctcgagggcttcgtgccgttcaccggggaagtctcgctggtggcggtgcgcgctcgcgatggcgagacgcgtttctacccgctggtgcacaacacccacgacagcggcatcctcaagctctccgtggccagcagcgggcatccgttgcaggcgctggccgaggactacgtcggccgcgtgctggcccggctcgactacgtcggcgtgctggccttcgagttcttcgaggtggacggcggcctgaaggccaacgagatcgccccgcgcgtgcacaactccgggcactggaccatcgaaggcgccgagtgcagccagttcgagaaccacttgcgcgccgtcgccggcctgccgctgggctcgaccgccaaggtcggcgagagcgcgatgctcaatttcatcggcgcggtccccccggtggctcaggtggtcgccgtcgccgactgccacctgcatcactacggcaaggccttcaagaacggccgcaaggtcggccacgccaccctgcgttgtgccgaccgggcgacgctgcaggcgcgcatcgccgaggtcgaggcgctgatcgaggcgtga

SEQ ID NO: 353541 - DNA, 492 bp, Pseudomonas aeruginosa; identical to SEQ ID NO: 322363

SEQ ID NO: 353542 - DNA, 1029 bp, Pseudomonas aeruginosa
atgaccctgccacagaccatgaaagccgcggtcgtgcacgcctacggcgcgccgctgcggatcgaggaagtcaaggttccgctgcccggccccgggcaggtactggtgaagatcgaagcctccggcgtctgccacaccgacctgcatgccgccgagggcgactggccggtgaagccgccgttgccgttcattcccggtcacgaaggcgtcggctacgtcgccgcggtgggcagcggagtgacccgagtgaaggaaggcgaccgggtcggcatcccctggctgtacaccgcctgcggctgctgcgagcactgcctgaccggctgggagaccctctgcgagagccagcagaacaccggctactcggtgaacggcggctatgccgaatacgtattggccgacccgaactacgtcggaattctgccgaaaaacgtcgaattcgctgaaatcgcgccgatcctctgcgccggcgtcaccgtctacaaggggctcaagcagaccaacgcgcgccccggccagtgggtggcgatctccggcatcggcggcctcggccacgtcgccgtgcagtacgccagggccatgggcctgcacgtcgccgccatcgacatcgacgacgccaagctggaactggcgcgcaagctcggtgccagcctgacggtcaacgcccggcaggaagacccggtggaggtgctccagcgcgacatcggcggcgcccacggggtgctggtcaccgcggtatccaacagcgccttcggccaggccatcggcatggcgcgccgcggcggcaccatcgccctggtcggcctgccgccgggtgacttcccgacgccgatcttcgacgtggtgctcaagggcctgcacatcgccggctcaatcgtcggcacccgcgcggaccttcaggaagccctcgactttgccggcgaaggcctggtcaaggcgaccatccatccgggcaagctggacgacatcaaccagatcctcgaccagatgcgcgccgggcagatcgaggggcgcatcgtccttgagatgtga

SEQ ID NO: 353543 - DNA, 909 bp, Pseudomonas aeruginosa
gtgaacctcgaactgaagtggctggaggatttcatcgccctggccggcacccgcagcttttcccaggcggcggagaaacgcttcgtcacccagccggccttcagccggcgcattcgcagcctggaggacgccctcggcctgaccctggtgaatcgccagcgcacgccggtggaactgaccgaggccgggcagctgttcctggtcaccgcgcgcagcgtggtcgagcagctcggccaggtggtgcgccacctgcaccacctggaaggcgggcagggcgaggtgctgcagttcgccgccgcccactcgctggcgctgggcttcttcccgcagtggatcgcgcggctgcgcaacgaggggctgaacatcgccagccggctgatcgccaccaacgtcggcgaggcggtgcattccctgcgcgagggtagctgcgacctgatgctggcgttctacgaccctgacgccgcgttgcagatggacccggagatcttcccctcgctgcacctggggcgcaccgagatgctgccggtctgcgcggtgaacgccgagggcctgccgctgttcgacctggagaacggccagagcgtgccgctgctcgcctacagcgccagcgccttcctcggtcgcggggtcaacctgctgctgcgccagcgcaacctgcgctacaccacggtctacgagacggcgatggccgacagcctgaagagcatggcgctgcaaggcatgggcgtggcctgggtgccacggctgagcgtggtcaacgaactggagcgctgtgagctggcgatctgtggcgggccgcaatggttcgtgccgcaggaaatccgcctgtaccgctgcgcgctggtacgcaaggcggcgatccgcctgctctggcgcaagctggaaggcgggctgggcagcgtcgagtag

SEQ ID NO: 353544 - DNA, 1425 bp, Pseudomonas aeruginosa
atgtcccccgttgcatcttcccgtatcgagaaagacctgctcggcaccctcgaagtgcccgctgacgcctactacggcatccagaccctgcgcgccgtgaacaacttccgcctctccggggtgccgctgtcgcactacccgaagctggtcgttgccctggccatggtcaagcaggccgccgccgacgccaaccgtcagctcggccatctcccggaagacaagcacgccgccatcagcgaggcctgcgcccgcctgatccgcggcgatttccacgagcagttcgtggtggacatgatccagggcggcgccggcacctccaccaacatgaacgcgaacgaagtgatcgcgaacatcgcgctggaagccatgggccacaccaagggtgagtacaagtacctgcacccgaacaacgatgtgaacatggcgcagtcgaccaacgacgcctacccgaccgccatccgcctgggcctgctgctcggccacgacaccctgctggccagcctcgacagcctgatccaggccttcgccgccaagggcgtcgaattcgccggcgtactgaagatgggccgcacccagttgcaggacgccgtgccgatgaccctcggccaggaattccacgctttcgccaccaccctcggcgaagacctcgaccgcctgcgtcgcctggcgccggagctgctcaccgaagtgaacctcggtggcaccgccatcggcaccggcatcaacgccgaccccggctaccagaagctcgccgtcgagcgcctggccgccatcagcgggcagccgctgaagccggccgccgacctgatcgaagccacctccgacatgggcgccttcgtgctgttctccggcatgctcaagcgcaccgcggtcaagctgtcgaagatctgcaacgacctgcgcctgctctccagcggcccgcgcaccggcatcaacgagatcaacctgccgccgcgccagccgggcagttcgatcatgccgggcaaggtcaacccggtgatcccggaagcggtcaaccaggtcgccttcgaagtgatcggcaacgacctcgccctgaccctggcggccgaaggcggccagttgcaactgaacgtgatggagccgctgatcgcctacaagatcttcgactcgatccgcctgctgcaacgcgccatggacatgctccgcgagcactgcatcaccggcatcaccgccaacgtcgagcgctgccacgaactggtcgagcacagcatcggtctggtcaccgcgctgaacccgtacatcggctacgagaactccacgcggatcgccaagaccgccctggagagcggccgcggcgtcctggaactggtacgcgaggaaaagctgctggacgaagccaccctggccgacatcctgctgccggaaaacatgatcgcgccgcgcctgattccgctgcgcgcctga

SEQ ID NO: 353545 - DNA, 1215 bp, Pseudomonas aeruginosa
atgagtgtcgccctttccgccgcgcccgagcgcaagctcgccgcccccctgatcgccttcgccctgctggtgctcggcgggctgttcctgttcaacgcggtcagcgcgcgccaggccatcctcttcatcgtcggcggcgccctgggcctgaccctctaccacgccgccttcggcttcacctccgcctggcgggtattcatccgcgaacggcgtggcgccgggctgcgcgcgcagatggtgatgctggcgctggcggtgctgctgttcttcccggcgctggcggcgggcagcctgttcggccagccggtgagcggtttcgtctcgccggtcggcacttcggtgatcgtcggcgccttcattttcggcatcggcatgcaactgggcggcggctgcgcctccggcaccctgttcaccgtcggcggcggcaacgcgcggatgctggtgaccctgctgttcttcatcctcggctcgctgatcgccacccagcatgtcggctggtggttcgccctgccgtcgctgccgccgatctcgctggtcgccgaactgggcctggcaccggcgctggtgttgagcctggcggtgttcatcggcatcgccggggtcacggtacgcatggagaaggcccgccacggcaccctggaaaccccgccgagcgccgaatggcgtggttggcggcgcttcctccgcggcccctggccgctggtctggggggcgctggcgctggcgctgctcaacttcctcaccctgtacctcgccggacgcccctggggcatcacatcggccttcgccctgtggggcgcgaagatcgcccagggcgtgggcctggacgtcggcgcctgggccttctggcagacgccggcgaacgccaaggcgctggccgcgccgctgtgggaagacatcaccagcgtgatggacatcggcatcgtcctcggcgcgctgctcgccgccggcctggccggacgcttcgcgccgaacctggacatcccgcgccgttcgctggcggcggcggtgatcggcgggctgctgctcggctacggcgcgcgcctggcctatggctgcaacatcggcgcgtatttcagcgggatcgcttccggcagcctgcatggctggttgtggttggtggcggcgtttgccggcaacagcgtcggggtacgggtattgaggccttatttcttcccggaggagcggcgggagcaagggttgacggggtgttga

SEQ ID NO: 353546 - DNA, 1476 bp, Pseudomonas aeruginosa
atggccaccgtactgcccttcgacgccgccggcatccacctcgaccccgcccagggcctggcccgccagctctacgccgcgctgcgcgaacggatcctcgacggccgcctcggcagccgcacgcggatgcccgccagccgcgagctggcccaggccctgaaggtctcgcgcaacaccgtggtgcgggcctatgaacagttgcacgccgagggctatatcgacgggcgcacaggcgacggcacctacgttgccgagttgcaggaaatcccaggcagggcccccgccgtcgccccgagcgctcccgcgccgcgcggcccggcggccctggcgccgccaccggaaggcgcgccgcgagcgttccgcgtcggcgtgccggccttcgacctgttccccttcgacacctgggcgcggctacaggcgcgcttctggcgcaacccaccggcggactgcctgggctacggcgacccggccggcgaggcgcgcctgcgcgagctgatcgccgcctacctgcgcagcgcgcgcggcctgcgctgcgaggcggaacaggtgatcgtcacccatggcgcgcagcaggccatccgcctgtgcgcccaggtgttgctcgagaacggcgatccggtggctgtggaaaaccctggctaccgcgcggcgcgcctggccttcgccgcgaccggcgcggtaccgcacgggatcgacctcgacgccgaggggctgcgcagcgagcggctcgcgggcattgccggctgccgcctggcctatgtcacgccgtcacaccagtaccccaccggcgtcaccctgtcgctggcgcggcgcctggagctgctggagtgggccgagcgcgccgacggttggatcgtcgaggacgactacgacggcgagtatcgctacagcggtacgccgctggcgccgctggccgcgctggaccgacagggccgggtgctctacgtcgggaccttctgcaagatcgccttcccggcgttgcgcctgggctacctggtggtcccgccggcgctggtcgagcgcttccgccagcggcgggccatcgaggtacgccattcggaggtgggcacccagcgggtcatggccgacttcatcgccgaggggcatttccagcgccacgtccgccgcatgcgccgcgccgcccgcgcccgccgcgacgccttgctgcggggctggccagaggcgccgggttgccagccgttgccggcggtggaggcggggctgcacctgtgcgtgcgggtcgacagcctggcgcgcgagcgggccctgatcgccgcggcggcagccgccggggtggaagtcagcgccttgagcgactactggatggacgactccagcgttgcgccagacgaccgcgcgggcctggtgctgggcttcgcggcagtacccgaggcgcgtatcgacgaagcgctgcgggcgttgcgcaaggcctggcggcgggaggccctggttggacccgtcgtcgcgactgactag

SEQ ID NO: 353547 - DNA, 450 bp, Pseudomonas aeruginosa; identical to SEQ ID NO: 322357

SEQ ID NO: 353548 - DNA, 675 bp, Pseudomonas aeruginosa
atgcgcgaacccttgaactggcgccccgtcgccactccaccccacgccccgctcgacggccgcttcgtcaagctcgaaccgctcgatccgcaacgccacggcgacgacctgtgggacgccctgcaagggcctggcgccgacccgttgctgtgggaatacctggcctacggcccgttcgccgagcgcccggcgttcgacgcctggctggccggccaggcggccagccgcgacccgctgttcttcgccgtgcgcgagcggcgcacgcagcgcgccgtcggcctgctcagctacctgcggatcacgccgaaggatggcgtcatcgaaatcggccatatcgccttcggcgcgcctatgcagcgcacaccggggtctaccgaggcggtctacctgctcgccgaactcgccctcggccgcctcggctaccgccgcctggagtggaagtgcaatgccggcaacgcccgttcgatgcgcgccgccgagcgcctgggcttcacctacgaaggcaccttccgccagcacatggtggtcaagcagcgcaaccgcgacaccgcctggttctccctgctcgacagcgaatggccggcgcgacaggcggcgttcgagcgctggctcgatccttccaacttcgacgccgaaggccgccagcggcagacgctggaggcgctgcgcgactag

SEQ ID NO: 353549 - DNA, 1197 bp, Pseudomonas aeruginosa
atgatcatcgccggcaccgccgtcggcgccggaatgttctccctgcccatcgccatgtccggcatctggttcggctggtcggtggcggtgttcctgctcacctggttctgcatgctgctgtcggggatgatgatcctcgaggccaacctcaactacccggtgggctcgagcttctcgaccatcacccgtgacctgctcggccagggctggaatgtggtcaacgggctgagcatcgccttcgtcctctatatcctcacctatgcctatatctccggcggcggctcgatcatcggctacaccctgtccagcggcctcggcgtgaccctgccggaaaagctcgccgggctgctgttcgccctggcggcggcgctggtggtgtggtggagcacccgcgcggtggaccgcatcaccacgctgatgctcggcggcatgatcattaccttcggcctctccatcagcggcctgctcgggcgcatccagccggcgatcctgttcaacagcggcgagccggacgcggtctactggccctacctgctggcgaccctgccgttctgcctgacttccttcggttaccacggcaacgtgccgagcctgatgaagtactacggcaaggacccgcagcggatcagccgttcgctgtggatcggcaccctgatcgccctggccatctacctgctgtggcaggccagcaccctgggcaccatcccgcgcgagcagttcaagggcatcatcgccggcggcagcaacgtcggcaccctggtggaatacctgcaccggatcaccgcgtcggattcgctgaacgcgttgctcaccaccttctccaacctggcggtggccagctccttcctcggcgtgaccctcggcctgttcgactacctggccgacctgtgcaggttcgacgacagccacttcgggcgcttcaagaccgcgttgctgaccttcgtcccaccgaccatcggcgggctgctgttccccaacggcttcatctacgccatcggtttcgccgggctggccgcggcgttctgggcggtgatcgttccggcgctgatggcgcgggcctcgcgcaagcgcttcggcagcccgctgttccgcgcctggggcggcacgccggcgatcgtgctggtgctgctgttcggcgtggccaacgcggtcgcgcacatcctggccagcttgcactggctgccggagtaccgttga

SEQ ID NO: 353550 - DNA, 1824 bp, Pseudomonas aeruginosa
atgagcaacaccatccaagcgaagaagaccggcgtcaccgataccatcctgcgcgatgcccaccagtcgctgctggcgacccgcatgcgcaccgaggacatgctgccgatttgcgacaagctcgaccgcgtcggctactggtcgctggaagtctggggcggcgccaccttcgacgcctgcgtgcgcttcctcaaggaagacccgtgggaacgcctgcgcaagctcaaggcggcgctgcccaacacccgcctgcagatgctcctgcgcgggcagaacctgctcggctaccgccactacagcgacgatgtggtgcgcgccttcgtggccaaggcggcggtcaacggcatcgacgtgttccgcatcttcgacgcgatgaacgacgtgcgtaacctgcgcgtctccatcgaggcggtgaaggccgccggcaagcacgcccagggcaccatctgctacaccaccagcccggtgcacaccatcgaggccttcgtcgcccagggcaaggcgatggccgacatgggcgtcgactccatcgccatcaaggacatggccggcctgctcaccccctatgccaccggcgacctggtcaaggccctgaaggacgccctgccgctggacgtggtggtgcattcccatgacaccgccggtgtcgccagcatgtgccagctcaaggccgtggaaaacggcgctgaccgtatcgacacggcgatctccagcatggcctggggcaccagccacccgggcaccgagtcgatggtcgcggcgctgcgcggtaccccctacgacaccggcctggacctggagctgatccaggagatcggcatgtacttccacgcggtgcgcaagaagtaccaccagttcgagagcgaattcaccggcgtggatacccgcgtgcaggtcaaccaggtgccgggcgggatgatttccaacctggccaaccagctcaaggagcagggcgcgctgaaccgtatgggcgaggtgctcgaggaaatcccgcgggtccgcgccgacctcggtttcccgccgctggtgacgccgacttcgcagatcgtcggcacccaggcgttcttcaacgtgctcgccggcgagcgctacaagaccatcaccaacgaagtgaagctgtacctgcagggccgttatggcaaggcccccggcgaggtcaacgagcaactgcggcgccaggccatcggcagcgaggaagtcatcgacgtgcgcccggccgacctgatcaagccggagctgaacaagctgcgcagcgagatcggcaacctggccaagtccgaggaagacgtactcacctacgcgatgttcccggacatcgggcgcaagttcctcgaagagcgtgaggccggtaccctgaagcccgaggaactgctgccgattcccaccggcaagggcgtcgccgccgctggcgcggaaggcaccccgaccgagttcgtcatcgacgtgcacggcgagacctaccgcgtcgacatcaccggggtcggcgtgaagagcgacaacaagcggcacttctacctgtccatcgacggcatgccggaagaagtggtgttcgagccgctcaacgaatatgtcgccggctccgccagcggccgcaagcatgccagcgagccgggccacgtcagcaccaccatgccgggcaacatcgtcgacgtgctggtgaaggaaggcgatagcgtcaaggccggccaggcggtgttgatcaccgaggcgatgaagatggaaaccgaggtccaggccggcatcgccggtacggtcaaggcgatccacgtggccaagggcgaccgggtcaacccgggcgagatcctgatcgagattgcgggctga

SEQ ID NO: 353551 - DNA, 1416 bp, Pseudomonas aeruginosa
gtgatcaagaagatcctgatcgccaaccgcggcgagattgccgtccgcatcgtgcgcgcctgcgccgagatgggcatccgctcggtggccgtctactccgaggccgatcgccacgcgctgcacgtcaagcgcgccgacgaagcccacagcatcggcgcggacccgctggccggctacctcaacccgcgcgccctggtgaacctggcggtggaaagtggctgcgacgccctgcaccccggctatggcttcctctcggaaaatgccgagctggcggaaatctgcgccgagcgcggtatcaagttcatcggcccgtcggcgcaagtgatccgccgcatgggcgacaagaccgaagcccgccgcagcatgatcgccgccggcgtgccctgcacccccggcaccgaaggcaacgtcgccgatctcgctgaggccctgcgcgaagccgagcggatcggctacccggtgatgctcaaggccacctccggcggcggcggtcgcggcatccgtcgctgcaacagccgcgaggagctggaacaggcgttcccgcgggtgatctccgaggcgaccaaggccttcggcagcgccgaagtattcctcgagaagtgcatcgtcaatcccaagcacatcgaggcgcagatcctcgccgattccttcggcaacaccgtgcacctgttcgagcgcgactgctcgatccagcgccgcaaccagaagctcatcgagatcgccccgagcccgcagctcacccccgagcagcgcgcctacatcggcgatctggcggtgcgcgcggccaaggcggtgggctacgagaacgccggcaccgtggagttcctgctcgccgacggcgaggtgtacttcatggagatgaacacccgggtccaggtggagcacaccatcaccgaggagatcaccggcatcgacgtggtccgcgagcagatccgcatcgcttccgggctggagctgtcggtcaagcaggacgacatcgtccatcgcggctacgccctgcagttccgcatcaacgccgaggacccgaagaacaacttcctgccctcgttcggcaagatcacccgctactacgcccccggcggccccggcgtgcgtaccgacacggcgatctacaccggctacaccatcccgccgtactacgactcgatgtgcctgaagctgatcgtctgggcgctgacctgggaagaggccctcgatcgcggcctgcgcgccctcgacgacatgcgcgtgcagggggtcaagaccaccgcgccgtactaccaggaaatcctccgcaacccggaattccgcagcggccagttcaacaccagcttcgtcgaaagccacccggaactgacccagtactcgatcaagcgcaacccgtcgcacctggccatcgccatcgccaccgccatcgcggcccacgccggcctgtaa

SEQ ID NO: 353552 - DNA, 951 bp, Pseudomonas aeruginosa; identical to SEQ ID NO: 322352

SEQ ID NO: 353553 - DNA, 216 bp, Pseudomonas aeruginosa
atgccccgtcatagcgatgccaatgcccagcacgtggattcgaaaacccgccgcaagctcgaagaccagcggcgcatgcaattccgccgggcgatcgaggaccactgcgaagaactgcgcctgcgccaggaactggccgactaccccgatctggtagccgccgcctacctcagctcgaaccgccagggccggcgaagcgcccagcgagctggctga

SEQ ID NO: 353554 - DNA, 882 bp, Pseudomonas aeruginosa
gtgaacctgctgcagcacatagcccagtcccgccaacagctccgcaagtcggaactcaaggtcgccgatcacgttctcaacgatccggcgtcggtcatgcacagctccatggccgaactggcccatggggtcggggtcagcgagccgaccatcgtgcgcttctgccgcgccatcggctgcagcggcttccaggacctcaagctgaagctggcgcagagcctggcggccggcgccagcttcggccagttctcgatccatgagagcgactcggtggccgacttcagcctgaagatcttcgacaccacgctgcacagcctgatggaagtccgcgagcacctggacacccacgccctggagcgcgccatcgccgccatcgcccacgcccagcgcgtggagttctacggcttcggcgcttccggcgcggtggcctcggatgcccagcacaagttcttccgcctgctgctgtcggcggcggcctactccgacccgcacatgcaggcgatgtcggcggtgaccctcaagcccagcgacgtggccatctgcatttcccagtcgggtcgctcgaaggacctgctgatcaccgccaacctggtgcgcgaggccggcgccacgctgatcaccctgtgcccgagccagaccccgctggccgacctggccacggtcaacctggcgatcgacgtgcacgaggacaccgacatctacaccccgctgacctcgcgcatcgcccacctggtggtgatcgacgtgctggcgatgggcgtggccatggcccgcggcccggacctggtcaaccacctcaagagcgtcaagcgcagcctgcgcagcctgcgcctgtcgccgaaggtgatgaagaaccaggaagagcgcggcgagccgtcctga

SEQ ID NO: 353555 - DNA, 1467 bp, Pseudomonas aeruginosa
ttgagtacaccagccactccaacgtcctgcgacatcctggtcttcggcggtaccggcgacctggccctgcacaagctgctgccggcgctctatcgcctgcaccgggaggaccgcctgccggccgatacacggatcttcgccctcgcccgcagcgcgctggacaacgccgccttcctcgccctcgccgagcgcaacgtccgcgcggtggtggcgcgcagcgagttcgccgccgaacaatggaaaggcttcgccgcgcgcctcgactacctggccatggacgcctcgcagagcgccgacttcggccgtctcgcgcggcacctgaagagcagcgagggccgggtgctggtgcactacctggcgacctcgccgagcctgttcgcgccgatcgcgcagaacctctccatcgccggcctcgccgggccgcaagcgcgcatcgtgctggaaaaaccgctgggccattcgctggactcggcgagggcgatcaaccagtccatcggccgggtgttcgacgagtcgcgggtgttccgcatcgaccactacctgggcaaggaaaccgtgcagaacctgatggccctgcgcttcgccaatgcgttgttcgagccggtctggcgcgcggcgcacatcgaccatgtgcagatcagcgtcaacgagacccttggcgtggagaaccgcggcggctactacgaccacgccggggcgatgcgcgacatggtgcagaaccatctgctccagttgctctgcctggtggcgatggaggcgccggtgcgtttcgacgccgaggctgtgcgcaacgagaagctcaaggtgctgcaggcgctgaagccgatctccgggctcgacgtgcaggacaagacggtacgcggccagtacgccgccggcaggatcggcggccaggaggtgccggcgtactacttcgagaagaacgtcgacaacgacagcgataccgagaccttcgtcgcgctccaggccgaggtcgagaactggcgctgggccggggtgccgttctacctgcgcaccggcaagcgcatggcgcgcaagtgctcggaaatcgtcatccagttcaagccggtgccgcacagcctgatcgacggcggcggcgggccggccaaccgcctgtggataaggttgcagccggaggagcggatcagcgtgcaactgatggccaagaccccgggcaagggcatgcaactggaaccggtggagctggacctcaacctggccgaggccctcagccgcaacaagcggcgctgggacgcctacgagcgcctgctgctggacgtgatcgagggcgactcgacgctgttcatgcgccgcgacgaggtagaggccgcctggggctgggtcgacccgatcctcgccggctggcgcgagcactaccagagcccgcggccctacccggccggcagcaacggcccggaacaggcgcaactgctgctggaactgcagggtcgacgctggctggaatga

SEQ ID NO: 353556 - DNA, 1395 bp, Pseudomonas aeruginosa; identical to SEQ ID NO: 322348

SEQ ID NO: 353557 - DNA, 726 bp, Pseudomonas aeruginosa
gtgaggcgctggcgagcctggctggcgggcctgttgctgggcctgccgctgttgccgtccgtcgaggccgcggtgcgcgccgaggactacggcgccttctggctgtggagcggcgtcgcgccgcagccggtgctggcgcgggccgagacgctgtacatcctgcagggacagatcagccagtcgcgccggcgccccggcgagggcgtgcggctgatcgcccagggcatctcggtgccgcgcctggcgcggggtgaggtctgggtggtgtaccgcgcccataccctgcgctggacgccgcagatctaccaggccgtgctgaaccaggtgcagcgctggaagcgtgccggcaacccggtggtcggcatccagatcgacttcgatgcgcgtacccgctacctcgacgagtacgtcgatttcctccgcgacctgcgccggcgcctgccccgcgaataccgcttgagcatcaccgggttgctcgactggggcagcaacgccgagccggcggcgatcaaccggctcaagggcgtggtcgacgaagtggtggtgcagacctaccaggggcgccacagcattcccaaccacgccgcctacctcccgcgggtcagccgcctgcaactgccgtaccggatcggcctggtccagggcggcgactggcaagcccccgactacctggaaaagagcccctggttcaggggctacgtggtgttcctgctcaaccctcagtga

SEQ ID NO: 353558 - DNA, 2202 bp, Pseudomonas aeruginosa
atgcgctcgaagccgcttcttcccgccctcctgctggtgggcgccggtctctccccgctggcccaggccagcagcgacgactcctgctatcccgattggtcgctggtcggcggcggtgtctgcgataccttgccgttcctcgccccgggcaacgacacccgcgccaacctgcgcctgctgctggccgacgccggccactggcggctggtggaggcgccgccgtcggaggaagagaagctcgaaggctacggcctggtgccgttcggcctgttccgcctgctgcccggcgacggcagccagccgcccgcgcctccggcggcgagcgaagccgagacaccgccgcctgcgccagcgccctcgccgctcgccgaactggcccggcagatgggcgccgaagcgctaccggaaaagatcgccggcgccgaattcttcgagggcgagggcagccgctgccgcagcaacgaccaggacagcgcgctggcgtttcttcgccaggtgcgtgacgccgggctgggcgaggcggagaccaaggccctggccaacagccgcctggagctgctcggtgcctgcggctgggaacaagaggaactgggcggtgtgctcgcgcaaggcgtcgagtcggccgcaggcagggccttcgccacgtacctggaggctgcggccaacttctacagcggccgcttcgacgaagccgaacagggcttcaaggcgttgcaggacgtgtcgcagccctggctgaaggaaaccgccctgtacctgcaggcgcgcaccctgctcaacgccgcccagcagaacgccttcgacgacatgggcttccccgagctgcagaatgtcgacaaggctcgcctggaacagacccgcagcgccctcgaggcctacctgcaggcgtatccgaaggggctctacgccgcctcggccaagggcttgcaacggcgcgtgcattggctggccggcgaccagaagctgctggcccaggactatgccgcgcaattcgccgaagccgagcaagggcagcgcaacatggccctggaagacctggtccaggaggtcgacaacaagctcctgaccggtatccagctcggcgacatccagactccgctgctgctggcggtggccgacctggtgcagatgcgcgcccacgatccgtcgaccccgcgcagcttcacctgggaaacgctgcaggcccaacaggccagcttcgccgcgcatcccgaactgttcgcctacctgcaggcggcctatcgcttctatgtcgaccaggatccggcgaagaccctcgaagcgctgccgcaaaaggtcggcagcctcgactacgtcggcttcagccagcagaccctgcgcgggctggcgctggagcagcagaaggactggaaagccgccgaggcgctctggctggaactgttgccgcaggccgcgcagccgtaccagaagggccagttgcagctggccctggcgctcaactacgagcgcagcggccagttggaaaaggtcttcgccgaaggttcgccggtccaggagccgctgctgcgcagcatcctcctgcgcaacgtcgccgacgccgcgctgttgcgccgccagaccaagcagggcgcgacggcggaagagcgcgataccgcgctgttcactctcctttacaaggacctgcgccgcagccgcttcgccgacttcggcaaggacttcgcgctgctcggcgaaaccccctcgcagaccaagctgggcaccagcctcggctatgtctacggcgccggcaacagcctggagctgttccgctggaagggcgacaaggccgagtccggctacgtttgcccggccatcgccgagtcggccgcggcgctggccgccgatgacaaggacccgaagggcctgaactgcctgggcgaattcatcctgcgcaacggtctcgacggcatgccgctggacagccagcccgaggccaacgagctgggcggcaccccgagcggcttcaagggcgaggtgtactcccggctggatggctatcgcctggtcatggacaaccccaaggctccgcgcgaagacaaggcctacgcgctgttccgcgcgatcaactgcttcgccccggccggctacaacacctgcggccagcaggacatcccgcaggccgagcgcaagcaatggttccgtacgctcaagtcgacctacgccgacagctcctgggccaaggaactgaagtactactggtga

SEQ ID NO: 353559 - DNA, 2856 bp, Pseudomonas aeruginosa
atgaccgtccatgtcgagcccttggcgctgccgggcggcagcaccgatgtactgcggctctacgcccgcgaaatcgccatcgagcgtacccggctcctttatctcggctcgcgcacgccgaccctgctcatgctgctcggcggcgtgaccagcgcctgcctggtgtggggcaaggtcagcagttggctgctcggcggctggctggtctggctggtgttgctcgccgtcctgcgcctgctgcaggtcgccgccttccagcaggccgacagccgtcgccaggccagccgccactggcggcggaccttcctgtgcggcgccggcgcctcgggcctgaccctggcgttcgcggtgatcatgctggtcccggccgatgccttcctccagcaggtgctggtgttcggcctggtggcggcggcgatcctctccgccagcgtcgcctatgcggtgagcctgccggccttcctcaccttcgccttgccgggcctgctgccatccatcgttttcctgctgttgcagccgcatagcctgttgcagggctggggcgtgctcggcctgatcctgctggtggcgctgctggtggtcgccgggcagatccaccggctggtgcagggcgcgctgctgcgacgcttccagacccaggcgctgaacctgcacctggaacgcgtcaacgccgaggccgaagcgctcaatcgcaagctcgcccaggaggtcggccagcggcgcctggtcgaacgcgagctgcgcgccgcccgcgacgccttgcagcgccgggtggaggcgcgcaccgaggagcttggcgcgaccagccaggcgctcagccagagcgaggcgcgcctggccatggccctggaggccagcgaactggggttgtgggactgggacctggagagcggccgggtccagcattcctatctcgaggcggtcttcagcgacgccgggggcggtcccgaggactatcgcaggctgatcgaaaacatccaccccggcgacctgccgcgcatccgtcgcgccctcgccgaacatctcaaggggcgcagcgagctgtaccgggtggagtaccgcgtgcgcgaccgggagggcggctggcgctggctggaggatcgtggccgggccatggctcgcgacccgcggggacgggtgacgcggatgctcggcacgcgcagcgacatcagcgcgcgcaagcgcctggaagagcagcagcaactggccgcgacagtgttcgaggcggccagcgagagcatcgtgatcctcgatccggcctacaacctgctggcggtcaaccaggccttcagtcgcatcaccggctatcgccgcgaggacgtggtcgggcgcaacgccagcctgctggtgaatacccccgaggcccagcgccactaccggcagatccgcgccgagctgcgccagcacgggcagtggcagggcgaactggtggatacgcggaagaatggcgatccctatccccaatggctgcagctcaacctgctgcgcgacggcaatggcgaggcgacccacatcgtcggtttcttcaccgatctcagtgcccgccgcgacgtcgaggagcgcctgcgtcacctgctgcactacgacgaactgaccggcctggccaaccgccggttgttccgcgagcggctgcacgaggcggcccagcgggcgcgccaggaggagggcgggctggccctgctgctgatcgacctggaccgcttcaagctgctcaacgacagcctcggccacgaggtcgccgaccagttgctcagggagatggcccagcgcctgcggcgcaccgcgccggaagccaacaccctggcgcgtctggccggcgacgagttcgccattctcctcgatggcggcaccggcaccgcggccctgtcgcgcctggccgaacgcctgctggtccagttgcgccagccggtgagcgtgctcggccacgagttgatcctcggcgcctcgctggggatcagcctgttttccgagcaggcacgggaaatctccgtgctgatgagccaggcgaacctggcgatgcaacatgccaagcaactcggcggcaataccttccagttcttccgcgacaacctgcaggacagcaccctcgaacgcctgcgcctggaaacccggttgcgcaaggcggtcgaggagggccagctggacgtgcattaccagcccaagctgtgcctggccagcgcccgcccggactcggtcgaggcgctggtgcgctggcaccatccggaggagggcatgatcccgccgtcgaccttcatcggcctcgccgaggagtgcgggttgatcggcgagatcggtgaattcgtcctgcgccgggcctgcctgcaggccgccgagtggagccagcggggcctgaacctgcgggtctcggtgaacctctcggtccaccagttgcgccagggcgacctgctcgacgtagtgcgctcggcgcttgccgacagcggcctgccggcggcgcaactggagctggagttgaccgaaagccagtggctggacgccctcgatagtgtcctggcgaccttccgccagttgcgcgagatgggggtgaagctatcggtcgacgacttcggcaccggctattcctcgctcagctacctgaagcgcctgccgctggactacctgaagatcgaccagtcgttcgtccgcgacctgacccagaacagcgaggatgcggcgatcatccgggcgatcatcgccatggcccacagcctcgacctgaaggtggtcgccgaaggcgtggaaaccatcgaacagcgggacttcctggtggcccagcgttgcgacgagctgcagggctacctgatcggccggccgttgccggcccatgccctggaggaaggtttgcgccaggctcgttga

SEQ ID NO: 353560 - DNA, 2187 bp, Pseudomonas aeruginosa
atgaacgacgacctctccctcctgctgaactccctcaacgacccgcagcgccaggccgtggccgcgccgctgggccgccaactggtcctcgccggcgccggctcgggcaagacccgcgtgctggtgcaccggatcgcctggctgatccaggtcgagcacgcctcgccctacagcatcctgtcggtgaccttcaccaacaaggcggcggcggagatgcgccaccgcatcgagcagttgctcgggatcaatccggcgggcatgtgggtcggcaccttccacggcctcgcccatcgcctgctgcgcgcgcactggcgcgaggccgggctgagcgagaacttccagatcctcgacagcgacgaccagcaacgcctggtcaagcgggtgatccgcgaactcggcctcgacgagcagcgctggccggcgcgccaggcccagtggttcatcaacgggcagaaggacgagggcctgcggccgcaacacatccagcccggcggcgacctgttcctcgccaccatgctgaagatctacgaagcctacgaggcggcctgcgcccgcgccggggtgatcgacttctccgagctgctgctgcgcgccctggacctctggcgcgaccatcccggcgtgctcgagcactaccagcggcgcttccgccatatcctggtggacgagttccaggacaccaacgccgtgcagtacgcctggctgcggattctcgccaagggcggcgacagcctgatggtggtcggcgacgacgaccagtcgatctacggctggcgtggcgcacggatcgagaacatccagcagttcagcgacgacttcgccgacgccgaggtgatccgcctggagcagaactaccgttccaccgcgtcgatcctcaaggccgccaacgccctgatcgccaacaaccagggacgcctgggcaaggagttgtggaccgacggcgaggacggcgagtcgctgagcctgtacgccgcgttcaacgagcacgacgaggcgcgctacgtggtcgagtcgatcgagagcgcgctcaagggcggcctggcgcgcagcgagatcgccatcctctaccgctccaacgcccagtcgcgggtgctggaggaagccctgctgcgggagaagattccctaccgcatctacggcggccagcgcttcttcgagcgtgccgagatcaagaacgccatggcctacctgcgcctgctcgacggccgcggcaacgacgcggcgctggaacgggtggtcaacgtgccggcacgcggcatcggcgagaagaccgtggagagcatccgcgaattcgcccgcggcaacgatgtgtcgatgtgggaggcgatccgcctgatgatcgccaacaaggtcctgcccggccgcgccgccagcgccctgaccggcttcgtcgagctgatcgagaatctttcggcgaaggtcatggacatgccgctgcacctgatgacccagacggtgatcgagcagtccggactgatcagctaccacaaggaagaaaaaggcgagaaaggccaggcccgggtggagaacctcgaggaactggtcagcgccgcccgcgccttcgagaacagcgaggaagaggaagacctcaccccgctgcaggccttcctcagccacgcctccctggaggccggggaaacccaggccgacgcccacgaggacagtgtccagctgatgaccctgcacagcgccaagggcctggagttcccgctggtgttcctggtcggcatggaggaagggctgttcccgcacaagatgagcctggaggaatccggccgcctggaagaggaacgccgcctggcctacgtcggcgtcacccgcgccatgcagcgactggtcctgacctacgcggagacccgccggctctacggtagcgagacctacaacaaggtttcgcgcttcatccgcgagatcccgccggcgctgatccaggaagtgcgcctgtccaataccgtcagccgcccctacggcggcacctcgcgcagtgccggcggcaacctcttcagcggcgccggggtgccggagacgcccttctccctcggccagcgggtgcgccacgcgctgttcggcgaagggactatcctcaacttcgaaggcgccggcgcccaggcccgggtgcaggtgaatttcgagagcgaaggcagcaagtggctgatgctcggctacgccaagctggaagccctgtag

SEQ ID NO: 353561 - DNA, 429 bp, Pseudomonas aeruginosa
atgctggcatcctgggccttctgggcactgctttcggcgctgttcgccgcgctgaccgcgatcttcgccaagatcggcctcgaccgggtcgattcggacttcgccaccttcatccgcaccctggtgatcctcgtcaccctcggcggcatcctcgcggtcctgggcaagttccaggccccgggcagcatcctgccgcgcagctggctgttcctggtgctctccgggctggccaccggtgcctcctggatctgctatttccgcgccctcaagctcggcccggcgtcgctggtggcgccgctggacaagttcagcgtggtgctggtggcactgctcggcgtggccttcctcggcgaacgcctggacctgcgccaatggctcggcgtagccctggtgacagcgggcgtggtggtcctggcaatccgcccataa

SEQ ID NO: 353562 - DNA, 1494 bp, Pseudomonas aeruginosa
atgtaccgtgatcgcgtgcgcctgccctccctgctcgacaaggtgatgagtgcggccgaagccgccgacctgatccaggacggcatgaccgtcggcatgagcggtttcacccgcgccggcgaggccaaggccgtaccccaggcgctggccatgcgcgccaaggaacgtccgctgcgtatcagcctgatgaccggcgccagcctcggcaacgacctcgacaagcagctcaccgaggccggcgtgctcgcccggcgcatgccgttccaggtcgacagcaccctgcgcaaggcgatcaacgccggcgaagtgatgttcatcgaccagcacctctcggaaaccgtcgagcagttgcgcaaccaccagctgaagctgccggacatcgccgtcatcgaagccgccgcgatcaccgagcagggccacatcgtgccgaccacctcggtgggcaactcggcgagcttcgcgatcttcgccaagcaggtcatcgtcgagatcaacctggcccacagcaccaacctggaaggcctgcacgacatctatatcccgacctaccggccgacccgcacgccgatcccgctgacccgcgtcgacgaccgcatcggcagcacggcgatcccgatcccgccggagaagatcgtcgccatcgtcatcaacgaccagccggactcgccatccaccgtgctgccgccggacggcgagacccaggccatcgccaaccacctgatcgatttcttcaagcgcgaggtcgacgccgggcgcatgagcaacagcctcggcccgctgcaggccggtatcggcagcatcgccaacgcggtgatgtgcggcctgatcgagtcgccgttcgagaacctgaccatgtactccgaagtgctgcaggactcgaccttcgacctgatcgacgccggcaagctgcgcttcgcctcgggcagctcgatcaccctgtcgccgcggcgcaacgccgacgtgttcggtaacctggagcgctacaaggacaagctggtgctgcgcccgcaggaaatctccaaccaccccgaggtggtccgtcgcctgggcatcatcggcatcaatacggcgctggagttcgacatctacggcaacgtcaactcgacccacgtcggcggcaccaagatgatgaacggcatcggcggctccggcgacttcgcccgcaacgcgcacctggcgatcttcgtcaccaagtcgatcgccaagggcggcaacatttccagcgtggtgccgatggtcagccacgtcgaccacaccgagcacgacgtcgacatcctcgtcaccgagcagggcctcgccgacctgcgcggcctggcgcctcgcgaacgggcccgggtgatcatcgagaactgtgtccacccgtcctaccaggcaccgctgctggactacttcgaggcggcttgcgcgaaaggcggccacacgccgcatctgttgcgcgaggcgctggcctggcacctgaacctggaagaacgcggacacatgctggccggctga

SEQ ID NO: 353563 - DNA, 204 bp, Pseudomonas aeruginosa; identical to SEQ ID NO: 322342

SEQ ID NO: 353564 - DNA, 1146 bp, Pseudomonas aeruginosa
atgcgggtactgcacttctacaagacctacctgagcgaaacggtaggcgggatcgaacaggtgatcttccagctttgcgagagcagcgggtcgtgggggatcgacaaccacgtcctgaccctgagcagcgacccgcatccgcctgtcgtgcccttcggcggacatgtggtgcatcgcgccaggctcgacctgcagctcgcttccaccgggttttccctgagcgtgttcaagcagttccgcgagctggcggcggaggcggacgtggtcaactaccacttcccctggccgttcatggacctggtgcatttcctcaccggtatgaacaagccgagcgtggtcacctaccattcggacatcatccgccagcgcgtcctgttgaaactgtaccggccgctgatgagtcgtttcctccacagcgtggatcgcatcgtcgcagcctcgcccaactacttcagtaccagcgacgtgctccgccagtaccgagaaaagacccgggtgatcacctacggcctggacaaggacggctacccgaagcctgcgacacagcgtctggagcactggcgagagaaactcgggccgcggttcttcctgttcgtcggggtgatgcgctactacaagggcctgcatatcctgctggatgcgttgcagggcaccgattacccggtggtgatcgtcggtgccgggccgttgcaggccgagctgtatgcccaggccgcggcgctggggttgcgcaacgtgcacttcctcgggcgggtggacgacgaggacaaggtcgccctgctgcaactcagctacgccatggtctttccgtcgcacctgcgttccgaggcgttcggcatctccctgctggagggcgcgatgtacggcaagccgatgatctccagcgagatcggcaccggcaccagctacatcaatatccatggcgagaccggcctggtcgtgccgcccagccagccggccgcgtttcgccaagcgatgcgctggctctgggagcatccgcagcaggcggaggaaatgggcaggaacgcggaggcccgctatcggcaactgttcaccgccgaagagatggggcgtcgctggagcgagctgtaccgtgaactgctggaggaaaaggcttcttccagatacgtgaaggccgctcggtaa

SEQ ID NO: 353565 - DNA, 1128 bp, Pseudomonas aeruginosa
atgcggattgcggttaacgcgcggattctccaggcgccgcggaccggcatcgggcattacctggtcgagttgctgggcgcgttgcaggcgcacgcggacttcgagttttccctgttccatggctggggctggagcggcgacctgccggcggcggcgctgcccggctattcgcgtctgtcgccctggctgcgcaacctgcccggagcctaccgggcacgacgctggctggagcagcggcgtttcgatagcggtcggccgccggtcgatctctaccatgagcccagtctctggccgctggacttcgacgggccgatgctgatgaccctgcacgacctgacccacctgcattatccggcgacgcaacccgccgcccgcttgcgcgaaatagaacgccggctggcgcgcgggatggaaaaggcgcggttgatcctgaccgactcgcaggcgatcgccgacgaggcgcaggcgtatttcggcctgccgcgcgagcgcttcgtggtggcgcccctcggccatgccgcgcggttccgtccgcgggaccgggagtccctgcgcgagcccttgcgcgcgcatggcctggtgccgcgcgggtatttcctctgcgtaggaaccctcgaaccgcgcaagaacctgtcgctggccctgcgcgcccatgggcaactgccggcggcggtccgccagcgttttccgctgatgatcgtcggcatgccgggatgggaaagtcgctcgctcgacgacgaactgcgccaggcgctggcttcgggaacggtgcggctgctcggctacctgccggacgagcgggtcgccgagttgatgtcgggcgctcgggcgctggtcttcccctcgatctacgaaggcttcggcctgcctgtgctggaagccatggccagcggcacgccggtattgctcacgcgactctccgcaatgccggaggtggccggcgaggcgggcagctatattgacccggatgatgccaatgggctatctgacatgctggtccgcatgaccgaggataccgtctactgggagtgctgccgggaagccggcctgcgacgggcggagcagttttcctggaagcgttgcgcgaatctcaccgctgcagcctatcgtcgtgccgtggagggctga

SEQ ID NO: 353566 - DNA, 1383 bp, Pseudomonas aeruginosa
atgacgcgtctgttggtcgaatgcacctatgtgttcgagcatcccaaggtcaattctggtattcagcgggtggtgcgcaacgtcatccgcgagttgccggaagccgacgagacggtggagtgcatcccggtggcaatgctcgacggcaccctgtatcaggtccacagcctggcgccgctggacccgcggccgcattcgccgctggtacgcctgcgcatcctggtggagcgagccgccaactacttctggctgggccagcgcaccctggaaaagcgccgcccgttccgttcctcgccgtgggcccggcgccttctctatgtagcctgccgcctgttcgccttcgccttcctcagcattccgctgcgcctgctcgaccgcatcctcggcaagcagcagcctgcacccgtgcgcgcgaccccgctcgaacatcgggccggcgaccaactggtcttgctggactcctcctggcacgccgatttcttcccgctggcggaacgcctcaagagcgagggcgtgggcatcgtctcggtgatctacgacctgattcccctgacccatccgcaattctgcgatgccggactggtcaaggtgttcaaccactggttcgactggatcgcggccaccgccgacggctacgtcgcgatttccgagaccatccgcgacgaagtgcgcgcggagatgctgcggcgcatcggcccggagaaggtcgcgcaacgctggttcgattatttccacctgggttcggagctggacctggtggaggacggcgcctccgtcgagcccgatctgctgcgcatgttcaaggccaaggcgccggtattcctgatggtcagcaccatcgagccgcggaagaaccacggttacctgctggatgccttcgagcgtgcctgggcccagggttcgcaggcgcggttgtgcatcgccggacgcatcggctggaagtgcgaggcgctggtggaacgggtgcggcagcatccggagctgaacaagcgcctgttcatgttcaacgacctctccgacaagagcctggagtacgcatactcccatgccgcatcgctggtcttcccgtcctatgtggaaggtttcggcctgccgctggtcgaggccatgcagcgcggcctgccggcgatgggcagcgacatcccggtgttccgcgagatcggcggcgaattcatggcctacttcgacctcgccgatccgcagaccctggcgaacctggtcacccgcttcgaagccacgggcgagttcccggccgagcgaccggtcggcgaatggcgctggatcggctggcacgaggcgagtcggcaactgatcgcgcggatcctgctcgccctcggcaaggccccggcgcatggcgaggcagtacatgcggattgcggttaa

SEQ ID NO: 353567 - DNA, 798 bp, Pseudomonas aeruginosa; identical to SEQ ID NO: 322337

SEQ ID NO: 353568 - DNA, 972 bp, Pseudomonas aeruginosa
atgacaagaagtgcactggtaactgggatcaccggtcaggacggagcgtacctggccaagctgctgctggagaagggctaccgggtccacggcctggtggcgcggcgcagcagcgacacgcgctggcgcctgcgcgaactggggatcgaaggcgatatccagtacgaggacggcgacatggccgatgcctgttcggtgcagcgcgcggtgatcaaggcgcagccgcaggaggtctacaacctggcggcacagagcttcgtcggggcttcctggaaccagccggtgaccaccggcgtcgtcgacggcctgggcgtgacccacctgctcgaggcgatccgccagttcagcccggaaacgcgcttctaccaggcttccaccagcgagatgttcggcctgatccaggccgagcgccaggacgagaacacgccgttctacccgcgcagcccctacggcgtggccaagctctatggccactggatcaccgtcaactatcgcgagagcttcggcctgcacgcctccagcggcatcctgttcaaccacgaatcgccgctgcgcggcatcgagttcgtcacgcgcaaggttaccgacgcggtggcccgcatcaagctcggcaagcagcaggaattgcgcctgggcaacgtcgacgccaagcgcgactggggctttgccggggactacgtcgaagccatgtggctgatgttgcagcaggacaaggccgacgactacgtggtggccaccggtgtcactaccaccgtgcgcgacatgtgccagatcgctttcgagcatgtgggcctggactaccgcgacttcctcaagatcgacccggcgttcttccggcccgccgaggtcgacgtgctgctgggtaatccggccaaggcccagcgtgtgctcggctggaagcccaggaccagcctggacgagctgatccggatgatggtcgaggcggacctgcgacgcgtttcccgggagtaa

SEQ ID NO: 353569 - DNA, 915 bp, Pseudomonas aeruginosa; identical to SEQ ID NO: 331191

SEQ ID NO: 353570 - DNA, 1302 bp, Pseudomonas aeruginosa; identical to SEQ ID NO: 332447

SEQ ID NO: 353571 - DNA, 864 bp, Pseudomonas aeruginosa
atgatccgcgccctgctccaacgctggcgttcccgtcccgctgcggcgagcgaaccggtgtcgccacgcatgtgcggtctgcgcgatgcggtgctggatggctggttccgcagcgaaaccggcgaactgctcgccggcttcgccatcggcgcccaggacaccctgctcgatctcggctgcggcgaaggcgtcgccaccctcttcgccgcccgccagggcgcttcggtgatcttcaccgacagcgaggaggacaaggtgcgaagcctggcgcagcaggtcgaggcggtggcccggcggcccttcaccggcctggtcagcgacagcgacccgctgccgctgcgcgacgcctgcgccgacaagctggtgtgcatggaagtgctcgaacacgtggccaacccagcgcgggtgatggacgaactcgtgcgtctcgggcgccctggcgcgcagtacctgctgagcgtgccggacccggtcggcgaacacctgcagcagggcatcgccccggccgactacttccgggcgcccaaccacatccacatcttttcccgtgacgacttcgcgcgcctggtgcaggacgccgggctggtcatcgagcaccgccaggccagcggcttcttctgggtgatgggcatgatcttcttctgggccagcgaacgggccgccggccgtgagctcggcggcgccgtccgcgaccgtatccagccgccctacccggcgctgatggaagactgggcacggctctgggaaaacctcctggcccgtcccgacggcctggagatcaagcacctgctcgaccacttcatgcccaagagccaggtgatcatcgcgcgcaagccgctcgaccccggatcgtcgcggacatga

SEQ ID NO: 353572 - DNA, 1143 bp, Pseudomonas aeruginosa
atgagcggcaaacgcatcctcgacatcgaactgttgcgcgggctggccgtgctcggcgtggtattccaccatctgcacggcaacctgttcagcggctccccggcactgctggacggcatcaaccagcgcgtccagttctggtggggcgtggacctgttcttcgccatctccggcttcgtcatcgcccgcaccctcatcccgcaactgcgcgaggcgcccacacgccaggcattctgggaacaggcgcggtacttctggatccgccgcgccttccgcctgctgccctcggcctggctgtggctggcgctgatcctggcctgttgcctgctgctgaaccgctccggagccttcggcagcctgtcggccaacctcgcggcgagcctcgccggtttcctccaggtcgccaacttccgcttcgccgacagtttctaccgctacgaatacggtgccagcttcgtctactggagcctttccctggaggaacagttctacctcctgctgccgctgctgatcctctgcctgcgtcgctacctgggctgggccctcctggcgctggtgctggtccagttcttcagcctgcgcacgccgctgctgatggtattgcgcaccgacgccctggccatcggcgtactgctcgccctcgcctccctgcagcctggctatgcccgctggaaccccaccctgctgggccgcgcctggagcgggccgttgctgctggccgccgtggccgcggccctgggcgtgctggccagcgaagcgtacagcctggtcgccgtgcggatcggcgccatcgcgctattgtgcggactgctggtgtggatagcctcctacgaccgcgactacctgctctccaacgggccgctgaagcgcttgctggtctgggtcggcgcgcgctcctatgcgatctacctgatccacatcccggcgttctatctcagtcgcgaactctgcttccgcctgggctgggacgccggcgagcggcccctgtcgctgctcggcaccagcctggtcctgatcgtcgtactcagcgagctcaactaccgcttcgtcgagagcccctgccgcgacctgggctcccgcctggtcaagcgcctgagcgccgcccgccgcgtcgccaccacttccggagccacctcatgctga

SEQ ID NO: 353573 - DNA, 837 bp, Pseudomonas aeruginosa
atgctgaacttcctcaagaagatcgtctcgccgcccagccccgccaccgagcccgtcgccgcgccacccgcccccgcgccggtcgacccgtacatgctcgggttgcgcgacgcggtgctcagcggctggttcaaccaggagaccgacgagctgttcagcggctttccgatttccgccgaggacaccgtgctcgacgtggggtgcggcgacggcggcaacgttcatttctgcgccatgcgcggcgctcgcatcatcatcgccgacatcgacgcggaaaagatcgccaggacccgcgagcgcctggccgataccccggcccgcgaactggaatgcctggtcagcgactgcgacccgttgcccctggctgacgccacggccacccgggtggtctccaccgaggtcatcgagcacgtcgacgatccgcggcagttcctcgccgagctggtacgggtcggccagcccggcgcactctatctgctcagcgtgccgcatcccacgtcggaagacctgcagaaggacttcgccgccgacgaatacttccgcaagcccaaccacatccgcgtgctcggcgaggagcagttcgccgcactggtgcgcgaagccggcctggaaatcctcagccacagccgctacggcttctactggtcgctgtggatgctgctgttctgggaggccaaggtcgatttcggcaatcccgaccatcccctcctcgaacactgggccaggacctggcaggcgctgctcgactcgccgcgcggcccggccatcaagcaggccctggacgccgtggtcgccaagagccaggtgatcatcgcgcgcaagcccgcccaggcgtag

SEQ ID NO: 353574 - DNA, 213 bp, Pseudomonas aeruginosa
atgaggacatccccgcacccgcacgccgggagttccagcggtctcccggccgcccatccacatctcgccgccctgctggaaaaattgaattcctggcgacaaaacgctcgatcgcgcaagcatcttgcgcaaatgtccgaacacgacctcgccgacctggcgatcagcccgagcgaacgctacgtagagatttcgaaacctttctggcgctga

SEQ ID NO: 353575 - DNA, 318 bp, Pseudomonas aeruginosa
atgaaacgtctgcgcctgatcggtgccgctgccctgctcgcctgcgcctccagcgcgttcgccagcagcttcgtggtcaccacggatactctggtccgcgccaccggcatgacctccaatgccacttcggacatcaccaattccttccgcgacgacaagatcgtcctcgaagcgcgcgacgacgccgccagcttcgtcgccagccagggcgacatccgcggttcgcacctggaagccgcactgcgccacatccgtggcaagctgccgagcctggccgccaacgacatgcaactggcccaggcgatcctgaccatctga

SEQ ID NO: 353576 - DNA, 294 bp, Pseudomonas aeruginosa; identical to SEQ ID NO: 322886

SEQ ID NO: 353577 - DNA, 336 bp, Pseudomonas aeruginosa; identical to SEQ ID NO: 322887

SEQ ID NO: 353578 - DNA, 1959 bp, Pseudomonas aeruginosa
gtgaggaaggcctgcgcctggctgctggcgctggccctctgcggagccggcaacgcgacggcggccctgcgcctgaaactcgacgcgcctgaactggaccctgcgcagcgcgaggccagccagcaactcttggacgaagccgcggacaagttgccgccggccttccgcgaacgcctggaccgcgagatcgaggtcgagtggcgcgacgacctgcccgccaacggcatgggccaggcccgtggcccgcagcgcatcgcgctgaaccgcaagtacctggccgatctcaccgacggcagcgccgccagccgccagaccgggcgcgtgcacggcaccgagcggcgcgagctgctggcgaccctgctgcacgagctgacccacgtctacgatcgcgcgcgcctgtggtcggcggaggaaaaacgcgagatccgccgctgcacgcgccaggaagaaaccctcggccggatcgcccagcccaccgattgccgcgggcagagcggtcgccgcttcacgctctccgacgacccgcgcctgctcgatctcgccggctggccgcagcgcgccggccagcgcgggcggcgcgaggcgcacaatggcttcgtactgcgcagcccggacgtctacgagctgagcaatccgcgcgagttcgtcgcggtgaacatggagtacttcctcctcgatcccagctacgcctgccgccgcccggcgctctaccgctactaccagcaacgcttcggctgggcgccggaacacaatgcctgtgcgcagagcttcgcctacctcaacgccggccgcgacttcggccagcagccgctgggccagctcgaccccgagcgggtctacgaggtcgactacctgctggccgaggccaacgacaacctggtcagccgctggggccacaccatgctccgcctggtgatctgcgcccccggccggccgcgtgggccggactgccggctggacctcgaccagcatctggtgctgtcctaccgcgccttcgtcggcgacctgcaattgtccagctgggacggcctgaccggcgcctatccgtcgcgcctgttcgtcctgccgctgtcgcaggtgatcgaggaatacaccaaggtcgagctgcgcagcctcgcctcggtgccgctgaagctggaccgcgaggaggtcgccagcctggtcgagcgcgccgcgcagagtcactggagctacgacggccagtactacttcatctccaacaattgcgcggtggaaaccctcaagctgctgcgcagcggcatcccccggcgaccgctgcaaagcctggacagcatcaccccctacggcgtgctcgagatgctggagaaccgcaagctggccgatcccagtgtgctcgacgaccccaaggaagccctgcgcctgggctaccgcttcgactccttccgcgaccgctaccaggcgatgttcgacgtgctcaagcagcgcctgcacatcccccaggacaaggtcgaggactggctggcgctgccggccagggagcgccagccctggttcgccaaggccgacctgcgcgccagcgcggcgctgctgctgctcgagcaggcctcgctgcggcgccagctgctgctcgcccaggacgagttgaagcgcctgtacctcggccacctggacaagccggccggcgaccagcgcctggaagtggccggcaagaccttccagcagatcctcgacgacagcggcttcctcagtcgtccggcggaactcctggagggcggctacggcctgccgcaggccgccgagtggaagcacctggaagagcagacccgcgaacgccaggcgcgcctgcgccggctcagcgacgacctcgaccgcgaggtccgcgccctgctcgatcccgagcgccgcgccgagctggaagccaacgaggccaacatcaaggaggtcggcgcgcacctgcgcgagctgcacaaggcggccggcgggctgatgctgccctga

SEQ ID NO: 353579 - DNA, 420 bp, Pseudomonas aeruginosa; identical to SEQ ID NO: 322889

SEQ ID NO: 353580 - DNA, 945 bp, Pseudomonas aeruginosa; identical to SEQ ID NO: 322890

SEQ ID NO: 353581 - DNA, 363 bp, Pseudomonas aeruginosa; identical to SEQ ID NO: 322891

SEQ ID NO: 353582 - DNA, 1305 bp, Pseudomonas aeruginosa
atgctgaccctgctcgccttcgccatggtggcgaccttcatgttcctgatcatgaccaagcgcctgtccgcgctgatcgcgctgatcctggtcccgatcgccttcgccctgatcggcggtttcgccgccggcctcggcccgatgatgctcgacggcatccgcaccctggcgccgaccggcgtgatgctgatgttcgcgatcctctacttcgccatcatgatcgactccgggctgttcgacccggcggtgcgcaagatcctccggctggtcaagggcgacccgctgaaggtctcgctgggcaccgcggcgctggcgatgatcgtctccctcgacggcgacggctcgaccacctacatgatctgcgtggccgccgtactgccgttgtacagccgcctgggcatgagcccgctggtgatggcctgcctgatcatgctctccagcggcgtgctcaacatgaccccctggggtggccccaccgcccgcgcggcgagtgccctgcacgtcgaccccgcggatatcttcgtgccgatgatcccggcgatgatcgccgggctgctggcgatcttcgccatcgcctggatctacggcaagcgcgagcgcgcccgtctcggcgagctgcacctgcccaccgaccatgaggacctggcggagatcagcgtgtcgcagtatccggaggcgcgccggcccaagctgctgtggttcaacgctattctcaccgtggtcctgatggcgaccctgatcgccggcctgctgccgatgccggtgctgttcatgatcgccttcggcatcgccatgatcgtcaactacccgtgcatccaggagcagaagaagcgcatcggcgcacacgccgagaacattctcgcagtggtctcgctgatcttcgccgccggggtgttcaccggcatcctctccggcaccgggatggtcgacgccatgtccaagagcctgctggcggtgatcccgccggcgctgggcccatacctggcgaccatcaccgcgctggtgagcatgccgttcaccttcttcatgtccaacgacgccttttactacggcgtcctgccgatcctcacccaggccgccgccgaatacggcatcaccccggtggaaatggcccgcgcctcgatcgtcggccagccggtgcacctgctcagcccgctggtgccctccacctacctgctggtggggctggccaagatcgacttcggcgaccaccagcgcttcaccctgaaatgggccgtgctggtgtgcctggcaatcctcgccatggccctgctgctgggcctgttccccctgttcagtaactga

SEQ ID NO: 353583 - DNA, 765 bp, Pseudomonas aeruginosa
atggaatggctgaccagcccggaaatctggattgcgttcttcaccctgaccgccctggagatcgtcctcggcatcgacaacatcatcatgatctcgatcctggtcgggcgcatgccgaagcacctgcagccacgcacccgcttcttcggcctggccctggcgatggtgacgcggatcctgctgttgctgtcgatcacctgggtcatgcgcctgaccgccgacctcttccacctgttcggccagggcatctccggacgcgacctgatcctgttcttcggcggcctgttcctgctctggaaaagcagctcggagatctaccagggcctggaaggcgaggaagaaagcggcgatgaaccgaaggggtcggcgggcggcttcatcggcaccatcatccagatcgcgatcatcgacatcgtcttttccctggactcggtgatcaccgccgtcggcatggtctcccacgtgccggtgatggtcgcggcgatcatcgtcgcggtactggtgatgatgctctgcgccggcgccatcagcgacttcatcgacaagcacccgtcgctgaagatgctcgccctgtcgttcctcatcgtggtcggcacggtgctgatcgccgaagccttcgaagtccatgtgccgaagggctacgtctacttcgccatggccttctccctggccgtggaggcgctgaacatccgcatgcgcggcgccgccgcgcgcaagcggggcgaagagccagtgaagctgcgcaaggaagtgctcggcgactga

SEQ ID NO: 353584 - DNA, 1140 bp, Pseudomonas aeruginosa
atgggcaactacatcaagcctttgtccgcgggcgtcgcactgatcgcctcggacagcacctggatcgaaggcaaggcgatccagcaactgcaaaccaccgccgagctggacggcatgtgccgcgtcgtcggtctcccggacctgcatcccggccgcggctatccggtcggcgcggcgttcttctccgtcggtcgcttctatccggcgctggtcggcaacgacatcggctgtggcatggccctgtgggaaaccggcctggcccccggcaagctgtcggcggacaaactggaaaagcgcctgggcaatctcgacctgccgctggacgagacctggagcgactgcatcgaagccctggatctaccggcccgcgagcactggcgcgcgctcggcacgataggcggtggcaaccacttcgccgagctacagcaggtcgagaccgtgttcgaccaggccgccctgcacgccctcggcctcgatgccggccgcctgcaactgctggtgcacagtggctcgcgcggtctcggccaggcgatcctgcaagagcaggtcagcctgcatggccacgccggcctgctcgacggcagcctggaagcttccgcctacctggcgcgccacgccgatgcgctgcgcttcgccgagggtaaccgccagctcatcgcccggcgcattctcgaacgcttgcgctgcgacggcctggaactgctcgacatcaaccacaacctggtggcgccggcacaggtcgatggcgtcgacggctggctgcaccgcaagggcgccaccccggccgaccagggcgtgctggtgatccccggctcgcgcggcgactacagctacctggtggagcctgtgccgagcgcgcagagcctgttctccctggcccacggcgccggtcgcaaatggcagcgcggcgagtgccgggaacgcctggcggcgcgcttcagcgtcgaccagttgggctgcacgcgccttggtagccgggtgatctgcggcgaccgccagctgatctacgaggaagcgccggaagcctacaagggtatcgactcggtggtcggcgcgctgctcgaagccggcctgctgcgcctggtcgcccgcctgaagccggtgctgacctacaagacccgtggggagtgctgccgatga

SEQ ID NO: 353585 - DNA, 795 bp, Pseudomonas aeruginosa; identical to SEQ ID NO: 322896

SEQ ID NO: 353586 - DNA, 1749 bp, Pseudomonas aeruginosa
atgctgaaactgctcgacctgctctctgccgtcgccctgctggtgtggggcacgcatatcgtccgcaccggaatcctccgggtctacggcgccgacctgcggcgcatcctcagtcgcagcgtggaaaaacgcccgctggcgttcgccgccggcatcggcgtcaccgccctggtgcaaagcagcaacgccaccgccctgctggccacctccttcgtcgcccagggcctgatggcactggcgccggccctggcgatcatgctcggcgccgatgtcggcaccgcgctgatggcgcgggtgctgaccctcgacctgtcgtggctttcgccattgctgatcttcttcggcgtgattttcttcctcagccgcaaacagacccgcctcggccagctcggccgggtattcatcggcctcggcctgatcatcctggcgctccagctgatcgtcgccgccgccgagccgatgacccaagccaagggcgtcaaggtactgttttccagcctgaccggcgacatcatgctcgacgcgctgaccggcgcgttgttcgccatgatttcctattccagcctggccgccgtgctgcttaccgcgaccctcgccgcgtccaaggtgatctcgctgaaagtcgcgctgtgcctggtggtcggcgccaacctcggcagcggcatcctggccatgctcagcgccaccgcgcaaaacgccgccggtcgccgggtggccctcggcagcctgttgttcaaggtcgccggctgcctgctggtgctgcccctggtggggccgctggcggactggatggatcattggcagttcagcacagccgaactggtgatcgccttccacgtgctctacaacgccgcgcgctgcctcgcctgcctgccgctgaccaacgccatggccagcttctgcacccgtgtgatgcccgaccgtgcccttcccgacgacgtcgcccggccgcgccatctcgaccccgccgccctcgacacgccgagcctggcgctggccaacgcggtgcgcgagaccctgcgcatgggcgacaccgtcgagcagatgctgaacaatctgatgcagatcatccgcggcggcgatccgctgctcggcaaggacatccgcaagctcgacgacgacgtcgacgccctctacaccgcgatcaagctgtatctggcaaggatgccgcgcgaggacctgtccgaacgcgacagccggcgctgggcggagatcatcgagctggcgatcaacctggagcaggccggcgacatcatcgagcacatgctcgccgccgtgcaggacaagaagacctcgcgcagccgctcgttctccgacaccggcctggaagagatcggcaccttgtaccagcagttggtctccaacctgcgcctgggtctctcggtgttcctcaacggcgacctcgacagcgccaagcgcctgcgccgggccaagcagcgcttccgtctgcaggaacggcgctacgcccatgcccatgtcgaccgcctgcaccagcaggtggtacagagcatcgagaccagctcgctgcacctggacctgatcagcgacatgaagcgtctcaactcgctgttctgcgccatcgcctacgccgtgctggacaatccagacgcgccgagcagcgcggccgacgagggcactcggcgggacgaggacgactgggccgacgaagtcgacgacatgacctcggcgccgctggccgagccagcgctcgccgaggagcgagcggaaacgcgccgttcgcgacattag

SEQ ID NO: 353587 - DNA, 1374 bp, Pseudomonas aeruginosa
atgcgttcgttgtccaccctgctgctgttctgcctgctctgcccctggtcgtacgccgaccagcgcagcgaggtcgaagccttccagctggaaaacggcatgggcgtgctgctcaagcccaccgagcagcaccgacacgtctcgatccggctggtggtgggggtcggtttcgccgacttctcgtgccgtgaaaagcagctgccgcacctgctcgagcacctgttcttcagcggcctggacggcggcgacgaggccgacctggaagcccgcatgcaggccctcggcggacaatggaacgcctacaccagcgaaggcgacaccaccttcgtcatcgaggcacctgccgccacccagcggcaggtcctagacctgctgctggacaccatcacccgcaccgaactggacgagccgcgcatcgccgccgccaagcgagtgatcgagcgcgaaggcggcggccattactcgcacctgcagcgctggctcgaccgcgagaacctgggccgtggcgccatggaccaactggcggtggaactgggcctggcctgctcccagcgcgcgccgctggcgccgcttggcgcggagcagctggagcggctgcgcagcgactggtacgtaccgggcaacatgaccctgatcctggtcggtgacctcgatccgcgcctgccggcctatctgacccggaccttcggcaccctggaagaccacgagctccccgagcgccgcgagctgccggcggccaacgggcatgccgaggccaggcgcaccctgatcacccggccattcggcgagggtgcgatgctgcactggatctatccggagccggacgacgccgacccggacgccatggtcctgctccaggcctatatgaacgacgcgctgtacgccgacctgcgtgtgcgtcgcggactcacctacgggccatcgaccgatcgccaggtgttcgccaaccagggcttcttcagcctcgacgcggatgtcgagcgcagcgacctacccgccaccgaggccgccctgcgcgagttgctcgacggcatccgccagcatggcctggacccggggcgtttcaagcgggtgcaattcgccgagcgcgccaggctggcctggagcacccagggcaacgcggcgctggcggactattactggggctcgctggccgactacgaggacggccatttccccaatgaggagcgccgcctggcgaaggtcagcctgcaacaggcgaacgcgctggcgaagcggctgttcgacggcgaaggctacctgcgcatcgaaaagccgctattcgacgacgacatgctctacccattgctgctcgccgccggtctcctggccagcggcctgctctggttcagcctgcgccgccggcgcgcctga

SEQ ID NO: 353588 - DNA, 561 bp, Pseudomonas aeruginosa
atgtccaatgtacaaaatgccagccggtcttccgcgttcgcggcggtagagggcgaccattgggtcgagtccctcgacgatggccgccacgtgctgatccgtcccctgcgcgaggaggaccgggagcgcgaacgccagttcatcaaccggctgtccccggcgactcgccacttccgcttcctcggcgagatcaaggaagccagcccggcgctgctcgatcaactgatggacatcgactaccagcagagcatggccttcgttgccctggtgcacgaggacggtgagctgcgcgaggtcggtatcagccgctacgccgcctgctgcgaggaagggcagtgcgaatgcgcggtaaccatcgccgacgactaccagggtctgggcctcgacgccgtgctgatgcgccatctgatcgacgtggcgcggcgcaacggcttccgccagatgtattcggtggactcggcggccaaccgggcgatgcgcgacctttgttgcgcactgggcttcgtcggccagcgcgacccggacgactcgacccaggtcatccaccgcctggccctgtag

SEQ ID NO: 353589 - DNA, 1290 bp, Pseudomonas aeruginosa
atggcctctaataaatccaaaggtgtcgccattttccgtgtggtcagtggcaacttcctcgagatgtacgacttcatggtgtatggcttctacgccaccgccatcgccaagaccttcttccccggcgacaacccgttcgcctccctgatgctgtccctcgccacctttggcgccggcttcctgatgcggccgctgggtgcggtgttcctgggcgcctacatcgatcgccacggccgccgccagggcctgatcatcaccctcggcctgatggccatgggcaccctgctgatcgccttcgttcccggctatgccacgctgggcgtggcggcgccgttgctggtgctgttcggccggctcctgcagggtttttccgccggcgtcgagctgggaggggtttcggtctacctgtcggagatcgccacgccaggacgcaaaggcttcttcgtcagttggcagtcggccagccagcaggtcgcggtggtcttcgccggcctgctcggcgtgctcctcaaccagtggctgagcccgcaggacatgggcgaatggggctggcgcgtgccgttcttcatcggctgcctgatcgttccggcgctgttcgtcatccgtcgctcgctggaggaaactccggagttcgaggcgcgcacccaccgaccgtcgctgtcgcaggtgctgcgctccatcgggcagaacttcggcgtagtgctggccggtaccgcgatggtggtgatgaccaccgtatcgttctacctgatcaccgcctacacgccgaccttcggcaagaacgaactgcaactgtcggacctcgacagcctgctggtgaccatgtgcatcggcctgtccaacttcatctggctgccggtgatgggcgcgttctccgaccgcatcgggcgcaagccattgttgctgggtgcctccgcgctggcactgctgaccgcctacccggcgctgtcctggctggtccgcgagccgagtttcgccggcctgctcggcgtcgagttgtggctgtcgttcctctacagcagctacaacggcgcgatggtggtggcgttgaccgaggtgatgccggcggacgtgcgcactaccggtttctccctcgcctacagcctggctacggcgaccttcggtggtttcaccccggcggtctgcacctggctgatccacaccctggacaaccgcgcggccccgggtatctggctcagtggcgcggcgctgctggggctgctcgccaccctggtgctgttccgccggcgcggcaaggagatcgccgaggccgagctggccaacgcctga

SEQ ID NO: 353590 - DNA, 1041 bp, Pseudomonas aeruginosa
atgcccaaccaacaacgccccgtcctcaaggcccgcctggagcaactgatcgccctggtcagcggcctgatggcccgctatccgcgcaccatcgccctgttcggcttctgttcgggcgtgttcagtttcatcatggtcgaccggcagaagggcttcgcccaggtgctggcgatcatcatgctggtcagctgggtctggttgatcctcgagaacctcctgcgggagaccttcgcccgccgcttcggctgggagatcccggcgccgctgctgcgctacgcgacccaactgatccaccaggaaagcctgttcttcgtcctcccgttctttctcatcaccaccacctggaacagcgggcaggcgctgttcacagggacgctggccgccgcggcgctgatctccatcaccgatccgctctactatcgctggctgtccaggcgtcgctgggtgttcctcgcctaccacaccctgaccctgttcgcggtgttgctgacctcgctgccgatcctgctgcacctgaccaccccggaaagctaccggttgtcgctgggcatcgccgtcgtgctgtccttccccagcctgctcgtgaccttcccgctacagcactggtggcgcggcttcctgcttctcggcctgaccctggcggtgggcctggccggatggttcggccgcacctgggtaccgccggccaccctgtggctgaccgaagtggcggtgagcagccagttcgacgaccagagccgcacgcccggcgacagcctggagcaggtcggcgccgcccagttgcgcagccagggcctgttcgcctataccgcgatcaacgcgccgcgcggcctcgacgagcgcatctatcacgtgtggatgttcaacgggaaggagttcgaccgcatcgccctggatatccacggcggccgcaaggagggctaccgggcctggacccacaagcagaacttccccggcgacccggtcggccactggcaggtgaaggtactcaccgaggccggacagatgatcggcaccctgcgcttcgacgtcacccagtga

SEQ ID NO: 353591 - DNA, 1230 bp, Pseudomonas aeruginosa
atgctgaacggcttgtggttgggttttttcctggtggcggcggcgagtgcgctggtgcgctggttgatcggcggcgatgcgacggtgttcgcggcgatggtggagagcctgttcgccatggccaagctggcggtcgaggtgatggtcctgctgttcggcaccctgacgctctggctcggcttcctgcgcatcgccgagaaggccgggctggtggagcgcctggcggtgctgctcggtccgttgttccgccggctgatgccggaagtgccgccggggcatccggcgatcggcctgatcaccctgaacttcgccgccaatggcctgggtctggacaacgccgccacgccgatcggcctgaaggcgatgaaggcgttgcaggagctcaatcccagcagcaccaccgcgagcaatgcgcagatcctcttcctggtgctcaacgcctcgtccctgaccctgctgccggtgactatcttcatgtaccgcgcgcagcagggcgcggccgatccgaccctggtattcctgccgatcctcctggccaccagcgcctcgaccctggccggcctgttgtcggtggcgctgatgcagcgcctgcgcctgtgggacccggtggtgctggcctacctgatccccggcgcgttgctgctggccggcttcatggcggtgctcggcacgctctcggccaccgcgctggcgcagctgtcctcgctgctgggcaacctgacgctgttcagcctgatcgtgctgttcctgatcgtcggcgcgctgaagaaggtgccggtctacgagagcttcgtggagggggcgaaggaaggtttcgacgtcgccaggaacctgttgccgtacctggtcgcaatgctttgcgcggttggcgtgttgcgcgcctccggggcgctggaagtggtactcggcgggatacgctgggcggtcgaggggctgggttgggacagccgcttcgtcgaagcgctgcccaccgcgctggtcaagccgttctccggcagcgcggcgcgggcgatgctgctggagaccatgcagacccacggcgtcgacagtttcccggcgctggtcgccgccaccgtgcagggcagtaccgagaccaccttctacgtgctcgccgtctatttcggctcggtcggcctgcagcgcgcgcgccacgcggtgggctgcgcgctgaccgcggacctggccggggtcatcgcctccatcgccgtgtgctactggttcttcgcctga

SEQ ID NO: 353592 - DNA, 1335 bp, Pseudomonas aeruginosa
atgggtaaagccaagctaagcctcgcctggcagatcgtgatcggtctggcactcggtatcgccgtcggcgcagtgctcaaccatttcagcgccgaaaaggcctggtggatcgccaacgtgctgcaaccggccggcgacatcttcatccgtctgatcaagatgatcgtggtgccgatcgtgatttcctcgctggtggtcggcatcgccggcgtcggcgacgcgaagaagcttggccgcatcggcctgaagaccatcatctacttcgagatcgtcaccaccgtcgccatcgtcgtcggcctgctgctggccaacctgttccagcccggcaccggcatcgacatgagcaccctgggtaccgtggacatttcccagtaccagaagaccacccaggaagtgcagcatgaccatgcgttcatcgcgaccatcctcaacctgattccctccaacgtcttcgccgccatcgcccgtggcgagatgctgccgatcatcttcttctcggtgatgttcggcctcggcctgtcgagcctgcccaacgacctgcgcgagccgctggtgaaggtgttccagggcgtttccgagaccatgttcaaggtcacccacatgatcatgaagtacgcccctatcggtgtcttcgccctgatcgcggtgaccgtcgccaacttcggcttcgcctcgctgctgccgctggccaagctggtgatcctggtctacgtggccatcgtcttcttcgccctggtggtgctgggcctgatcgcgcggatgttcggcttctcgatcatgcgcctgatccgcatcttcaaggacgacctggtcctcgcctattccaccgccagctcggaaaccgtgctgccgcgcatcatcgagaaaatggaagcctacggcgcgccgaaggcgatcagcagcttcgtggtgcccaccggctactccttcaacctcgatggctcgaccctgtaccagagcatcgcggcgatcttcatcgcgcagctctacggcatcgacctgtccatcggccagcagatcatgctggtgctgaccctgatggtgacctccaagggtatcgccggcgtgccgggcgtatccttcgtggtgctgctcgccaccctgggcagcgtcggcatcccgctcgagggcctggccttcatcgccggcgtggaccgcatcatggacatggcgcgcaccgccctcaacgtgatcggcaatgccctcgcggtgctggtcatctccaagtgggaaggcatgtacgacgcggccaagggccagcgctactgggattcgctgccgcacctgcggcaggcggtcggcgaagccaagggcaagcaggccaccctcgaataa

SEQ ID NO: 353593 - DNA, 468 bp, Pseudomonas aeruginosa; identical to SEQ ID NO: 322904

SEQ ID NO: 353594 - DNA, 162 bp, Pseudomonas aeruginosa; identical to SEQ ID NO: 322905

SEQ ID NO: 353595 - DNA, 1788 bp, Pseudomonas aeruginosa
atgagcatgccgctgccgatgaagctccggacccggttgttcctcagcatttccgcgctcatcaccgtctcgctgttcggcctgctgctcgggctgttcagcgtgatgcagctcggccgcgcccaggaacaacggatgtcgcaccactacgcgaccatcgaggtgagccagcaactgcgccagttgctcggcgaccagttggtcatactgctccgcgaaacccccgacgggcaggccctggagcgctcgcaaaacgacttccgacgagtcctggaacagggccgggcgaataccgtcgacagcgccgagcaggccgccctggatggcgtccgcgacgcctacctgcaactgcaggcgcacaccccggccctgctcgaagcgcccatggccgacaacgacggcttcagcgaagccttcaatggcctgcgcctgcgcctgcaggacctgcagcaactggcgctggccggcatcagcgaagccgagaccagcgcccgccatcgtgcctacctggtcgccggcctgcttggcctggtgggcgtcgccatcctgctgatcggtttcgtcaccgcccacagcatcgcccggcgcttcggcgcgccgatcgaaaccctggcgcgggcggcggacaggatcggcgaaggcgatttcgacgtgaccctgccgatgaccaacgtcgccgaggtcggccagttgacccggcgtttcggcctgatggccgaggccctgcggcagtatcgcaagaccagcgtcgaagaggtgctttccggcgagcggcgcctgcaggcggtactcgacagcatcgacgacggcctggtgatcttcgacaaccagggacgcatcgaacacgccaacccggtcgcgatccgccagctgttcgtctccaacgacccccatggcaagcggatcgacgaaatactcagcgatgtcgatgtccaggaggcggtggaaaaggccctgctcggcgaagtccaggacgaggcgatgcccgacctggtggtggacgtcgccggcgagtcgcgcctgctggcctggtcgctgtatccggtcacccatcccggcgggcatagcgtcggcgcggtgctggtggtccgcgacgtgaccgagcagcgcgccttcgaacgggtccgcagcgaattcgtcctgcgcgcctcccacgaactgcgtacgccggtgaccggcatgcagatggccttcagcctgctccgcgaacgcctggacttccccgcggagtcacgggaagcggacctgatccagacggtggacgaagagatgtcgcggctggtcctgctgatcaacgacctattgaacttctcgcgctaccagaccggcatgcagaagctcgaactggcttcctgcgacctcgtcgacctgctcacccaggcgcagcagcgtttcattcccaagggcgaggcccgccgggtctcgctgcaactggagctgggcgatgagctgccgcgcctgcagctcgatcgcctgcagatcgagcgggtgatcgacaacctgctggaaaacgccctgcgccatagcagcgaaggcgggcagatccacctgcaggcccggcgccagggcgaccgggtgctgatcgcggtggaagacaatggcgaaggcattcccttcagccagcaaggacggatcttcgagcctttcgtccaggtcggacgcaagaagggcggcgccggcctcggcctggcgctgtgcaaggaaatcatccagctgcatggcgggcgcatcgcggtgcgctcgcaaccgggccagggcgcgcgcttctacatgctgctgccggtgtga

SEQ ID NO: 353596 - DNA, 780 bp, Pseudomonas aeruginosa
atgcgttcgttcgttctactggctttcaccctgtcgctgctggccggctgctccagcggcccgcgcctgaacaccgactacacctcggcgaaccaggacagccgcgtccagttcatcgtcctccactacacctccaccgatctgccgcattcgctgggcatcctcacccacggcggcgtcagcgcgcactacctgatcggcgacgacgagccggccaccgtctaccgcctggtggatgagaaccgccgcgcctggcacgccggggtcagtgaatggcagggccggacctggctgaacgccacctcgatcggcatcgagatcgtcaaccagggctatcgcgatacaccccaggggcgggtctggtatccgttcagcgaagcacagatccaggcgctgatccccctgctgaaggacatcgccaagcgccacggcatcaccccggaccggatcatcggacacagcgatatcgcgccgggccgcaaggtcgatccgggtccgctgttcccctggaagcgcctcgccgacgccggcctggtgccctggccgaagcccggcgaattggcgcgccggctcgccgaactgaacggccagctgccggatgtgcgctggttccagcagcagttggcgcggcacggttacctggtgccgcagaccggcgagctggagaaggacacccgcgacgtcatcggcgctttccagatgaaataccgtccggcccgcttcgatggcgagccggacctggaaaccgccgccctgctgctggcggtgccgacttcctga

SEQ ID NO: 353597 - DNA, 594 bp, Pseudomonas aeruginosa
atggatatgttcggcgtcgccgtcctgatctttctggtcaccgatcccttcggcaacatcgccgtgttcctcgccgcgctgaaaggcgtcgcccccgggcgccgcttgcgcgtggcgtttcgcgagctggccttcgccctgggcctgctgctgctcttcctcaccctcggcgagcacatcctcagcggcctcggcctgtcccgcgaggcgaccgggatcgcgggtggcatcatcctgttcgtgatcgccatgcgcctgatcttcccgtcgccccaagggctgctcggcgaagtgcccgacagcgagccgctgctggtacccctggccaccccggcggtggccgggccctcggcgctggcgatgctgatcaccctgcgcaccaccttcgacggtccgctgtgggagctttacctggcggtggtgctggcctgggccgctactgcgctgatcctgctgcaggcggcgttcctccagcgtttcctcggcccgcgcgggctgaccgccatcgagcggctggccggcatgctgctgatcatgctcagcgtcgatatgctgttggacaacctgcgcagcgtgttgcacatcgccgcctga

SEQ ID NO: 353598 - DNA, 2016 bp, Pseudomonas aeruginosa
atgagtcgcgacgacgtccagcgctggaaagacaagtacctggagaacatcgagcagcaggagcgcctgcaacggcgctgggatgcccgcatcgacctgctgcgtcgcggcctggtgcgtagcagtctggcggccgaaggcagcgacaaggcggtcgaccagtgcatgaaggagctgcgcgagatcctccgtcgcgacgacatggacgccggcctgtcgggcctgattccgcgcctggaaaaggccgtgctcgactccgaacaacgccgccagcaacgcacccagcagaacatcgatgccctcggcgaactggcccagcagttgctggccctgaacctgccgcgggaactgcgcaagccgctgaagcagttcgcccgcgatatcgaggagcgcgcccggcagtcgcgcgagattccgatcctgctcagcgagctgagcaggctgcaacgccaggcgctggccgagcgcaagggcggcgatgccgaagacggtcgcccgagcctgttgcaacgcctgttcggcggcaaggagtcggaaaccgccgcggagccgagcgcatcggtgccgtccgttgtggcggcaagcaatacaccgatccaaccggcggcggccgcgccgtccctgccggtcgccgagcacgacgaggcgccaggcggtccgccgcagccgttgcccgcccgcacggtcgccgccatcgaaagcgcgccagcgggttgggtcggggtcgccgagcgtggcgagccgaaccagatcctgctggatgagcctcgggaaatctggctcgacagcctgccgctgccggccggcctgagctttagcgagacgctggaagacgcgggtgcggagtcgccgcccgcagtgccggcggacgttgaaagcgcgcccgaagctccggccacccctgtggataacctcgacgggcaggcggtagacgaggcctacgaactgccgccgccgataccggagcccggctacagcgcggtggcgccgcacatcgaggccagcctgctgcggctgctcgacggcctgtccctgccgagcagccaccagccccaggccgaggcgctgcgggagcggatcgatggcagcctgaactggtatgagctggtgccggtactcgacgacctggcggtgctggtgctgtccctggcggacagtggccagcgcgacttcgaggaatacctgcggcaactcaacgagcgcctggaaagcttcctcggccacctgggcgacgcccacgccggctataccgacgtgctggacaacgcgcgcggcttcgaccaatcgctgcgtgagcaggtcagcggcctgcaggccagcgtgcagcaggcgaccgacctgaacagcctcaagctggcggtggacagccggctgaacggcctgcttgcctccatggacgaacaccagcgcgaacaggccgagcacgaacaggaggtgtccggccgcctgcaggcgctgatggagcgggtcaacagcatggagcaggatgccaaggcgttccacagccacctggaggaccagcgacagaaagccctgaccgatccgctgaccggcctgcccaaccgcgcggcgctcagcgagcgcctggaacaggaagtggcgcgccggcaccgggacggcggcgatctgctgctggcggtgctggacatcgaccacttcaagcggatcaacgacgacttcggccacctggccggggacaaggtgctgaagatcattgccggcgaattgcgcaaacggttgcggcaggccgatttcatcgcccgtttcggcggcgaggagttcgtcgtcctgctcccggccacgtccctggaagccggccggcaactgctcgaacggctgcgcgcggcgatcgccgcctgtccgttccatttcaagggcgagcccctgagcatcacctgttccgccggcatcaccgcgttcgaaggcaacgaggccggcgaagtggttttcgagcgcgccgaccaagcgctgtatcgagccaagcgcgccggccgggatcgcctggaagtggcctga

SEQ ID NO: 353599 - DNA, 879 bp, Pseudomonas aeruginosa
atgttgcgtcgctggcagcgtgaacctcgggtcgcaggcagctgcgacccgcgagtgaacccctcctgtgacgattcgcgggagttgcccgacgacggccgcctgcgccttctcagcttcaacatccaggtcggtatcagcaccgagcgctaccgccactacctgacccgcggttggcagcacctgctgccccacgcggggcgggcgaccaacctgaagcggatcggcgaactgctcgccgactacgatctcgtcgccctccaggaagccgacggcggcagcctgcgttccggctacgtcaaccaggtcgagcacctggcccagttgggggcgttcccctactggtaccagcagctcaaccgcaacctcgggcgtatcgcccagcacagcaacggcctgctcagccgctggcggccgaccctgctggaagatcatccgttgcccggtccgccggggcgcggcgcgatcttcgtgcgttttggcgaaggcgccgacgcgctggtggtagtgatgatgcatctcgctctcggcgctcgcacccgcacccgccagctcgcctatatccgcgagctgatcggcgactaccgccaccaggtgctgatgggcgacatgaacacccatgccgtcgatcttctggaaaactcgcccctgcgcgacctcggcctgatggcgccgcaggtcgaggcgacgtttcccagctggcggccgcagcgcaatctcgaccacatcctgctcagttccgatctcgctctcgagcgggtcgacgtgctcgaccagccgatctccgaccatctgccggtatcggtggagattcgcctgccggacaacctgcgcgacaaggccttggtcgtgcgcggggatgccgggagtccgccatga

SEQ ID NO: 353600 - DNA, 636 bp, Pseudomonas aeruginosa
atgcgtaacctgattctcaccgccatgctggccatggccagcctgttcggcatggccgcccaggccgacgactataccgccggcaaggaatacgtcgagctgagcagcccggtgccggtgtcccagccgggcaagatcgaagtggtggaactgttctggtatggctgcccgcattgctacgcgttcgagccgaccatcgtgccgtggagcgagaagctgccggcagatgtccatttcgtgcgcctgcctgccctgttcggcggtatctggaacgtccatgggcagatgttcctgactctggaaagcatgggcgtcgagcatgacgtccacaacgccgtgttcgaggcgatccacaaggagcacaagaagctcgccactccggaagagatggccgatttcctcgccggcaagggcgtggacaaggaaaaattcctgagcacctataattcctttgccatcaagggccagatggaaaaggccaagaagctggcgatggcctaccaggtcaccggcgtaccgaccatggtggtcaatggcaaataccgcttcgacatcggctccgccggtggtccggaggaaaccctcaaactggccgactacctgatcgagaaagagcgcgcagcggccaagaagtag

SEQ ID NO: 353601 - DNA, 606 bp, Pseudomonas aeruginosa
atgaacaaacttctcgtgagtctgctgttgaccctgggtctgaccggccttgcccatgccgctggcgatgccgccgcgggccaggcgaaagccgcggtatgcggcgcctgtcacggtgcggatggcaacagcccggcgccgaacttcccgaaactggccggccagggcgagcgttacctgctcaagcagatgcatgacatcaaggacggcaagcgtaccgtgctggaaatgaccgggctgctgaccaacctcagcgaccaggacctggccgacatcgccgcctacttcgccagccagaagatgagcgtcggcatggccgatccgaacctggtggcccagggcgaagcgctgttccgcggcggcaagatcgctgaaggcatgccggcctgcaccggttgccattccccgagcggcgtcggcatcgcaaccgccggtttcccgcacctgggcggccagcacgcgacctacgtggccaagcagctgaccgacttccgcgaaggcacccgcaccaacgacggcgacaccaagatcatgcagtccatcgccgccaagctgtcgaacaaggacatcgccgcgatttccagctacatccagggtctgcactga

SEQ ID NO: 353602 - DNA, 294 bp, Pseudomonas aeruginosa; identical to SEQ ID NO: 322914

SEQ ID NO: 353603 - DNA, 648 bp, Pseudomonas aeruginosa
atgtcagagaagaaccccatcgtcggcctgtgccagaaggccagctttctcatcagtgccgcccaggtcgaccagtgcccccccgacgagggcctggaagtcgctttcgccgggcgctccaatgccggcaagtcgagcgcgctgaacaccctcacccacgccaacctggcgcgcacctcgaaaaccccgggacgtacccaactgctcaatttcttcgccctggacgactcgcggcgcctggtggacctgcccggctacggctacgcgaaggtgccgatccccctgaagcagcactggcagcgccacctggaagcctacctgagcagccgcgcaagcctggccggggtgttcctgatgatggacatccgccacccgctcaccgacttcgaccgactgatgctggattgggcccaggccagccagctaccgatccatgtactgatgaccaaggccgacaagctggccttcggcgcggccaagaacgccctgctcaaggtacgccgggaagtccagcaaggctggggcgacgtcgccaccctgcaactgttctccgcgcccaagcgccagggcgtcgacgaggcgcaaatggtcctggcgcaatggctgggcctgctggacgaggaacaagaggcgttcgaggaagcctga

SEQ ID NO: 353604 - DNA, 2742 bp, Pseudomonas aeruginosa
atgagccaagcgcccctcgtcctggtggacggttcctcgtacctgtaccgcgccttccatgccctgccgccgctgaccacctcgaccggcaagcccaccggtgcggtgaagggcgtgctgaacatgctcctgagcctgcgcaagcagtacccggacagcccgttcgcggtggtcttcgacgccaagggcccgaccttccgcgacgagctgttcgccgagtacaaggccaaccggccgtcgatgcccgacgacctgcgggtccaggtcgagccgctgcatgccagcgtccgcgccctcggcctgccgctgctgtgcgtggagggggtcgaggccgacgacgtgatcggcaccctggcgcgcagcagcgccgcggctgaccgcccggtggtgatttccaccggcgacaaggacatggcgcaactggtcgacgggcacattacgctggtcaacaccatgaccggtagccgcctcgacgtggatggcgtgaaagagaaattcggcgtcggtcctgagctgatcatcgatttcctcgccctgatgggcgacaaggtcgacaacatccccggcgttccgggtgtcggcgagaaaaccgcgctgggcctgctgaccggcgtcggtggcggcctggaggtgctctacgccagcctggacaaggtgcccgagctaccgatccgcggcgccaagggtttgccggcgaagctcgaggaaaatcgcgagcaggcgttcctgtcctatcagttggcgaccatcaagaccgacgtcgaactggacgtggagatcgacaagctgtatcccggcgagccgcagcgcgaagcgctgatcgccctgtaccgcgagctggagttcaagaactggctggacgacctcctgcgcgaggccaaggaggccggcgagaacggcgaggcggaaacgcctatccaggccgaggtcgactacgacgtggtgctcgaccaggccggattcgacgcctggctgaagaagctggaggaggccgagctgatcgccttcgataccgagaccaccagcatcgacgcccagcaggcgcaggtggtgggggtgtccttcgccgtgaaggagggcgaggccgcctacgtgccgctggcccacagctacatgggcgttccggagcaactggaccgtgacgcggtgctgcgtgcgttgaaaccgctgctggaggatccgaagaagctcaaggtcggccagcatgccaagtacgacatcaatgtcctggccaatgccagcacccccatcgcgctgcggggcgtagcctacgacaccatgctcgagtcctatgtgctggactccaccgccactcgccacgacatggacagcctggccctgaagtacctcggccacagcaccatccgtttcgaggacatcgccggcaagggcgccaagcaactgaccttcgaccagatcgccatcgaacaggccgggccctatgcggcggaggacgccgacgtgaccctgcgcctgcaccaggccctgtggcagaagctggaggcgatcccgtccctggccagggtcctgaccgatatcgagatgccgctggtaccggtgctggcgcggatcgagcgcaacggcgcgctggtcgacgccaacctgctgggcatccagagccgcgaactgggcgagaagatggtcgccctggagcgccaggcatacgacctggcggggcaggaattcaacctcggctcgcccaagcagctcggcgcgatcctctacgacaagctcggcctgccggtgctgagcaagaccgcgaccggccagccgtccaccgccgaggcggtgctcgccgaactggccgagcaggacttcgagctgcccaaggtgatcatgcagtaccgctccatgagcaagctcaagagcacctacaccgaccgcctgcccgagcagatcaacccgcgcaccgggcgcatccatacctcataccaccaggcggtggcggctaccgggcggctgtcgtcgagcgacccgaacctgcagaacatcccgatccgcaccgcggagggccggcgcatccgccaggcgttcgtcgcgccgcagggctacaagctattggccgcggactactcgcagatcgagctgcggatcatggcccacctggccaaggacgatggcctgctggatgccttccgccacgacctggacgtacaccgcgccaccgcggcggaagtcttcggcgtgccgctggaagacgtcagtggcgaccagcgacgcagcgccaaggcgatcaacttcggattgatctacggcatgagtgccttcggcctggccaagcagatcggcgtcgagcgcaaggaggcccaggcctacatcgaccgttacttcgcccgctaccccggcgtcctggcgtacatggaacggacccgcgcccaggccgcggagcagggcttcgtcgaaaccctgttcggccgtcgcctgtacctgccggagatccattcgaagaacggcgccatgcgcaaggccgccgagcgcaccgcgatcaacgcgccgatgcagggcaccgcggcggacatcatgaagcgcgccatggtcgctgtggataactggctgcaggaaagcggcctcgatgcccgggtgatcctccaggtgcacgacgaactggtgctggaagtgcgcgaggacctggtcgagcaggtgtgcgagggaatccgcccgctgatgagcggagcggcgaccctggacgtaccgctggtggtcgaggcgggtgtcggttcgaactgggacgaagcccactga

SEQ ID NO: 353605 - DNA, 291 bp, Pseudomonas aeruginosa
atgcgtacgctgaaccgcttgatgctcgccggactgctggcgttcgccccgctcgtcgcgatggcggcggacgacgacgcgccctccggcgagcccgacgtaaccatccgccaggagggcgacaagaccatccaggaataccgcgtgaatggcttcctctacgccatcaaggtggttcccaagcatggcaaaccctatttcctggtccgcgccgacggcagcgatggcaacttcattcgctccgaccagccggacaagctgattccacaatgggagatcttcagctggtga

SEQ ID NO: 353606 - DNA, 951 bp, Pseudomonas aeruginosa; identical to SEQ ID NO: 322918

SEQ ID NO: 353607 - DNA, 690 bp, Pseudomonas aeruginosa
atgtcagcagtcaagatcacgcagaagatcaagggcttcaaggtcgtcaacgaagccgaggagcaggcccttgccgccgccgcggaagccgcgtcggtggtgcagatggacgagaccctggagcgcccggataccctgatcggcgccacctacaagatcaagtcgccgctgttcgagcacgcgctctacgtgaccatcaacgacatggtcctcaacgcgggcacggcgcacgagcagcggcgtcccttcgagatcttcatcaactcgaagaacatggatcatttccagtggatcgtcgcacttacccgcatcatgtccgcggttttccgcaagggcggcgactgtaccttccttgtcgaggaactcaaggcggtattcgacccgcgcgggggctacctgaagaaaggcggcatctacatgccttccatcgtcgccgagatcggcggcgtgctggagcgccacctgacggccatcggcttgttgcgtggccctgaactggacgaggaacagcgccttttcctcgcggaaaaacgcgccgcctacgaggccgcccagggcaccagcaaggtcgagccgggcgaaggcttccccgccggcgcgcaactgtgcggcaagtgcaacagcatggcggtggtacagatggacggctgcgccacctgcctcaactgcggacactcgaaatgtgggtga

SEQ ID NO: 353608 - DNA, 2205 bp, Pseudomonas aeruginosa
atgttgcgtacggtggccggcttcggacgccccaacaaccatcgggaggttaatcagcggatggccaagacagacgcacgcagtccccgcaccgaacgcgggaccatcgccctgcaggacgcgtcgcaggatatctgggacaagaagtaccggctcaagagcaaggacggtacgccggtggatgccagcgtcgacggtacctggcaacgcgtcgcccgcgcccttgccgatgtcgaggaaaaggcctcccgcgaacactggtacgggcgcttcctctgggccctgcgcaacggtgccatcccggccggccggatcatctccaacgccggcgccctggggcacaagccggccacctcgactatcaactgcaccgtgtccggaaccatccaggactccatggacaacatcctcgagaaagtccacgaggccggcctgacgctcaaggccggctgcggcatcggctatgagttcagcaccctgcgcccgcgcggcgcctacgtttccggtgccggtgcctacaccagcgggccgctgtcgttcatggacatctacgacaagatgtgcttcaccgtcagctccgccggcggccgccgcggcgcgcagatgggcaccttcgatgtcagccacccggacgtccgcgaattcatccgcgccaagcgcgaggacgggcgcttgcgccagttcaacctgagcctgctgatcaccgaccagttcatgcaggcggtggaacaggacgccgactggccgctggtattcccggtgcacgtgaaggagcgcgacgagatcgacctcgacgaccccaacgcggtggtctggcgcgaatggccgatccaggacgactacgtccagcgcgccgacgggctggtcgcctgcaaggtctacggccaggtccgcgcccgccacctgtgggacatgatcatggtctccacctacgactatgcggagccgggcttcatcctcatcgaccgggtcaacgaactgaacaacaactggtggtgcgaggcgatccgcgccaccaacccctgcggcgagcagcctctgccgccgtacggctcgtgtctgctcggctcggtcaacctcacctgcttcgtcgagcagccatttggcgacgaggcgcgcttcgactgggaccgtttccgcgaagtggtgcgggtgtttacccggatgctcgacaacgtggtggaaatcaacggcctgccgctggaacagcaacgccaggaaatccttggcaagcgccggcatggcatgggcttcctcggcctgggctcgaccctgaccctgctcaagctgcgctacggcagtcccgaggcctgcgtattcaccgaggaagtggcgcgggaaatggccctggtgggctgggaagtggccctggagctggccagggagaagggcccggcgccgatcctggcgcaggactacgaagtcactgcggaaatgcttcgcaagcgtccggaaatggccgccgatggctataaggccggcgaccgcatccgcggcagcgtgcttcacgccaagtattcccgctacatgcagcgggtcgccgaacatgctccggaactgatcgaggcgttggctgaaaccggcgcgcgcttcacccaccacagctccatcgcgccgaccgggaccatcagcctgagcctggccaacaatgcctccaacggtatcgagccgagcttcgcccaccattattcgcgcaaccttatccgcgaaggccgcaagaccaaggaaaaggtcgaggtctacagctacgagctgctggcataccggaccctggtcaacgcccaggccctgccggacagcgacgacccggcgcgacgcctgccggactacttcatcaccgccgacagcgtcaccccggcgcagcacgtggacatccaggcggcggcgcagaagtgggtcgattcgtcgatctccaagaccgccaacgtgcccaccgactacccgttcgaggacttcaaggacatctaccgctacgcctggcaccagggactcaagggctgcaccaccttccgcttcaatcccgaggcgttccagggcgtgctggtcaaggagtccgacctggagaagacccgctaccgcttcgaactggaggacggcagcgtggtggagttcaagggcaacgagcaggtcgagtacgacggtgagatccataccgccgccaacctcttcgacgccttgaaagaaggctattacggcaagtactga

SEQ ID NO: 353609 - DNA, 924 bp, Pseudomonas aeruginosa
gtgaccctgcgtccctttgccctgctgtccgcctgcttcgccctgttcctgctggcttcgccggcgcgcgccgaggtcagcgtgctgaccagcatcaaaccgctgcaactggtcgccgcggccatccaggacggcgtcggccagccggacgtactgctgccgccgggcgcctcgccacaccagtacgccctgcgtccttccgacgtacggcggctgcgcgaggtgcaattgttctactggatcggcccggacctggaaaacttcctgcccaaggtgctcgccggccgccagggcgccagcgtcgcggtgcaggacctgccgggcatgcacctgcgcaagttcgtcaatttcgaggaagaggagcatgccgggcacgacgagcacgaccatgaccatcgtcccggcatgctcgacgcccacctctggctgttgccggccaacgcccgcaccatcgccgcgcggatggccgaggacctggcccaggtcgacccggccaacgccgggcgctaccgggccaacctgaaggccttcgaggagcgcctcggcgggctcgacggcaaactccgcgaacgcctgggcaagcttgccggcaagcctttcttcgtcttccatgaagccttcgactatttcgaggaagcctacgggttgcgccataccggcgtgttcgcggtatccgcggaggtccagccgggagcacgccatgtcgccgccatgcgcgcccagctgaaggccgccggtccggcctgcatcttcagcgagccgccgcttcgaccgcggctggccgacaccctcagcgaaggcctgccggtgcgcctggccgaactggacgacctgggcgtgaacgtgagcgtggacgccaacggctatgagaatcttctgaacaacctggcaggcgaatttgccggctgtctggaaaagctctga

SEQ ID NO: 353610 - DNA, 504 bp, Pseudomonas aeruginosa; identical to SEQ ID NO: 319292

SEQ ID NO: 353611 - DNA, 810 bp, Pseudomonas aeruginosa
atggacaacgcgctggtgcggctgacccaggtcggcgtgtccttcaacggccaggcggtgctgagcgatgtcgacctggccatcgagcccggccagatcgtcaccctgatcggccccaacggcgccggcaagaccaccctggtacgcagcgtgctcggcctgctcaagccgcacgtcggcgaggtctggcgacggccgcggctgaccatcggctacatgccgcagaaactccacgtcgacgccaccctgccgctcagcgtactgcgcttcctccgcctggtacccggggtcaggcgcgagcaggcgctggcggcgttgcgcgaggtcggcgcggcgcacgtgctggagcgcccgctgcaaagcatttccggtggcgaactgcaacgcgtgctgctggcccgcgctctgctgcgcaagcccgagctactggtgctcgacgagccggtgcagggcgtcgacgtcgccggccaggccgaactctaccgcctcatcggcaaactgcgcgaccgctacggctgcggtgtgctgatggtctcccacgacctgcacctggtgatgagcgccaccgaccaggtggtctgcctgaaccgccatgtctgctgctcagggcaccccgagcaggtcagcggcgacccggccttcgtcgagctgttcggccaggacgctcgcagcctggcgatctaccaccaccatcacgaccatgcccacgacctccacggcgaggtggtcaaggccggtcccggcgccttgcctccaggcacccgcttcactcctgtccacaagcacggccccgactgcaaccatggctga

SEQ ID NO: 353612 - DNA, 789 bp, Pseudomonas aeruginosa; identical to SEQ ID NO: 319290

SEQ ID NO: 353613 - DNA, 792 bp, Pseudomonas aeruginosa
atgatgtcgtccttctttcgcctgctgtccgtcctggcggcggcgctgctggtcagcgcctgccagggcaatgcgtcgtcgcaaccgacgccggtggtcgcgccccaggcgcagcccgccgatccctatgccgaactgcagcaaaccctggccgccggcaagctcgaacaggccgagcaacaatggctggccctgcgcagcgcagccgccggcgacgagcgcgtcgaagcgttccgccgccagttggccgaggcctacatgcagcgcggggaaaccgcgctgcgtcaaggagacctcaacaccgccaccagcgccctcggccatgcccgcggactgatgcccaaagcgccggcgctgaccgccgggctggacggtgcgatcaaccgcgccaaggtcgatcccgcccgcgccgagcaggcccgacgcatgcagcaggcggcccagcagcagatgcagcagatcatccagacgccgcccggcggcgagctgaagccgctgcccggcgctccccacctgatcgatccgcaagcggccagcagcgccgtgcccctgccgatgctcgacggcaccggccagggcggcctcggtgcggtgctcgacgcggtggccgcggatgtcatcgcctaccgttgcagggtgcatatcgaagtgcgccgggacagcgactatccgctggtttccgaccagctcctggcgcgggtgaagaagctctcacccgatttcgacctgcatctcagccatgtcgtacaggccgacaagccaacccgattgatacttaccccccggaattga

SEQ ID NO: 353614 - DNA, 1008 bp, Pseudomonas aeruginosa
gtgatcgaattccacgacgtccacaagacctatcgagttgccggtcgggaaatccccgccttgcaaccgacccgcctgaacatccaggccgggcagattttcggcctgatcggccattccggtgccggcaagagcaccctgctgcgcctgatcaaccgcctcgaggagcccagcggcggccgcatcctggtcgagggcgaagacgtcaccgccctcgacgccgaaggcctgcgccgtttccgccagcgcgtcgggatgatcttccagcacttcaacctgctgtcctcgaagaccgtcgccgacaacatcgccatgcccctgcgcctggccggcggcttcagccgtgccgaagtcgatgcgcgggtctccgagttgctcgcgcgggtcggcctgtccgaccacgcgcgcaagtatccggcccagctctccggcggacagaaacagcgcgtcggcatcgctcgcgccctggcctgccggccgagcatcctgctctgcgacgaggccaccagcgccctcgatccgcagaccaccgcctcggtcctgcaactgctggcggaaatcaatcgcgagctgaagctgaccatcgtcctcatcacccacgagatggacgtgatccgccgtgtctgcgaccaggtcgcggtcatggacggcggcgccatcgtcgagcagggcgatgtcgccgatgtcttcctccatccgcagcacccgaccacccgccgcttcgtgttcgaggccgaacgagtcgacgaggacgagcgccacgacgatttcgcccacgtgccgggtctcatcctgcgcctgaccttccgcggcgaagccacctatgcgccgctgctgggcaccgtggcgcggcagaccggggtcgactacagcatcctttccggacgcatcgaccgcatcaaggacacgccctacggccagttgaccctggccctggtcggcggtgacctggaagccgccatgagccagttgaacgccgctgacgtacatgtggaggtactgcgctga

SEQ ID NO: 353615 - DNA, 678 bp, Pseudomonas aeruginosa
atggacttcttcgaaaccatgagcttcgccaacatcgactggtacgaaatctggctggccagcgtcgacaccttctggatgctcggcggttcgctgctgttcacggtggtcctcggcctgcccctcggcgtcctgctgttccttaccgggccacggcagatgttcgagcagaaggcggtctacaccctgctctcgctagtggtgaacatcctccgttcgttgccgttcatcatcctgctgatcgtgatgatcccgctgaccgtactgatcaccggtacctcgctgggcgtcgccggggccatcccgccgctggtggtgggcgccacgccgttcttcgcgcgcctggtggaaaccgccctgcgcgaggtcgacaagggcatcatcgaggcaacccaggcgatgggcgccagcacccggcagatcatctggaacgccctgctgccggaagcccggccgggcatcatcgccgccatcaccgtcaccgccatcaccctggtctcgtacaccgcgatggccggagtggtcggcgccggcgggctgggcgacctggcgatccgcttcggctatcagcgcttccagaccgacgtgatggtggtcaccgtggtgatgctgctgatcctcgtccagattctgcaaaccgtgggcgacaagctggtggtgcacttctcgcgcaagtaa

SEQ ID NO: 353616 - DNA, 783 bp, Pseudomonas aeruginosa; identical to SEQ ID NO: 319286

SEQ ID NO: 353617 - DNA, 858 bp, Pseudomonas aeruginosa
atgcaagaactaaaacaacgcctggcctccccgcccgccgaactgacgcccgcggagcgcaaggtggtgcgtgccctgctcgatgactacccgcgcctcggcctcggtccgatgacgcgcctggcccggcacgccggagtcagcgacccgacgatcatgcgcctggtgaaaaagctcggcttcgccggctacggcgacttccaggaagcgctgctggccgacgtcgacgaccgcctgcgctcgccgcgcaccctgctcgccgaacgccgcgagcggatgggccgcgacgacacctgggcgcgctacctcgaccaggctggccagagcctgcaacagaccctcggcctgacccgccccgatgacatccagcgcctcgccgactggctgctcgacagccgcctgcgcgtgcactgccacggcggacgcttcagccgtttcctcgccggttacctggtcacccatctgcgcctgctgcgcccgcagtgccgattgctcgacgacggcgccctgctccccgaccagctctacgacctcggccgccaggacctgctggtcctgttcgactatcgccgctaccagagccaggcccagcacgtggcccaggccgccaaggcacgcggcacacggctggtgctgttcaccgacatctacgcctcgccgctgcgcgaacacgccgacctgatcgtcagttcgccagtggaatccgcctcgcccttcgactcgctggtgccggccatggcccaggtcgaggcactggtagcgaccctggtggcgcgcatgggcgcgccgctcgacgaacgcctggagggcatcgaccagctccgcaacgcgttcagcagtcatatactggaggaatga

SEQ ID NO: 353618 - DNA, 654 bp, Pseudomonas aeruginosa; identical to SEQ ID NO: 319284

SEQ ID NO: 353619 - DNA, 1332 bp, Pseudomonas aeruginosa
gtgaaccgcctgcagccggtacgcctggtcagcttcgtcaccaccgacctggccggcatcacccgcgggcgttcgctgcccctggcgaccctggaggagcaattggccagcggttgcggctgggtaccggcgaacagttcgctgaccccgcaggacctgatcgacgagagcagcccctggggcagccacggcgacctgcgcctgctgcccgacccgaacagccgggtgcgcgtcgagcagggtcccgacgccgctgcgccggcgctcgactacctgcacggcaacctggtggaaaccgacggcacgccgtggccggcctgcccgcgcggcctgctgctggccgaggtggagcgctatcgcgacagcggcctgcaggtcatcgcggcgttcgaacacgaattcagcctgctcggcctgcccggcgagcgtccggccgcggcgttttcgctgcaggcccagcgtgccgccgggcagttccccggctggctggtcagcgccctggcccaggccggcaccgagccggagatgttcctccccgaatacggccagcgccagtacgaggtcacctgccgcccggcgcagggcgtggccgccgccgaccgcgcggtgaacgtccgcgaggtcactcgcgaagtggcgcggcagatgggcctgcgtacctgcttcgcaccgctgccggcacccggcgcggtgaccaacggggtgcacctgcacctgagcctgcaacatgccgacggcagcccgctgctgtacgagcccggtcgacccaacgatctctccgaactcggcgagcactgggccgccggcgtgctcgcgcacctgccggcgctgtgcgcgctgaccgcgcctaccgccgcctcctacctgcgcctgaaaccccaccactggagcgccgcctacgcctgcctgggactgcgcaaccgcgaagcggcgctgcgcatctgtccggtggtgagcgtcggcggcaagccgttgggcaagcagtacaacctggaattccggccgatggacgccaccgcctgtccgcacctggcgatggccgcggtgctgatcgccggccgcctgggcatcgaacgacgcctgccgctgcgcgccctggccgatgtcgatccgcacggcctcagcgacgaagagcgccaggcccgcggcatccaggccctgccggcgaccctcggcgatgcgctcgactgcctgcagcgcgacgagacgctctgcgccgagctgccaaagccgctgctggacacctacctcgccatgaagcgccacgaactggcgctgacggcgggcctttccgacgacgacctgtgccgccactatgccgagctttactga

SEQ ID NO: 353620 - DNA, 753 bp, Pseudomonas aeruginosa
atgccgagctttactgacaaccccgaactcggcatctaccagctgcctccctaccgcctgctcaaccccgaagggcgcagcccggtggtcctggtctgcgagcacgccagccggcacatcccgctggagttgcagcgcctcggcctggaccaggccgcggcggaagaacacatcgcctgggatatcggcgccctggcgctggccgaagagctttcccggcgactcgacgcgccattgctggcggccggctactcgcgtctgctgatcgacctgaaccgaccgctggaggcgcccgacagcattccgccgcacagcgaggtctaccccgttcccggcaaccgcgagctgtccgagacggtgcgccgctatcgccaggattgcctgttccatccgttccaccagcgcctgacgcaactgctcgacgagcgccaggccgccggcgtgccgacccgtgtggtcggcgtgcacagttttaccccggtgtaccacggcagaccccgcccgctggttgccggggtgctttatcgcaacgccggcgcctacgccaggcgcatcctcgacggtttgcgccggcacggcctggaagtcgccggcaaccagccctatgcgatcgacccggcggaagacactaccgttccggtgcatggcgacgcacgcggtctggaagcggtgctgctggagatccgcaacgatggattgcgcacgccggatgcggtgtacgcctgggccgagcgtctgtatccctggctctga

SEQ ID NO: 353621 - DNA, 1350 bp, Pseudomonas aeruginosa
atggccatcgaacagttcggataccggcaacagctgcgccgcagcctgtccctgagcgacctgatcatctacgggatgatcttcatgatcccgatcgccccgttcggggtctacggctgggtccatgccgacgcccacggcatggtgccgatggcctacctggtgggcatgctggcgatgctcttcaccgccctcagctacggagccatggccaaggcctttccgattgccggctcggtgtattcctacgcccagcgcggcatccacccccatgtcggcttcatcgccggctgggtgctgctgctcgactacctgctgatcccgccgctgctctacgtgttcagcgcgctggcgctgaaccacttgttcccggcgatccccaagctggcctggatgctgctgttcctggtctcggcgaccctggtcaacctgcgcggcatcaccttcgccgcccgcgccaacctgttgttcctgatcggagagctggtggtgctggcgatcttcctggtggtcggctaccaggcgctggaaggcggcctgggcaacggccggctgaccctcgaaccgctgtatcgcccggaagccttcgatctcggcctggtaatgaaggccgcctcgatcgccgtactgtcgttcctcggcttcgacgccatctccaccctcgccgaggaggtcaagggcgatcccgcccggcagatcggccgcgccgcgctgatcgcgctgttcatcatgggcggcatcttcatcgcgcaaacctggctggccaccgacctcgccgccgggatgaacttcaagtcggcggacaccgccttctacgagatcgccgaagcggccggtggccagtggctgtcgatgctgaccgcggtagccaccgcgctggcctggggtgtcacggtgtcgatcacctcgcaggcagcggtctcgcgcctgctctactcgatggcccgcgacggcagactgccgcgcgcgctggccagggtccatccgcgctaccagacgccgcacgtcagcctgtacctggtggcggtgctgtcgctgggaatcggctgggccttcctcgacgcaccggacgtgctcacctcactggtgaacttcggtgccctcaccggcttctgcctgctgcacctgagcgtgatcaaccactactaccgccgccagcgctccggccagtggttgcggcatctactgttcccgctggtgggcctggcgatcatcgcctacgtgctgtacagcatgagcctcgacgcacagttgctcggactggcctggatcgcggtggggctggtctacctggcgttgctgcaacgcggcgggcgccaggcgccaacggagttggcgaaggatctctga

SEQ ID NO: 353622 - DNA, 1344 bp, Pseudomonas aeruginosa
atgagtgaccaggtgatcttcgtcgacgacgaagcgacgatccgcgaagcggtgcagcaatggctggagctgtccggcttcgaggtgcgcctctgcctgcgcgccgaggaatgcctgggagcgttggacaagtccttcgccggggtggtcatcagcgatgtgcgcatgcccggcatggacggcctgcaactgctcgccaacctgcaggcggtcgatcgcgacctgccggtgatcatggtcaccgggcacggcgacgtgccgatggcggtggaggccatgcgccagggtgcctacgacttcatcgagaaacccttcacgcccgagcgcctgctcggcagtttgcggcgcgcgctggaaaagcgccgcctggtgctggagaaccggcgcctgaaggagcaggccagtctcaaggaccaggtcgatgcgcgtctgcttggcgtgtccaagccgatggaagcgttgcgccggcaggttctggccctggcgccgaccccggtgaacgtcctgatccgtggcgagaccggcagcggcaaggaactggttgcccgctgcctgcacgacttcgggccgcgcgccgacaagccgttcgtggcgctgaactgcgcggcgattcccgagcaactgttcgagagcgagctgttcggtcatgagagcggtgcgttcaccggcgcgcagggcaagcgcatcggcaagctcgagcatgcccatggcggcaccctgttcctcgacgagatcgaaagcatgccgttggcgcagcaggtcaagctgctgcgcgtcctgcaggagcagcaactggagcggctcggctcgaaccagagtatccacgtcgacctgcgggtgattgccgcgaccaagcccgacctgctggccgaagcacgtgccggacgcttccgcgaggacctggtgtatcgcctgaatgtcgccgagctgcgcctgccgccgatccgcgagcgtcgcgaggacatcccgctgctcttcgaacatttcgccagcgttgccagccagcgcctcggccgcgagccgcagcccgccgcgccggcggaactggcgcggctgatggcccacgactggccgggcaatgtacgcgagctggccaacgccgccgagcgtcatgtcctcggcctggagcgtggggacgcggaggaaggcggcggccttacctcggggctggcggaacgcatggaagccttcgaggcggagtgcctgcgccaggcgctcggccagtgccgcggggatatcaaggcggtgatggagttgctgcaactgccgcgccggacactcaacgaaaagatgctgcggcatggcctcagccgcagcgatttcgtcggcgaagagccggcttga

SEQ ID NO: 353623 - DNA, 879 bp, Pseudomonas aeruginosa
atgtcgctatccccctggtcccattcctgctcggccggtttcaccctgcgcggctggcgcagcgaaccgagcggcaagccgttgctgcatttcctccatggcaacggcttctgcggccgcacctacgaaccgatgctgcgtctgttggcggaggatttcgacctctggctgtgcgacatccagggccacggcgaaagcgaccacggcggccgcttccacggctggaaccgcaacgccgagatggcggtggaggccttcgaggccgggcgcggtccctatggagatgtccagcgactggcctgcgggcacagcttcggcggcgtcctcagcagcctcgtcctggcccgccatcccaccctgttcgcccgcgccgtgctgctcgacccggtactgttcaccccggcgatgatcggcgtgatggcactttccgagaccctcggcctgcaattgcgcggcagcctggcgaagaaggcgcgcctgcgccgcagccagtggcccgatcgcgcagccgcctacgccggcttgcgcggccgcggtatcttcaagggctggaccgacgaggcgctgtgggcctacgtggaatatgcgctgaaggagagcgacggcggagtcgagctgaagtgccggccaagccgcgaagcggagatcttcagctccttccccaggcggctgtggccgtcgctgggcaagatcaccacgccgacccgcgtgctctacggtgaccgcacctaccctttcgtcgccaagtcggtggcgcgctggtgctcgctcaacccccaggtcagcgcccacgcggtggtcggcggccactgcttcatgcaggaagacccggccgctgccgccgaacgcgtacgcgactttctcctgcccaatccatga

SEQ ID NO: 353624 - DNA, 789 bp, Pseudomonas aeruginosa
atgcgccctctcctcttcagcgcccttctcctgctctccgggcatgcccaggccagcgaatggaacgacagccgggccgtggacaagctattcggagcggccggtgtgaaaggcaccttcgtcctttacgatgtgcagcggcagcgctatgtcggccatgaccgggagcgcgcggaaacccgcttcgttcccgcttccacctacaaggtggcgaacagcctgatcggcttatccacaggggcggttagatccgccgacgaggttcttccctatggcggcaagccccagcgcttcaaggcctgggagcacgacatgagcctgcgcgaggcgatcaaggcatcgaacgtaccggtctaccaggaactggcgcggcgcatcggcctggagcggatgcgcgccaatgtctcgcgcctgggttacggcaacgcggaaatcggccaggttgtggataacttctggttggtgggaccgctgaatatcagcgcgatggaacagacccactttctgctccgactggcgcagggagaattgccattccccgccccggtgcagtccaccgtgcgcgccatgaccctgctggaaagcggcccgggctgggagctgcacggcaagaccggctggtgcttcgactgcacgccggaactcggctggtgggtgggctgggtgaagcgcaacgagcggctctacggcttcgccctgaacatcgacatgcccggcggcgaggccgacatcggcaagcgcgtcgaactgggcaaggccagtctcaaggctctcgggatactgccctga

SEQ ID NO: 353625 - DNA, 501 bp, Pseudomonas aeruginosa
atgggggctaattcacatggcgaaaacaccccccactcgctgcctgccgggagaacgggtaagctggccgtccccctacaccggattccgctcgtgaccctgggtaaccttttcgtcatgctcctgttgggcgccgccgcagcctggtggtggcgcgcccatggcgtgcgcgagcgggcgttgctgctggccaagcagcattgcgccaagcagggcgtggaactgctcgacgagaatgtcgcgcgccggcgcctgcgcctggcccgtgaccaccgtggtcagtggcggctgagccgcgagttcggtttcgaattcaccgtcagcggcgaggaacgctacgccgggcgcatcgtcatgtatggctatcacctcggcgccatcgaattggccccgcatcgcttcgaggcggccgccgaggtcgacaacccgccggtgcatagcgccgaggtgattcgcctcgacgagtggcggcagtcccggcagaaaaaggtcggcgactga

SEQ ID NO: 353626 - DNA, 867 bp, Pseudomonas aeruginosa
atgccacgtacaccccacctgctcgccatccagtcccatgtggtcttcggccacgccggcaatgccgcggcggtgttcccgatgcagcgcatcggaatcaacgtctggccgttgaacacggtgcaattctccaaccacacccagtacggtcgatggaccgggcaggtgctgccgccggagcagattccggcgctggtggacggtattgccggcatcggcgaactgagcaactgcgacgcggtgctgtccggctatctcggcagcgccgcccagggccgcgccattctcgatgtggtgacacggatcaaacaggccaaccctcgggcgttgtacctctgcgacccggtcatgggccacccggaaaaaggctgcatcgtggccccggaagtcagcgacttcctgctggaagaagccgccgcggtcgccgactacctgtgccccaaccagttggagctggacagcttctgcgaccgccagccgaactccctcgccgactgcgtggaaatggcacggagcctgctggcacgcggtcccagggcaatcctggtaaagcacctgaactatccgggcaagtccggcgacaccttcgagatgctgttggtggccgccgatcaggcctggcacctgcaacgcccgctgctggccttcccgcggcaaccggtcggagtcggcgacctggcctcggggctgttcctctctcgcctgctgctcggcgacgacctgcgtaacgccttcgaattcaccggcgccgcggtccatgaagtgctgctggaaacccaggcctgcggcagctacgagctggaactggtgcgggcgcaggatcggatcgcacacccaagggttcgtttcgacgcagtgcgcctttag

SEQ ID NO: 353627 - DNA, 585 bp, Pseudomonas aeruginosa
atgttgcgccgtctctacgactggaccctgcgcctggccggccatccccgcgcggagctggccctgggcggggtgaccttcgccgaaagctcgttcttcccgattccgccggacgccttgctggtgccgatggtcctggccaaccgggccaaggcctggcgctacgcggcgatctgcgcgatcagctcggtgctgggcggcatcgccggctatttcatcggcttgctgctgttcgagagcgtggccatgccgatcctggcgttctatggcttgctggagaacttcgaacaggtcgccgaacgctacaacgaactgggctggctgatggtgctgctgggcggcggcttcacgccgctgccgtacaaggtgatcaccattaccagcggagtgacccagctcgacctctggctgttcgtcgggctcagccttgtcgcccgcagcctgcgcttcgccgctacctgcgctttgctgttctgggctggcccacgcctgaagaccctgatcgagcggcgtctgggcatggctttcgtgctgatggcggtgatggtggtcggtgggttgatgttggggaaatacgttctttga

SEQ ID NO: 353628 - DNA, 1704 bp, Pseudomonas aeruginosa
atgcaccatacgccgttactcactacactcgccgcggggttcgtcctcgccttcctcttcggggccctggccaatcgcctgcgcatttcgccgctggtcggctacttgctcgcgggcgtcctggccgggccgttcactcccggctatgtcgccgaccaggcgctgtcgcaggaaatcgccgaactcggcgtgatcctgctgatgttcggcgtcggcctgcacttctcgctcaaggacctgctctcggtgaaggccattgccattcccggggcgctggtgcagatcggcgtcgccacgctgcttggcatcggcctggccaagctgctcggctggagcttcggcggcggcctggtattcggcctgagcctgtcggtggccagtaccgtggtgctgttgcgcgccctggagcagcgccagttgctggacaccaagcgtggcaggatcgccatcggctggctgatcgtcgaggacctggcgatggtcctgaccctggtactcctgccggcgctcgccggcaccctcggcggcaagaccgacggcggcgaagccggtctgctctggccgctgctgattaccctgggcaaggtcgccgccttcgtcgccctgatgatcttcggcggtcgccgggtggtgccctgggtgctggagaggatcgccgccagcggttcgcgggagctcttcaccctggccgtgctggccattgccctgggcatcgcctatggctcggcggtgctgttcggggtgtccttcgcgctaggtgccttcttcgccgggatgattctcaacgagtccgagctcagccacgaggcggcggagaactcgttgccgctgcgcgacgctttcgcggtgctgttcttcgtctcggtggggatgctgttcaatccgatgatcctgttgcaggagccactgacggtcctggccactttcctggtcatcgtcttcggcaagtcggtggccgcctacctgatcgtccgcgctttcggccatccgaacagcaccgcactggtgatcgccgccagcctggcgcagatcggcgagttttccttcattctcatcggcctgggcattggcctcgaactggtgccggagcagagccgcgacctggtgctggccggggcgatcctgtcgatcctggtcaatccgctgctgttcatcgccatcgatcgcctgcagcaacgcaaggagcagcgcctggcggaggccgctggcggggtccgcgagatgccggcgcaggacctgccgccgccgatcctggagcgcgagcatgcggtgctgatcggtcatggccgggttggcgggttggtcagcgctcgcctgcgcaccgccgggacgcccttcgtggtagtggtggacaagcgcgacaaggccgacgaactgcgcgaacagggctacagcgtggtcctcggcaatgccgccagtcccggcgtgctggaactggccaacatcgccgaggcgcgctggttgctgatcgccattcccaacggcttcgaggccgggcagatcgccagccacgcccgcgcggtgaacccgccgctggacatcgtcgcccgggcgcatttcgacgccgaggtggactacctggagcagaacggcgccaacctggtgatcatgggcgagcgcgagatcgcctgcggcatggtccatcgcctgggactcgaccgtgacgagcgcggcgccgacgcaccgctgccgcagtcggcctga

SEQ ID NO: 353629 - DNA, 483 bp, Pseudomonas aeruginosa
atgcaacccggaaacaaccaactgtcgatgaccgtgctgatgactccggacatggccaatttctccggcaatgtccatggcggcaccctcctgaagtatctcgacgaagtcgcctatgcatgcgccagtcgctatgccggtcgctacgtggtgaccctgtcggtggatcaggtgatcttccgcgagccggtgcatgtcggcgaactggtgaccttcctcgcttcggtcaactacaccgggcggacttccatggagatcggcgtcaaggtcatcaccgaaaacatccgcgagcagtccgtgcgtcataccaacagctgtttcttcaccatggtcgctctggatgacgagcgcaagccggtggccgtccgcccgctggagctggaaaccgccgagcagaagcgccgcttcgcccaggcccaacaacgccgccagctgcgcgcggagctggaggcccgctaccaggcgattcgcgaagacggatga

SEQ ID NO: 353630 - DNA, 744 bp, Pseudomonas aeruginosa
atgcctgccgccatacgcatccttctcctggccctggccgtgcttgccggcatcggtgccgctgccatccaggccgaggatacgccctgcgccaccgccgcggaatgcaacacgcgcggcacccaggcttatcgacaggggagttatccacaggcgctggacgccttcgcctggcaattgcgcctggccgagcgccaggagcagggcggagccgactcggaacaggcgctgaacaatctcgcgctgaccagcctcaaggccgggcaaccgggacgcgcccgcgcctggatgaacctggcgctggatcgcggctacagcggcaaagccacgcgctacaacctggaacaggttgccctgaaagtcgactatccgtccctccagggcctcgccgggcactacctgcgctacgccgggcaggccgaatgggaaagcctgcagatcgaaccggtgaagggcggctaccaggcgagcttcgccctgatgcgcatcggcaatccggagaaactgatggaatatgggcccgcggcggtcggcgagctgtccggtcggctggaggggcaaggcgcgctctaccggctgcgcagcgaaggcctgggcgccggctgcagcctgctggtatggcaggaaggcatcgacctgcgagtggtggagagccttggcgggaactgccagggttacggcggcatgggcatcgccgccgccggtaactgggtgaagatatccagtcaggccagggacgactga

SEQ ID NO: 353631 - DNA, 759 bp, Pseudomonas aeruginosa
atgagcacgcccgtcgttcttatcactggtgcagccggcggcttgggccgggcaatcgccaagcgtttcgcccagagtcattggcgcatcgccgccacggatgtggataaggagggcctgcacgcgctgaacgcgcaggtgccgttggacgccagcggggtcgccgacctgcgcagcgcggataactgccataccctgatgtcgaagattctcgcccgtaccggacgtctcgacgccctggtgaatgccgcgggcgtctggcgcgaggggcctgtggaaaacttcaccgaggaggatttcgacctggtcctgggagtcaacctcaaggcctccttctacatgtgccaggccgcgattccctacctgaaggaaaaccagggcagcatcgtcaacatctccagcgactccggacgccaggcctaccggggttcggcggcgtattgcgcgagcaaggcggcgcttaccatgctgagcaagaccctggcgctggaactggccgagcagggcgtgcgggtcaacgccgtgtcgccggcggatatcgccacgccgatgctcgactaccaggccgaacgctatgggatgggcaatccggatggctacaagcgcgcgctgctgaaggattatccacagggcaaggcggcacgcttcatccgcccggaagaagtcgccgagctggtctggtatctctgcggccctcaggccgaagcgatcacgggtgccgacctggcggtggacttcggcctgtccgctggccgctga

SEQ ID NO: 353632 - DNA, 1368 bp, Pseudomonas aeruginosa
atgcatttcgccgatccgcgggaagcccgcgagttcctcgccgcacaccccgaggtgcgcagcatcgagctgttcctgatcgacgccaacggcgtgccgcgcggcaagctgctgcatcgcgacgagctgctggcggtctacgaaagcgggcggccgctgccgagcaccatcctcggcctgaccatcaatggcgatgacgtcgaggagaccggcctggtctgggacgtcggcgatgccgattgctggaccttcccgctgcccggcagcctgaccctgcaaccctggcggcagtcaccgaccggccaggtgcaggtaagcatgcatcccgagctcgggctaccggccgcggcgggcgatccccggcatgtgttgcagcgggttatccacagcctgcaggcggagggtttccacccggtgatggcggtggagctggagttctacctgctcgaccgcgaacgcgacagcgacggccggccgttgccggcgttacagatgaatggccagcggccgcgggcgacccaggtctatggcgtctacgagctggagcagttgcagccattcctcgatgacttgtatgccgcctgcgaggcccagggcctgccggcgcgcacggcgatttcggagtacgcgccggggcaggtggaaattaccctgcagcatcgcttcgacacgctccaggcgatcgacgaaggcgtgcgctacaagcgcctggtcaagggcgtggcgaatcgccatgggttgcaggcctgcttcatggccaagccgttcgccgatctttccggcagcggcctgcacctgcacgtcagcctggccgacgccgctggcaacaatctgttcgccagcgaggacccggccgggaccccgctgctgcgccaggccatcggtggaatgaaggcgtgcctgctggagtctttggcgctgttctgtccgaacgccaactcgttccgccgcttccaggcgaacagctacgcgccgctggcgccgacctggggaatcaacaaccgcaccgtgtcgctgcgggttcccggcggcccggcgtccagccggcacatcgagcaccgcatctgcggcgccgacgccaatccctacctggcggcggcggcgttgctcgcggcggtgcgcctgggtattcgcgagcgactcgaccccggtgcgccgatcactggcaacggctacgctcaagccacccaggcgttgccgagcgactggctgaccgcgctgcgcgcgctggagggctcggcctgggcgcgcgaggcgctcggcgaggatttcctgaagatctacctggcgatcaagcaggccgaataccgtgccttcatgggcgaggtcggcgagcaggactggcgctggtatctcaaccaggcctga

SEQ ID NO: 353633 - DNA, 1395 bp, Pseudomonas aeruginosa
atgaccgccagtggcatcgccgaagccgccgtggaaaccttcatggcccgcgagcagcaacgtttccttgcgcagaatccacagtccgtcgcgctcgccgagcgagcccggcgcgccttgttcgacggcgtaccgatgcactggatgagcgattggtcaacaccctgtccgctgttcgtggcgcgtgcccacggcgcgcgtttccatgatgtggacggccacgcctacgtggacttctgcctgggcgataccggcagcatgttcggccattctccggcgccgatcgcccgggcgctcgccgagcagggcgcgaacggcctgaccaccatgcttccgggggaggatgccatcgtcgcaggcgagctgctggcgcagcgcttcggcctgccgttctggcaggtagcgaccaccgccaccgacgccaaccgcttcgtcctgcgctgggcgcgtgcgatcaccggccgcaaggtggtgctggtattcgacggttgctaccacggcacggtcgacgacaccctggttcgctgccgcgacggccgcaccgtgcatcgctccggcctgctcggccaggcccacgacctcacccagttcagccgcgcggtgccgttcaacgacctccaggccctggagcgggcgctggccagcgaagacgtggccgccgtgctctgcgagccggcgatgaccaacatcggcatggtcctgccgcaacccggcttccaccagaagctgcgcgagctgacccgtcgtcacggcacgctgctgatcatcgacgagacccacaccatctccacaggtcctggcggctgtacccgcgcctggaagctcgagccggacttcatcaccctcggcaagccgatcgccggcggcgtaccgtgctcggtgtatggttgcagcgcggcgatggccagcgccatgcaactggccagggcacgtgccagcgagcagagcgaaggccacggccacagcggcatgggtaccacgctgtcggccaacgccctggcgatgcgctgtatgcgcgccaacctggaagaggtgatgaccgataccgcctacgcccacatgctgtccctggcggcgcgtctggccgagggcttccgcaggattatccacaagtacggcctggcctggtcggtgaccgagctcggcgcgcgcagcgagttccagttctgcccgcaacccccacgcgacggcgcggccgccgaggcggcgttccacgacagcctgcagatggccttgcacctgtatctgatcaaccgcggcatcctcatcacgccgttccacaacatgaccctgtgttgcccggacactcgcgaagaagatgtcgaccgcctgctctccagcctcgacgaggcgctcggcgagctgctcgccatacccggcgcgcgggaggcctga

SEQ ID NO: 353634 - DNA, 783 bp, Pseudomonas aeruginosa
atgaatgacttttcgaagtggacaggccaggtcgcgctcatcagcggcgccggcagcgaactcggcatcggtttcgccattgcccggcggctggcccgcgaaggcgtgcgtctgctgatcaccgccagcagcgagcggattaggcaacgagcggaggaactgagcgcatgtggtcacgacgtgcgcgccgcgagcgccgacctgaccgacgaagcccaggtgcagggcctgctggactgggccgaagcccagtggggacgggtcgacatcctggtgaacaatgccggcatggcccagttggacagcgcggagcccttcagcgcagtggaagcgacctcgctgcgggattggcaactgtccctgtcgcgcaacctgaccagcgctttcctgctcacccgcggcctgctgccgggcatgcgcgagcgcggctacgggcggatcgtcaacgtcgcctccaccaccggaacccgcggcagcaacccgggcgaagccgcgtatagcgcggccaaggccggtctggtcggctggagcatgggcctagcgctggaggtggcgaagagcggcatcacggtgaacagcgtcgccccgggctggatcgccaccgcctcgagcaccgccgaagaacgccaggccgccctggccagccccagcggacgtgccggccggcccgaagaggtggccgccgcggtggccttcctcgcctcgcccgaagccagcttcgtcaacggcgaactgctggtggtggacggcggcaactgcctgatcgaaaacaaacggagctga

SEQ ID NO: 353635 - DNA, 681 bp, Pseudomonas aeruginosa
atggccgagaatctccaggaacgactctaccaacgactgcgggaagacttgctggccggacgtttccagcccggcgagcgactgaagatccgcgacctggcgaaccaatggggcaccagcccgatgccggttcgcgccgccctgcaacggttggtggcggaaggggcgctggagggcgaggcacaacgctcgctcagggtgccgctgatgacccgcgagcgtttcctgcagatcctccaggtgcgcctgtccctcgaagggctggcggccgaaagcgccagcggccggctggacgagcaggcactggaaggactcgaaggttgtctgcggcgaatggaggacgccttgcgccgacgcgaggtacaggcctacctggaagccaacagcgaattccacctgacgctctaccgcgcctgcggcaacccggtgctgctgcgtctcatcgagacgctctggctacaggtcgggccgttcttcaaccggctgttcaccgaggccgacctctccctacgtctgaacgatttccacgaggacgccctggacgcgctacgccgcggcgacggcccggccgcgcgcgcggcgatcgaacaggacctggcctacttcggccagtacctgctgaacctcctggagctggaggcccggccacgaaagcgacaccgttccggcgagcacgcctga

SEQ ID NO: 353636 - DNA, 213 bp, Pseudomonas aeruginosa; identical to SEQ ID NO: 319265

SEQ ID NO: 353637 - DNA, 402 bp, Pseudomonas aeruginosa
gtggaagacgtcatcgaaaaactgcgtgaactcaacgaaccggttccggtgcccctggaactgccggaagaagaactgctggtggaaatcgaggaagagctgctgatcggcattcccgccgagttccgcgaattcctcctgctggtcagcgatgtggtctacggccgcctggagccggtgaccgtgaccgatccgcactcgcacacctacctgcccgaagtggcggccactgcctgggacctgggcgttccgcgcgagctgatcccgctttgcgaggacgacggcagctactactgcgtggcggaggacggcgaggtggtgctctgggccgatggcgacctcaccgatgaaagctgggattcggtgtgggtctgggctcgcgacgtctggctggagagctga

SEQ ID NO: 353638 - DNA, 855 bp, Pseudomonas aeruginosa
atgcagcgtgttctcagcatcgccctcgccttctgcctggcgctgaccgtcagcctggatgccaatgccaagcgcttcggcggcggcaagagcctcggctcggcacccagccaccagacccgccaggcgcagccggccactgcgccgaacgccactgctgccgcccccaacgccgctcgtcccgccgctgccgccagcggtgcttcgcgctggctcggcccgctggccggtatcgccgcgggcggcctgctcgcttccatgttcatgggcgacggcttcgagggcatccagatgctcgacatcctgttgatcgccctggtggccttcatcgccttccgcttcatcgccgctcgccggcgccagcagaaccagggccagcctgcaatggccgggcacgcgccgatgcagcgcgaaatgccggcccaggcgccgatcttcggtggcgccgccgctgctgccgctgcgccgagcccggtgatcaacgcgccgagctggttcaacgaggagcgcttcgtcggtgccgctcgcgaacacttcatgtccctgcagcagcattgggatgccaacgagatggacaagatcgccgagttcgtcaccccgcagatgttgcaatggctgaagcaggagcgcgccgagatcggcgacgcctaccagtccacctacatcgacaacctggacgtgcaactggacggcgtcgacgaccaggccgacaagaccatcgccaccctgaccttcagcggtgtgtcgaagacctcgcgcttcgaccagggcgaagccttcagcgaaagctggcggatggagcgcgcccagggcgagaaccagccatggctggtggccggtatccggcagaactga

SEQ ID NO: 353639 - DNA, 1758 bp, Pseudomonas aeruginosa
atgcatgccgtcgatttcatccaggacctcgccgtgatcatgctggtggcgggtgtggtcactatcctcttccaccgcctgcgccaaccggtggtcctcggctacatcgtcgccggcttcatcatcggcccgcacaccccgcccttcggactgatccacgacgaagacacgatcaagaccctggccgaactcggggtgatcttcctgatgttctgcctcggcctggagttcagcctgcgcaagctcttccaggtcggcgccacggcgttcatcgcggcgttcctggaaatcgtcctgatgatctggatcggcttcgagatcggtcgcttcttcgagtggagcaccatggactcgctgttcctcggcgcgatcctggcgatctcctccaccaccatcatcgtcaaggcgctcggcgacctgaagatgaagaacgagcgcttcgcccaactgatcttcggcgtgctgatcgtcgaggacatcctcggcatcggcatcatcgccctgctgtcgggaatcgccgtgagcggttcggtggaaaccggcgaggtgttctccacggtcggcaagctcagcctgttcatgatcgtcgcgctggtcgtcggcatcctcctggtcccacgcctgctggcctacgtggcgaagttcgagagcaacgagatgctgctggtcaccgtgctcggcctgtgcttcggcttctgcctgctggtggtgaagctggaatacagcatggtgctcggcgccttcctgatcggcgcgatcatggccgagtcgcgccagttggtgcagatcgaacgattgatcgagccggtccgtgacatgttcagtgcgatcttcttcgtcgccatcggcctgctgatcgacccgaagatcctcgtcgagtacgcctggccgatcgccctgatcaccgtcgcggtagtgctcggcaagatgttctcctgcggcatgggtgcgttcatcgccggcaacgacggacgcacctcgctgcgggtcggcatgggcctgtcgcagatcggcgagttctccttcatcatcgccgccctgggcatgactctgaaagtcaccagcgacttcctctacccggtggcggtagcggtctcggccatcaccaccctgctcaccccgtacctgatccgcgccgccgacccgctctcgcagcacctggccaacgccatgccgcagcgcatggcgaggatcttcggccactacggcgactggctgcgcagcatccagccgcagggcgaccgtgcggtgctggcggcgatgatccggcgcatcttgctgcaggtcggggtgaacctggcgctggtgatcgcgatcttcctcgccggcggttatttcgccgatacgctttccgcctggatgagccagtgggtcgcctacgacgggctacacaaggcattgatctggggcggcgcgctgctggtctcgctggccttcctgatcgccgcgtaccgcaagctcaaggccctgtcgatgctgctggccgaactcggggtcaagccggagaaagccggacgccatacggcgcgggtacgtcgggtgatctccgagataatcccgctgctgtcgctggccggcatgatggtgctgctggcggcgctcagctcgagcatcctgccgccgggcgagttgctggtcgtagtggtgctggtcgccggcctggtgatcgcagtgctctggcgctggctgatccgcgtgcattcgcggatgcagatcgcgctgatggaaaccctcgaccaggaaaagggcagccactga

SEQ ID NO: 353640 - DNA, 1308 bp, Pseudomonas aeruginosa
atggaaagcgccaacgccatttccgcgtctgcccagccccgcaccacttcgcaacgcatcaagtcgatcttcagcggttccgtcggcaacctggtcgagtggtacgactggtacgtctacgccgccttctcgctgtacttcgcaaaggcattcttcccccagggcgacatgaccgcccaactgctgaacaccgcagctatcttcgccgtgggcttcctgatgcgcccgatcggtggctggctgatgggtatctatgccgaccgcaagggccgcaaggcggcgttgctggcctcggtgctgctgatgtgctttggctcgctgatcatcgccctgacccccagctatgaaaccatcggcgtcgccgcgccgatcctgctggtggtcgcgcgcctgctccagggcctgtcggtcggcggcgaatacggcacctccgccacctacctgagcgagatggcgaacaaggaacagcgcgggttcttctccagcttccagtacgtgaccctgatttccggccagctcatcgccctggcggtgctgatcgtcctgcaacagaccctgaccgtagaacaactggaaagctggggctggcgcgtccccttcttcatcggcgcgctgtgcgcagtggtggcgatgttcctgcgtcgcggcatggaagagaccgagtccttctcgaagaagaaggaagagccgaaggaaagcctgctgcgcaccctgctgcgccacccgaaggaagtgctgaccgtggtcggcctgaccatgggcggcaccctggccttctacacctacaccacctacatgcagaagtacctggtgaacacggtaggcatgagcaagaccgattcgaccatgatctcggctgccaccctgttcctcttcatgctgctgcagcccatcgtcggcgccctctccgacaagatcggccggcggccgatcctgatcgccttcggcgtactcggcaccgtcttcacctacccgatcctcagcaccctgcacagcgtcgacagctggtggggagcgttcttcctgatcatggcggcgctggtgatcgtcagcggctacacctcgatcaacgcggtagtgaaggccgaactgttccccaccgagatccgcgccctgggcgtcggcctgccgtatgccctgaccgtgtcgatcttcggcggcaccgccgaatacgttgccttgtggttcaagagcgtcggcctggagagcggcttctactggtacgtcaccgcctgcatcgcctgctcgctgctggtctatgtgttcatgaaggacacccagaagcactcgaagatcacgaccgattga

SEQ ID NO: 353641 - DNA, 1029 bp, Pseudomonas aeruginosa
atgtcgccacagccttcacggtcgcctgaccgtttttcgctggccgcgctcgccgaagaccaccccaccgctcccgcccagggagacgaaagcgagtccctgccatgcgtgaatgcccagcgcggagagcccaacctgcgcgtggtggactgctccggtgcgcgccgcgacgaggaagtggcggtcgaggaagtgctgatcccctacgcccacggcagcgatcccgaagacgtccccggcgagccgcccaagtcgcgctggtggttgtcctccggcgcagcggtggcgatgcatgtggcgatcatcggtgcgctggtgtgggtgatgccgaccccggccgaactcaaccttggccacggcgaactgccgaagaccatgcaggtgaatttcgtccagctcgagaagaaggccgagccgaccccgcagccgccggctgccgcgccggaaccgacgccgccgaagatcgaggaacccaagccggagccgccgaagccgaagccggtggaaaaacccaagcccaagccgaaacccaagcccaaaccggtggaaaacgccattcccaaggccaagccgaagccggaacccaaacccaagccggaacccgagccgagcacggaagcatccagccagcccagcccgtccagcgccgcgccgccgcccgcgcctaccgtcgggcagagcacgcccggcgcgcagactgcgcccagcggctcgcaaggcccggccggcctgcccagcggcagcctcaacgacagcgacatcaagccgttgggcatggcgcaaccggtctatccgcggatggcccaggcacggggaattcagggccgggtgaaggtgctgttcaccattaccaccgatggccgcatcgacgatattcagatactcgagtcggtgccgtcaggcatgttcgaccgttcggtgcgccaggccatggccaagtggcgtttcgagccgcgtgtcagcggcggcaagatcgtcgcccgccaggcgaccaagatgttcttcttcaagatcgagaagcgccgttga

SEQ ID NO: 353642 - DNA, 969 bp, Pseudomonas aeruginosa
atgcttcgagagatacccacacacctgatcggcggccccctgggggccggcaagaccagcctgatccgctcgctgctggcgcagaagccggcgggcgagcgctgggcggtgctggtcaacgagttcggcgagatcggcctggatgccgcgctgctggccacggacgtcgacggcgtggccatcggcgaggtggcgggcgggtgcctctgctgcgtcaatggcgtgccgttccaggtggggctcggtcgcttgttgcgtcgggcacggccggaccggctgttcatcgaaccatccgggttgggacatccgcaggcgctgtggaaacagctgcaggctcctccctggtccggcgtcctggccctgcaacccctggtagtggtgctggatgccgccgcgctggcctccggccaaccgctgccggaggcacaggaacaggcgctggaagcggccggcatgttgctgctgaacaaatccgaaacgctcgacgcgacgcagcgctgcgccgtgcgtgcgcgcctgccggtcctgccgttgcgctggagcgtgcgcggtcacctggcattgcgcgatctgccgaccagcgttgccggggaaggtagcgcgacgacctgggcggccctgccggaggcgcctgctcagttgggaacggtgctgcttgccgagcgaccgctgcgcgccgtgcgcgagcaggacggccagttcgccatcggctggcggctggcgccgtcggtgcgtttcgatcgggccgcagtggacgcctggctgaaccgtctgtccggactgcggcgagccaaggcggtgctgcattgcgcggacggttggtatgcagcgaatgccgcgccgtttgtggataactggggcaagtcctcgtggcggcgggataatcggctggaactgatcctcgccgcaggcgcggatgaagaggcgctcgaagaggcgttcctggcgtgtcggatggtcgcggaatga

SEQ ID NO: 353643 - DNA, 369 bp, Pseudomonas aeruginosa; identical to SEQ ID NO: 319258

SEQ ID NO: 353644 - DNA, 642 bp, Pseudomonas aeruginosa
atgagcgcactgccgcaggaaaaaccgttgccgcgccaggcgttcgatgacgacccccaggtgctggccgaggtgcttcgcgagggcgtcaacctggcggtctggacacgccggttgagcccggcgctgcgcgacttcgccgccgccctggtgcgcaaccggccgggactggcgctgagccagacgctggagatggaagaggaacggctacccgtcttggacggcctgctcgacgcgcagcaactgccgggacaaaccgatttcctcgacgacctgggctggctggtcgaggccttctcctgcctgaccggggcgcggcgtatcggcctgcgcctgcgcgttctggataaaccgatgtgcccgcgtttccacgtcgaccacgtgccgctgcggctggtcaccacctaccagggcgccgccagcgaatggctggacgagtccggcctggaccgtcggctgcttggcggagcgcaggccgaagttgtcgacgaacagcttatccacagcttgtccacgggcgacgtggcgctgctcaagggcgaacgctgggagggtaacgaaggtgccgggctggtgcatcgctcgccgcgagcggagcctgggctggcgcgcctgctgttgaccctggactggcttgcctga

SEQ ID NO: 353645 - DNA, 1203 bp, Pseudomonas aeruginosa
gtgaaccaacgcctacctgtcaccgtgctgtccggctttctcggcgccggcaagagcacgctgctcaaccatgtgctgaagaaccgcgagaaccgacgggttgcggtgatcgtcaacgatatgagcgaaatcaatatcgatggcagcgaggtccagcgcgatgtcagcctgaaccgcgctgaagaacgcctggtggagatgagcaacggctgtatctgctgcaccctgcgcgaagacctgctggaagaggtcggccgtctcgcccgggaaggccgcttcgactacctgctgattgagtccaccgggatttccgaaccgatgccggtggccgagaccttcaccttccgcgacgagctggaccgcagcctgtccgacgtggcgcgactggataccatggtcacggtggtcgacgggatgaattttctccgcgactaccaggaggccgccagcctggccagtcgtggcgaaaccctcggtgaggaggatcagcgctcgatcaccgacctgctgatcgaccaggtcgaattcgccgacgtgatcctggtcagcaagatcgacctgatctccagcgagcagcgcgaggaactgctggcgatcctgcgccagctcaatgccgaggcggagatcctgccgatggtgatgggtcaggtgccgctggcgaagatcctcgataccggtcgcttcgatttcgatcgcgcggcgtccgcgccgggctggctgaaggaactgcgcggcgagcacctgccggaaaccgaggaatatggcatcgcctccatggcctaccgggcgcgccggccgttccaccccgcgcgcttccacgccttcctgcacaatccgctgaagcaggggcggctgctgcgctccaagggcttcttctggctcgccagccggccccgcgaggccggcagctggtcgcaggccggcggcctgatgcgctacggtctggcgggccgctggtggcgattcgtgccgaccggacagtggccacaggacgaagagggcctgcgggcgatcatgcggcactgggaggaaggcgtcggcgactgtcgccaggagctggttttcatcggtcagaacctggacttcgcggccctgcgcgcagccctggacgcctgcctgctggatgacgccgagatgaacctgggcatccccggctggcagggcctggacgaccccttcgaggactgggggcacgccgcatga

SEQ ID NO: 353646 - DNA, 405 bp, Pseudomonas aeruginosa
atgaccgaacaggaactgcttgcccagcccgacgctgcctacatggacgaagcccagcaggacttcttccgcgacctgctgctgcgtcagcgacaggaacttcaggcgcgcatcgaaggcgaattcggcgagctgcgcgatctcgaacgccccagcgacgaggccgacctggcttcccgcgaggaacagcggcaatggcaacttcgcctgctggagcgggagaagaagctgctcgacaagatcgacgaagcgctggagcgcctggcccgcggcgactacggctggtgccaggaaaccggcgagccgatcggcctgcgccgcctgctgttgcgtcccaccgccaccctctgcatcgaggcgaaagagcgccaggagaagcgcgaacgccacgtgcggcacaactga

SEQ ID NO: 353647 - DNA, 417 bp, Pseudomonas aeruginosa
atgcgccgcgtcctccgcctttactgcctggccctcctgctgctcgctccggcggcacaggcgcagggctttcttcccggcacccgcccggcggaatgcgcttacctgcgcaccgttctggcctgcatggatcggctgggcaaccactacagcgtcgccaccggcggcaacgacacctggctgcgcggctacgacgcggcgagcggacgacgctgggcccagaccaatacgcgctacgggcgcctgaccttcttcagcggcatcgccagcgatggggaaatctgggtcggcctcagccgcaacatcggctggaccagcgtcagccgcctgagcagttcatcgggccagcgccaacgcctgacctgcgggcgggtcagcggctgcagcgaaggccctagccgggaggctgcgcgctga

SEQ ID NO: 353648 - DNA, 1194 bp, Pseudomonas aeruginosa
atgaagcgccgtcgtctcctgcaaagcctgctcgccggcctggccctccagccgttcctagccgccagcgccaatgtacgaatccgccaggcccgggcctggaattcctcggaaagctggcgcctggtgctggaactggacggcccgccgcgttatcgaaccttttccctgcaggcccccgagcggttgatcctcgacctgcccgacgcgcaattgctcgcaacgctctccgagctaccgctggacggccccgtgcgcgccatacgcagtggccaactgggtggcggcgggacgcgcatcgtcctcgatctgcgccaagcggtcaggccgcgcagcttcgccctggaaccgcaggcgggaaagggccatcgcctggtcctggacctatatccacaggcgctggcggcgccccccgagccaatgctggcgctggcccgcccgctaccctcgacgggccgcgacatcctcgtggtggtcgatgccggccatggcggcaaggaccccggcgcggtcggtagcaagggcgagcgcgaaaaggacgtggcgctggccatcgcccgcctgctggcgcggcggatcgaccgtgagaaaggcttcaaggcgcgcctggtgcgcaacggcgatgtgttcgtcccgctgcgcaagcggccggaagtggcccggcgctacaacgccgacatgttcgtttcggtgcacgccgacgcggcgccgcgactgaccgcctccggcgcgtcggtatatgccctctccgagcatggcgccagctcgaccatggcgcgctggatggccgagcgcgagaacggcgccgacctgatcggcaacagcggcaacctgccgctacagggccgcgacaaggtactcgccggggtgatcctcgacatggccctgagttcgaccatcgccagcagcctggacctcggccacagcgttctcggccagttgtcggacgtcaccgcgctgcaccagaagcgtgtcgagcaggccggcttcgccgtgctcaagtcgccggacatcccttcgatcctggtggagaccggcttcatctcgaatcgcggcgattgtcgccggttgatggacgaacgccatcgccagcgcctggccgaggcgatcttcgctggcgtgcagggctacttccggcaacgccctcccgccggcagctacctggcggcgctcagcgcgcagcctcccggctag

SEQ ID NO: 353649 - DNA, 897 bp, Pseudomonas aeruginosa; identical to SEQ ID NO: 319252

SEQ ID NO: 353650 - DNA, 561 bp, Pseudomonas aeruginosa; identical to SEQ ID NO: 319251

SEQ ID NO: 353651 - DNA, 1338 bp, Pseudomonas aeruginosa
atgcaaagcctgctgatccgcaatgcccggatggtcaacgaggggcaggtacgcgaaggcgatctgctggtccgccacggtcgcatcgaacgcatcgccggctgcctggaaaactgcggcgccagccgggagatcgatgccgccggacgctacctgctgccgggaatgatcgacgaccaggtgcacttccgcgagccgggttatccacagaagggctcgatcgccagcgaatcccgcgccgccgtggcgggcggcatcaccagtttcatggacatgcccaatacccgcccggcgacgctgagcctcgaagcgctggcggaaaagaagcgcctcgccgccgcccatagcgtggccaactacggtttccacttcggcgtcagccgcgacaacctcgacaccgtggccgccctcgatccacgcgaggtcgccgcggtgaaggtgttcatgggcgcctccaccggcgacatgctggtggacgacctgccgaccctggagcgcctgttcgccagcgttccgaccctgctgctgagccattgcgaagacacgccgcggatcgaagccaacctggcgcgctggcgacaacgcttcggtgaacgtattccggcagccgcccacccgcgcattcgcgacgccgaggcttgctaccgttccaccgccctggcggtggaactggcgcaacgacatggcacgctgctgcatgtcctgcacttatccacagcgcgtgaactggccctgttcgaggacaagccgctgtgccagaaacgcatcaccgcggaagtctgcgtccaccatctgctgttcgacgacagcgactacgcccgcctcggccatctgctcaagtgcaacccggcgatcaagagccgcgaggaccgcgacgccctgcgcagggcgctggccggcaaccgcctggacgtgatcggcaccgaccacgcgccgcacgcctgggccgagaagcagcaggcttatccacaggcgccggccggcctgccactggtccagcatgcgttgccggcactcctggagctggtccgcgaaggctggctgtcgctggccaccctggtggcgaagaccagccaccgggtcgccgaactgttcgccatcgccgatcgcggtttcctccgcgaaggttactgggccgacctggtgctggtcagcgaactggagcacccggcgctggccagcgccatgccgctgctgtcgcgctgcaactggacgccgttccgccaccgggcattccaccatcggatcgataccaccatcgtctccgggcaactcgcctggcacgcgggacgcctgtccgacgattgccagggactgcccctgcggttttcccgctga

SEQ ID NO: 353652 - DNA, 1245 bp, Pseudomonas aeruginosa
atgcgtagctgtatatcagtcttccggccggccctgctggcactgttcgtctcggcaagcggctcggccggcgccgacgcggctgtggaaaacccgcggatcggccgtgccgccgatctctatgaactgatcccggaataccagccggacacctaccggaacatggacaaggtctatccgacccgggttatccacaaggggaccaaggtccgtccgctgccggcgggtgtggccatcgcgccgcgctaccggatcggcggcgaggaatacggcgtcgacgatttcatgcggcgcaaccgcgttggcggcgtgctgatcctcaaggatggcaaggtcgccctggagcgctacggcctgggcaacgacgaacggacgcgctggacctcgttctcggtggtcaagtcgatctcctcgaccctggtgggcgccgccgtgcagcagggcctgctggctctcgaccagcctgtggacaagtacctgccgagcctggccggctccgcctaccagggggtgacggtggagcaggtcctgcagatgagttccggggtccgctggaacgagacctatcgcgatccgaagtccgaccgccggcagatgttcgacgcccagctcgccgaacgtcccggtggcatcctgcggctgctggcgagcctgccgcggcagtacccgagcggtacccacttcacctacagcaccggcgagtcgcacctgcagagcgagctgctgcacgcggcgacccgcattccggtgagcgactacctgtccgagcggatctgggcgcgaatgggcatggagagcgacggcttctggcaactggaatcgccggccgggcaagagatcggcagcagcggcttgagcgcgaccctgcgcgactatggccgcttcggccagttcgtcctcgaggacggggtgatcgatggcgaacgtatcctccccgaaggttgggtcgatcgtgccagtcgcgtcgaggcttcttcccacctggccccgggcaagctctacgatggcgaatacgcgctcggctacggctaccagtggtggaccttcccggtgggcgccaaggccctgcccgagcatgacggcggggccttcgaagcccagggcatcttcggccagtacctctacatcaaccgcaaggagaagatcgtggcggtggtctggagcgcctggccgaagccggagatggacgatcgcgaggaggagacctatgccttccttggcgcggcggtgaaagccctgcgctag

SEQ ID NO: 353653 - DNA, 2025 bp, Pseudomonas aeruginosa
atgagcgatcatcagaacgggctgcatcttgaggcggaaaactggccgcgcgcgttgttcgccgtggccctggccttttccgtgttccaggtcgtcaccgcggcctttcccctgatttccacccaggtcctgcgggcaatgcacgtcggactgctgttgctggtggtgtacatcagctatcccgccttcggcataggtcgcccctggcagccgctggcctggttgctgggcatggccggcctgggcacggcggtctaccagtgggttttcgagggcgacctgatccagcgctccggagagctgacccaggccgacatggtcgtcggcgtggtgctgatcgtcctggtcttcgaggcggcgcgacgggtgatgggcatcgccttgccgatcatctgcgcgctgtttcttgcctatggcctgttcggcgaacacctgccgggcgacctggcccaccgcggctacggcttcgaccagatcgtcaaccagctgtcgttcggtaccgaaggtctctacggcacgccgacctacgtatcggccacctacatctatctgttcatcctgttcggcgccttcctcgagcaggccggcatgatccgcctgttcaccgatttcgccatgggcctgttcggtcaccgggtcggcgggccggccaaggtctcggtattctcctcggcgctgatgggcaccatcaccggctccggcgtggccaacgtggtcaccaccggacagttcaccatcccgctgatgaagcgtttcggctacaagccggcgttcgccggcggcgtcgaggcgaccgcgagcatgggcagccaactgatgccgccggtgatgggggcggtggcgttcattatggccgagaccatcaacgtcccctacgtggagatcgccaaggcggcgctgatcccggccctgctgtatttcggctcggtgtactggatggtccacctcgaggcccgccgggccgatctaaagggcctgccgcgcgatcagtgtccgagcgcctggggtgccgtccgcgagcgctggttcctgctgattccgttgctggtgctgatcgcgctgctgttctccgggcgcacgccgctgttctccggaaccatcggcctggcgctgaccgccatcgtcatcctcggttcggcgatcatcctgcgggtgtcctcgctcggcctgcgcatcgccttctgggtggcgctggggctgctctgcgcggggttcttccgcctcggcatcggggtgatcttcgtcgtgatcgcggccctggccctggcctgctggttcgtccgtggcggccgggaaaccctgcgcatctgcgtccgcgccctcgccgaaggtgcgcgacatgcgattccggtgggcatcgcctgcaccctggtgggagtcatcatcggggtgatttcgctgaccggcatcgccaccaccttcgccagctacgtgctcgacctgggacgggagaacctgctgctgtcgctggtcctgaccatggtcacctgcctggtcctgggaatgggcatcccgaccatccccaactacatcatcaccagctccatcgccgcgccggcgctgctggaactgggggtgccgctgatcgtctcgcacatgttcgtcttctacttcggcatcctcgccgacctcacccctccggtggcgctggcctgtttcgcggccgcgccgatcgccaaggaaaggggattgaagatcagcttctgggcggtgcgcatcgccctggcgggtttcgtggtgccgttcatggcggtgtattccccggcgctgatgctgcaggaaggcggttggggggcgacgctctatgtcacctgcaaggcggtgctggccatcggcctgtggggcatggcttccatcggctacctgcaggggccgctggcctggtgggagcgcctggtggcgttcgccgcgggggccagcctggtcctggccttgccgatcagcgacgagctgggcttcgtcctcggcgcgctggtgatcggctggcacctctggcgccagcgtgcgcgcgaggcggtggcgtga

SEQ ID NO: 353654 - DNA, 960 bp, Pseudomonas aeruginosa
atgtcgctgagcagacgcttcggtcttttcacgcttgccgcaacggtgaccttcagtaccgtggtctttgccgcgccgaccttcatcaatatcctcaccggcggcaccagcggggtctattaccccataggggtcggcctctcgcagatctacgggcacgatatccagggcgcgaaaacctcggtgcaggccaccaaggcttcggtcgagaacctcaacctgttgcaggccgggcgtggagaactggcgctggcgctgggcgactcggtcgccgacgcctggaacggggtcgccgacgccggcttcaaggcgccgttgaagaagctgcgggctatcggcaatacctatccgaactatatccaggtagtggccagccaagcctcgggcatcaagaccctggccgacctgaaaggcaagcgcatttcggtgggcgcgcccaagagcggtaccgagctgaacgcccgggcgatcttcaaggccgccggcctgagctacgaggacatgggcaaggtggagtacctgccctacgccgagtcggtggagctgatcaagaaccgccagctcgacgctacgctgcaatcctccggcctgggcatggcggccatccgcgacctggcctcgaccatgccgatcaccttcgtcgcgatcccggcggacgtggtggcgaagatcgacagcccggcctaccacgccgcgagcattcccgccggcacctacgacggccaggagcaggacgtgccgacggtggcgatcgacaatatcctggtcagccactccggggtcagcgacgagctggcctaccagatgaccaagctgatgttcgacaacctgccgcgcctggtcaccgcccatgctgccgccaaggacatcgccctggacaaggcggcgaagaacctgccgattccgctgcatcccggcgccgagcgcttctacaaggagaagggcgtactgcccgagtga

SEQ ID NO: 353655 - DNA, 1185 bp, Pseudomonas aeruginosa
atgattgcacagctcccctctgagttgctgtccctgcaactgccgttgcggatccgcatcggcgatgctcaggcgttcgatctggggccggatccacaggtaaccatggtcattcgcgacccctcgctgctaaccgagatcacccatcccagcctcgatgcgctgggcaaggcctacgtcgagaagcgtctcgacatcgaaggaccgatcagccaggtcatcggtatcggcgatgccctcagcgaagcgctcggcgaacccgatggcggcgcgccgccggttcgcgaaagccatgacaaggacaccgacgccgaagccatccattaccactacgacctgtccaacgacttctaccagctctggctggatccggaaatggtctattcctgcgcttatttcgagaccggcaaggaagacctcgccaccgcgcaactggccaagctccgtcacctgtgccgcaagctgcgtttgcagccgggcgagaagctgctcgatgtcggttgcggttggggggggctggcgcgcctggccgctcgcgagttcggcgtcgaggtcaccggcatcacattgagcaaggagcagctggcgctcggccgggagcgagtcaaggccgaaggcctggaggaccgagtcaccctcaagctgctggattaccgcgacctgccgcgcgatggccgcttcgacaaggtggtcagcgtcggcatgttcgagcacgtcgggcacgccaacctggggctgtacttccagcaactgtacgatgcggtgcgtcccggcggcctggtgatgaaccacggcatcacctcgcgctacaccgacggccgcccggttggcaagggggccggcgacttcatcgatcgctacgtgtttccccacggcgagctgccgcacctgtcgctggcggtggcgcggatgagcgaagccgggctggaagtagtcgacgtggaaagcctgcgtctgcactacgcccggaccctggacttctggagcgccaacctggaagccaggctgaaggaggcggctcgcctggtgcccgaggaaaccctgcggatctggcggctgtacctggccggatgcgcctacggcttcaagcgcggctggatcaacctgcaccagatcctcgccattcgcccccacgaggatggctcccacgagctgccctggtcgcggcgcgacctgtacgcctga

SEQ ID NO: 353656 - DNA, 624 bp, Pseudomonas aeruginosa
atgaacgagaccgtatccctcgaaacacgcgaagtacgctttctctccgtgttcgacttcgacggtaccctgacataccgagacagcttcgtgcccttcctgcgtttcgccttcggcaaccgggtgttcgtccgccgcatgctgcgcatggcaggacccagcctggcctatctctgccggcgtatcgaccgcgacgacctgaaggcgcgcctgatcgccaccttcctcaccgatgtgcccgtacatgtgctggaagagcgggcgctggcctaccagaaccgcttctgggaaacactgatgcgtccccacgcattgaccgcggtggccgaccaggtcagcagcggcagcaccgtgaccatctgttccgcctccccttcgctgctactcaggccgttcgccgagaagctcggcgtgcacctgatcgccaccgagctggaagtggtagacggcgtactgaccggcaggatcgtcggccgcaactgccggcgcgacgagaaagtctgccgcctggagcggcactacggtccgctgacccaatactccctgcgcgcctggggcgactcgcgcggcgatacggaactgctggcggcggcgctggagcgcttctggaaaccgttccgctga

SEQ ID NO: 353657 - DNA, 1206 bp, Pseudomonas aeruginosa
atgaaccagaaaatttccccgccttcacagaagctcgacggcctgttcctgctggccctgtcgatggccgtattcttcgtcggcgtgaccgagttcatgctgtcctccatgctcgggccgctggcgcaggcgttccacaccactaccagcggcgccgcctggctgatctccagctacgcgttctcctatgcgatcgccgcgccgttgctgggctacttctccgaccgcatgcaacgcaggaagctgctgctgctcgccctggtcctcttcgcggtcgatactctggccatcgtcatcgccccgaccctggaaattgccgttgtcctgcgggtaatcgggggcatcgcctcggcaatcatcattccgaccaccttcgccctggtcgcggaggtggtcgccccgcaaagacaggccggtgccatgggccaggtgatgctcggcatgaccctcggcattgccgccggcccggcactggccggcctcctctcggacttcttcggctgggcggcgcccttcctgttggtctcgtgcggttgcgtgctggtcttcctgatggcacgccagcgccttcccgtgcaagccgtggcaccgcgcgccgagggccatgcgctgggctggtgcaggcaatggagcatcctcaggccactgatcgccaagggtgcctggaacggcaccggggtcgccggcctgcttctctcgggagaggtgctgcgccagcgctacggcttcagcaccgcgcagataggcgtcagcatcgccgccttcggcgtgggcctggccgtgggcaacctcgccgcgggttacctgcgacgttatctgaagcgcgacgaagacatgctcctgctggtgctggcgctcctggtgttatcgatgtcgaccttcatgctcctgccgctaccgttacccgtggcgctctgctgcctgggcgcctggggcgccgcgctgggcctgggcgcgccggcgggcacggtggtactcgcctcgcgctccgggccggacaagggcatggtgctgtcgttcgccgagacgttcaacaacatcgccattctcgccagcgtgcccctggctgtgcgactgctggagctgaaggggccgcccgccaccctgtgggtattgggcatcggcctggggatcggcgcctggctcaccgtgctggactggttcgccagccgcaggagcgacgaggcgctgccgttgcgcgattga

SEQ ID NO: 353658 - DNA, 1836 bp, Pseudomonas aeruginosa
atgtgtggaatcgtaggcgcgatcgccgagcgcaacatcacccccatcctcatcgaaggcctcaagcgcctcgagtatcgcggctacgacagcgccggcgtggcggtcttcgataacgaaggcaggctgcagcgctgccgccgggtcggcaaggtcgccagcctggaggaaggcctggccggtactccgctgctcggccgcctgggcatcgcccatacccgctgggcgacccacggcgcgccaaccgaaggcaacgcccacccgcatttctccagcgacgaactggcggtggtgcacaacggcatcatcgagaaccacgaacctctccgtgagcggctcaaggggctgggctacgtgttcacctcgcagaccgacaccgaggtcatcgtccacctgctgcaccacaagctgcagtccatcggcgacctgaccctggcgctgaaggacgcggtcaaggaattgcacggggcctatggcctggcagtgatcagcgcggcgcagccggaccgcatcgtcgccgctcgcagcggcagcccgctggtgatcggcctcgggcttggcgagaacttcctcgcttccgaccaactggcgctgcgccaggtgaccgaccgcttcatctacctggaagaaggcgatatcgccgagatccgtcgcgacagcgtgcgcctgtgggatgtccagggcaacgacgtgcagcgcgagaccgtgcagtaccacgaaggcgccgaagccgccgacaagggcgagtaccggcatttcatgctcaaggaaatccacgagcagcccagcgtcgtgcagcgtaccctggaaggccgcctcgggcagaaccaggtaatggttgaaagcttcggtccgcaggcggcggagctgttcgccaaggtccgcaacgtgcagatcgtcgcctgcggcaccagttaccacgccggcatggtcgcccgttactggctggaaagcctgaccgggattccctgccaggtggaggtcgccagcgagttccgctaccgcaaggtcgcggtgcagccggattgcctgttcgtcaccatctcccagtccggtgagaccgccgacaccctggctgccctgcgcaacgccaaggagctgggcttcctctccagcgtggcgatctgcaacgttgccaccagttcgctggtgcgcgaatccgacctgaccctgctgacccaggccggcccggaaatcggcgtggcctcgaccaaggccttcaccacccagttggtcgccctgctgctgctgaccctgggcatcggccaggtgcagaagcgcctggccgatggcgtcgaagccgagctggtggacgaactgcgtcgcctgccgacccggctgggcgaggcgctggcgatgaaccggacggtggagaaggtttccgagctgttcgccgagaagcaccacaccctgttcctcggccgtggcgcgcagttcccggtggccctggaaggcgcgctgaagctcaaggaaatttcctatatccatgccgaagcctacccggccggcgaactcaagcatggcccgctggcgctggtggacagcgacatgccggtggttaccgtggcgccgaacaacgagctggtggagaagctcaagtcgaacctgcaggaagtccgcgcccgcggcggcgaactggtggtgttcgccgacgaaggcgcgggcatcgaggccggcgagggcacccatgtggtgggcatgccgcacatcggcgacgtgctctcgccgatcctctacaccatcccgttgcaattgctctcgtaccatgtcgccgtgctcaagggcaccgacgtcgaccagccgcgcaacctggccaagtcggtcaccgtcgagtaa

SEQ ID NO: 353659 - DNA, 774 bp, Pseudomonas aeruginosa
gtgatctcgaaacgtaatacgccgcaacgtcgccatgccatcctcgcgctgctttccgagcagggcgaggtcagcgtggacgcactcgccaagcgcttttccacctcggaagtgaccatccgcaaggacctcgccgccatggaaagccacggcctgctgttgcgtcgctacggcggtgcggtgccgatgccgcaggaactgatcggtgaagctgcgcagcccgtctcgccctacaagcaggctatcggtcgcgccgccgcggcgcgcatccgcgagcatgcgcggatcatcatcgacagtggcagcaccaccgcggcgatgatccccgaactcgggcacaagccgggcctggtggtgatgaccaactcactgaacgtggtcaacgccctgcgcgaactggagcacgagccggtgctgctgatgaccggggggacctgggatccgcattccgagtcgttccaggggcaggttgccgagcaggtgctgcgttcctatgacttcgaccaactattcatcggtgccgacggcctcgatctcgaacgcgggacgaccacgttcaacgaattgctgggcctgagccgggtgatggccgaggtcgcccgcgaggtgatcgtcatggccgaggccgacaaggtcggtcggcgcattcccaaccaggaattgccctggagcagcatccataccctgattaccgacgagcgcctggaatcttccgcgcgcgaacagataaccgcccggggcgtcacgctgatctgcaccccggtcgaggcctga

SEQ ID NO: 353660 - DNA, 510 bp, Pseudomonas aeruginosa
atgccgaagcctgcgaaacggatcgtgctggggctgctcatagcctgggcggtgctgcccgaatggccgcggatacccgtcgaaggcgccagtgcccgcgactggaatccgcgaaccttctggttcgagccctgggggcgctccggagtgcacaagggcatcgacatcttcgcccgcagcggcacccccgtacgctccgccagctacggcctggtgctctatcgcggggagatcgccctcggcggcaaggtcgtcctggtgctggcgcccaagtggcgcctgcattactacgcccatctcgatagcctcgacgcctatccgggccagccggtccttgccggttcccgcctgggtacggtcggcaccaccggcaacgcgcgcggcaagccggcccacctgcactacgcgatcatcaccttgctgccctatccctggctggccgacgacagcacccagggttggaagaagatgttctacctcgatcccgatacggtgctgccgagccgatga

SEQ ID NO: 353661 - DNA, 1365 bp, Pseudomonas aeruginosa
atgtcccttgaaatcgtgattctcgccgccggccagggcacccgcatgcgttcggccctgcccaaggtcctccatcccattgccggcaagccgatgctcggccacgtcatcgactgcgcgcgccagttgcagccggaacggatccacgtggtgatcggccacggcgcggatctggtgcgtgagcggatggccgccgacgacctgaatttcgtgctccaggccgaacagctcggtacgggccatgcggtggcccaggccctaccgttcctcagtgcagaccaggtgctgatcctctacggcgacgtgccgctgatccagctggacaccttgcagcgcctgctggcgcaagtcaccccggaccagttgtcgttgctcaccgtcgacatgctcgaccccaccggctacggccgcatcgtccgtgacgaccagggcgcggtgcaggccatcgtcgagcacaaggacgcgaccccggcgcagcgccagatcggcgagatcaacaccggcatcctcgcggtgccgggcaagcgccttgccgactggctcggccgcctgtccaacgacaacgcccagggcgagtactacctgaccgacgtgatcgccatggcggtcggcgacggcctggtggtggccagcgcccaaccgctggacgcgatggaagtgcagggcgtcaatgaccgcatgcaacaggcccagctggagcgtcactaccagcgcctgcgcgcagaggagctgatgcgccagggcgtgaccctgctcgatccgcagcgcctggatgtccgtggcgaaatctcggtcggccgcgacgtgctgatcgacgtcaatgtggtgttggaaggccgcgtggtgatcgaggacgacgtgcgcatcggaccgaactgcgtgattcgcgacagcgtcctgcggcgtggcgcggtgatcaaggccaacagccacctggaaggcgcggagctgggcgagggtagcgatgccggtccgttcgcccgcctgcgtccgggcagcgtgctcggcgctcgggcccatgtcggcaacttcgtcgaactgaagaatgcccgcctgggcgagggcagcaaggccggccacctgagctacctgggcgatgccgagttgggcgccaactgcaacatcggcgccggcaccatcacctgcaactacgatggcgcgaacaagttccgcaccgagctgggcgacgatgtgttcatcggctcgaacaactcgctggtggcgccgctgaagatcggcgatggcgcgacgaccgcggccggctccaccatcacccatgaggttccggcgaagaacctggccttcggccgcgcccggcagaagaacctggaaaactggaagcgcccggaaaaaatcaagaagtaa

SEQ ID NO: 353662 - DNA, 426 bp, Pseudomonas aeruginosa; identical to SEQ ID NO: 319231

SEQ ID NO: 353663 - DNA, 1377 bp, Pseudomonas aeruginosa
atgagtagcggacgtatcgttcaaatcatcggcgccgtgatcgacgtggaattcccgcgcgatgccgtgccgagcatctatgaagccctgaaggttcagggcgttgaaaccaccctggaagtccagcagcagctgggcgacggcgtggttcgttccattgcgatgggttccaccgaaggcctcaagcgtggcctgaacgtggacagcactggtgctgccatctccgtgccggtcggtaaagcgaccctgggccggatcatggacgtactgggcaacccgatcgacgaagccggtcccatcggcgaagaagagcgctggggcatccaccgcgaagctccgtcctatgccgaccaggctggcggcaacgagctgctggaaaccggcatcaaggtgatcgacctggtctgcccgttcgccaagggcggcaaggtaggcctgttcggcggcgccggcgtgggcaagaccgtcaacatgatggaactgatccgtaacatcgccatcgagcacagcggttattccgtgttcgcgggtgtgggcgagcgtactcgtgagggtaacgacttctaccacgagatgaaggactccaacgtactggacaaggtagccctggtatacggccagatgaacgagccgccgggcaaccgtctgcgcgtcgcactgaccggcctgaccatggccgagaagttccgtgacgaaggccgtgacgttctgttgttcatcgacaacatctaccgttacaccctcgccggtaccgaagtatccgcactgctgggccgtatgccgtccgcggtgggctatcagccgaccctggccgaagagatgggcgttctgcaggagcgcatcacctccaccaagaagggctcgatcacctcgatccaggccgtatacgttcccgcggacgacctcaccgacccgtccccggcgaccaccttcgcccacttggacgcgaccgtcgtactgtcccgtgacatcgcctcgctgggtatctaccccgcggtcgacccgctggactccacctctcgccagctcgatccgctggtgatcggccaggatcactacgacaccgctcgcggcgtccagtatgttctgcagcgctacaaggagctgaaggacatcatcgcgatcctgggcatggacgaactgtccgaagccgacaagctgctggtggcgcgcgctcgtaagatccagcgcttcctgtcccagccgttcttcgtagcggaagtcttcaccggttcgccgggcaagtacgtttccctgaaggacaccatcgctggcttcaagggcattctcaacggcgactacgatcacctgccggagcaggcgttctacatggtcggcggtatcgaagaagcggtcgagaaagccaaaaaactgtaa

SEQ ID NO: 353664 - DNA, 861 bp, Pseudomonas aeruginosa; identical to SEQ ID NO: 319229

SEQ ID NO: 353665 - DNA, 1545 bp, Pseudomonas aeruginosa
atgcagcaactcaatccttccgaaattagtgaaatcatcaaggggcgcatcgagaaactcgacgtcgcctcccaagcacgaaacgaaggcaccatcgtcagcgtgtccgacggtatcgtgcgcatctacggtctggccgacgtcatgtacggcgagatgatcgagttcccgggcggcgtctacggtatggcgctgaacctggagcaggattccgtgggtgccgtggtcctgggtgaataccagggcctcgccgaaggcatgaacgccaagtgcaccgggcgcatcctggaggttccggtcggtccggaactgctgggtcgcgtagtcgacgcactgggcaatccgatcgacggcaagggtccgatcgacgccaaggccaccgacgcggtcgagaaggtcgctccgggcgtgatctggcgtaagtcggtagaccagccggtacagaccggctacaagtcggtcgacgccatgatcccggtaggccgtggccagcgcgagctgatcatcggcgaccgccagatcggcaagaccgccctcgcggtcgacgccatcatcaaccagaaggacagcggcattaagtgcgtctacgtggccatcggccagaagcagtccactatcgccaacgtcgtacgcaagctggaagagaacggtgccctggccaacaccatcgtggtcgccgccagcgcttccgagtccgccgccctgcaatacctggcgccgtactccggttgcaccatgggcgaatacttccgcgatcgcggtgaagacgccctgatcgtctacgacgacctgtccaagcaggccgtggcttatcgccagatctccctgctgctgcgccgtccgccgggtcgcgaagcctacccgggcgacgtgttctatctccacagccgtctgctggagcgcgcttcccgcgtttccgaagagtatgtcgagaagttcaccaacggcgccgtgaccggcaagaccggctcgctgaccgcgctgccgatcatcgagacccaggccggcgacgtttccgcgttcgttccgaccaacgtgatctcgatcaccgacggccagatcttcctggaatccgccatgttcaactcgggtatccgtccggccgtcaacgccggtatctcggtatcccgcgtaggtggcgcggcccagaccaagatcatcaagaagctgtccggcggcatccgtaccgctctggcccagtaccgtgaactggcggccttcgcccagttcgcctcggacctggacgaagcgacccgcaagcagctggagcatggtcagcgcgttaccgagctgatgaagcagaagcagtacgcgccgatgtcgatcgccgagatgtcgctgtccctgtatgccgccgagcgtggcttcctgcaggacgtcgaaatcgccaaggtcggtagcttcgagcaggcgttgatctcctacttccagcgcgagcatgccgctctgctggcgaagatcaacgagaaaggtgacttcaacgacgaaatcgacgcgggcatcaaggccggcatcgagaagttcaaggccacccaaacctggtaa

SEQ ID NO: 353666 - DNA, 537 bp, Pseudomonas aeruginosa; identical to SEQ ID NO: 319227

SEQ ID NO: 353667 - DNA, 471 bp, Pseudomonas aeruginosa; identical to SEQ ID NO: 337847

SEQ ID NO: 353668 - DNA, 258 bp, Pseudomonas aeruginosa; identical to SEQ ID NO: 319225

SEQ ID NO: 353669 - DNA, 870 bp, Pseudomonas aeruginosa
atggcagcagaaaccgcttcgggttacatccagcaccacttgcagaacctgaccttcgggcgtctgcctaatggtgattgggggttcgcccacaccgccgagcaagccaaggaaatgggcttctgggcattccacgtagacaccctgggctggtcggtactgctcggcgtggtgttcctgttcatcttccgcctggcagccaagaaggccaccagcggccagccgggtggactgcagaacttcgtcgaggtgatggtcgagttcgtcgacaccagcgtcaaggacaccttccacgggcgcaacccgttgatcgcgcccctagccctgaccgtgttcgtctggatcttcctgctcaacctgatcgacctggtaccggtggactacctgccgatgctggccgcgaagatcaccggcgacgagcacctgttcttccgcgcggtggccaccaccgacccgaacgccaccctcggcctgtcgatctcggtgttcgcgctgatcgtcttttacagcatcaaggtcaagggcatcggcggcttcctcggtgaactgaccctgcaccccttcagcagcaagaacatcgtcgttcagatcctgctgattccggtgaacttcctgctcgagttcgtgaccctgatcgccaagccggtttcgctggcgctgcgtctgttcggcaacatgtatgccggcgaactgatcttcattctgatcgccgtcatgttcggtagcggaatgttcctgctgagtgccctgggcgtagccctgaactgggcgtgggctgtgttccacatcctgatcatcaccctgcaggccttcatcttcatgatgctgaccatcgtctacctgtcgatggcgcacgaagacaaccattaa

SEQ ID NO: 353670 - DNA, 381 bp, Pseudomonas aeruginosa; identical to SEQ ID NO: 337850

SEQ ID NO: 353671 - DNA, 873 bp, Pseudomonas aeruginosa
atggcagccaagaaacgtggactgggacgcgggctcgatgccctgctgggcggctcgagtcccgccaaactgcaggaggaagccgtacaggccgaccgccgcgagttgcagcagatccccctcgacctgatgcagcgcggcaagtaccagccgcgtcgcgacatggaccctcaggcgctggaggaactggcgcagtcgatcaaggcccagggcgtgatgcagcccatcgtggtgcggccgatcgccaatggccgctacgagatcattgccggcgagcggcgctggcgggccagccagcaggccggactggaaaagatcccggcgctggtgcgcgacgtgccggacgaagcggccatcgccatggcgctgatcgagaacatccagcgcgaggacctcaacccgatcgaggaagccgctgccctgcagcgcttgcagcaggagttccagctgacccagcagcaggtcgcggaagcggtcggcaagtcgcgcgcgaccattaccaacctgctgcgcctgatcggcctgccggaagagatcaagaccctgctttcccatggcgacctggagatgggccatgcccgtgcgctcctcggtctgccggcagaacggcaggtggaaggggcgcgacatgttgtcgcacatgggctgaccgtacgtcagaccgaagccctggttcggcagtggacgcatgcccctggcaagcctgcgggaccggtcaagagcgacccggacatcgcccgcctggaacagcgcctggccgagcgcctgggcgcttcggtgcagatccggcatggtcagaagggcaagggacagttggtcatccgctacagctccctggatgaactgcagggcgttctcgcccacatccgttga

SEQ ID NO: 353672 - DNA, 789 bp, Pseudomonas aeruginosa
atggctaaggtattcgcgatcgccaaccagaaaggcggtgtcggcaagaccacgacctgtatcaacctcgcggcctccctcgtggcgaccaagcgccgcgtcctcctgctggacctggatccccagggcaacgccaccaccggcagcggcatcgacaagcacaacctggagcactccatctacgacgtgctcaccggcgagtgcaacctcgccgaggccatgcagttctccgaacacggcggctaccagttgctgccggccaaccgcgacctgaccgccgcggaagtggtgctgctggaaatggacatgaaggaaaatcgcctgcgcaacgcgctggcgccgatccgcgagaactacgactacatcctcatcgactgcccgccgtcgctgtcgatgctcaccgtcaacgcgctgaccgccgccgacggcgtgatcatccccatgcagtgcgagtactacgcgctggaggggctgaccgacctgatgaacagcatccagcgcatcggccagttgctcaacccgacgctgaagatcgagggtctgttgcggaccatgtacgatccgcgcatcagcctgaccaacgatgtctccgcgcagttgcaggagcatttcggcgacaccctctacagcaccgtcatcccgcgtaacgtgcgcctcgccgaagcccccagcttcggcatgccggcgctggtttacgacaagcaatcccgcggcgccatcgcctacctggcgctggccggcgagctggtccgccgccagcgcgccaaaggccgcgccgcaaccgcataa

SEQ ID NO: 353673 - DNA, 645 bp, Pseudomonas aeruginosa
atgtctgcggtaacccaacaccacgccgacgaactcgcgcgcggtgctgacgagctaggcgtcgccctcgacgccgacaagcaacgccagctgctggcctacctggccctgctgatcaaatggaacaaggcctacaacctgaccgccgtacgcgacccggacgagatggtttcgcgccacctgctcgacagcctgagcatcgtgccttatgccgaggctggggataactggctggatgtcggcagcggcggcggcatgcccggcgtgccgctggccattctgttcccggaaaagcgcctgaccctgctcgacagcaacggcaagaagacccgcttcctgacccaggtgaagctcgaactgaagctggccaacctcgaagtcgtgcacagccgggtggaagccttccgtcccgagagccccttcgatggcatcgtttcccgcgctttcagcagcctggaggacttcgccaactggacccgccacctcggtggccaggaaacccgctggctggcgatgaagggcgtgcatccgaacgaagagctggcggcactcccggaggatttccgggtcgaagccgagcacgcgctggcggtacccggttgccaaggtcagcggcatctgctgatactgcggcgcacagcatga

SEQ ID NO: 353674 - DNA, 1893 bp, Pseudomonas aeruginosa
gtggatttccctacccgttttgacgtaatcgtgatcggcggtggccatgcaggcaccgaagccgcactcgcggctgcgcgcatgggtgtgaaaaccctgctgttgacccacaatgtggaaaccctggggcagatgagctgcaaccccgccatcggcggcatcggcaagagccatctggtcaaggaaatcgacgcccttggcggcgccatggccgaagccaccgacaagggcggtatccagttccgcatccttaacagccgcaaggggccggcagtgcgcgccactcgtgcacaagccgatcgcgtgctctataaggccgctatccgccatacactggaaaaccagccgaacctgtggatattccagcaggcctgcgacgacctgatcgtcgagcaggatcaggtccgcggcgtagtgacccagatgggactgcgcttccatgccgacaacgtggtcctgactaccggcaccttcctcggcggacttatccacatcggcctggagaactactcaggcggacgcgccggcgacccgccgtccatcgcactggcgcgtcgtctgcgtgaattgccgctgcgggtcggccggctgaagaccggtacgccgccgcggatcgacgggcgcagcgtggacttctcggtgatgaccgagcagccgggcgacacgccgatcccggtgatgtccttcctcggttcgaaggaacagcatcccgagcaggtcagttgctggatcacccataccaacgcccggacccacgagatcatcgccgccaatctcgatcgttcgccgatgtattccggtgtgatcgaaggcatcggcccgcgctactgcccttcgatcgaagacaagatccatcgcttcgccgataaggaaagccaccaggtcttcctcgagccggaaggcctgacgacccacgagctgtatcccaacggcatttccacgtccctgccgttcgacgtgcaactgcagatcgtgcgttccatccgtggcatggaaaacgcccacatcgtgcggccgggctatgcgatcgagtacgacttcttcgatccccgcgatctcaggtacagcctggagaccaaggtcatcggcggcctgttcttcgccggccagatcaacggcaccaccggctacgaggaagctggcgcccagggcctgctggccggcgccaatgctgcgttgcgttcgcaaggcaaggacagctggtgcccgcgccgcgacgaggcctacatcggcgtgctggtggacgacctgatcacgctcggcacccaggagccgtaccgcatgttcacctcgcgggcggaataccgcctgatcctccgcgaggacaacgccgacctgcgtctcaccgagaagggacgcgagctgggccttgtcgacgatcggcgctgggctgccttcgaagccaagcgcgaaggtatcgaacgcgaggaacagcggctgaagagcacctgggtgcggccgaataccccgcagggcgacgccatcgccgagcgcttcggtacgccgctgacccatgaatacaatctgctcaacctgctgagccgccccgagatcgattacgccggcctggtggagatcaccggcaacgctgtggataacccccaggtggccgagcaggtggagattcgcaccaagtacgccggctacatcgaccgccagcaggaggaaatctcccgtctgcgcgccagcgaagatacccgcctgcctgtggatatcgattacctggggatttccggcctgtcgaaggaaatccagaacaagctgaaccaggcccgtccggaaaccctcggacaggcttcgcggatccccggcgtcacgccggctgcgatttcgctgttgttgatccacctgaagaagcgtgcctctggccgccaactggagcagagcgcttga

SEQ ID NO: 353675 - DNA, 225 bp, Pseudomonas aeruginosa
atggagatcgtagccaacctggcggtgtggctcggcggcgaatgccaggtcggacagatgatcgactggttcggcagttacgaccgcactagcgggctcagtgctcggctactgctgcgcaaacccgctaacgagggctccgagcgggatttccaggtctccgccaagcgccgcttcgagcgcctgtcgtcatccatcgatacgctggaaagcggcaacgactga

SEQ ID NO: 353676 - DNA, 1368 bp, Pseudomonas aeruginosa
atgcaagccgccaccgaaaccatcgtcgcgatcgctaccgcccagggccgcggcggcgtgggaatcgtccgcgtctccggacctctcgccggacagatggccgtggccgtgagcggacgccagctgaaagcccggcatgcgcattacggaccgttcctcgatgccggtgggcaggtgatcgacgaaggcctgtcactgtatttccccggcccgaactcgttcaccggcgaagacgtactcgaactgcaggggcacggcggccccgtggtactcgacctgctggtgcagcgttgtctggaactgggcgcccgccaggcgcgaccgggcgagttcagcgagcgcgcgttcctcaacgacaagctcgacctggcccaggccgaagccatcgccgatctgatcgaggccagctcggagcaggccgcgcgcaatgcattacgttccctgcagggcgaattctcacgccgggtacatgcattgaccgagcaactgatttccctgcgcatctatgtcgaagccgccatcgacttccccgaggaagaaatcgacttcctcgccgatggccatgtactggggcttctggaaaaagtacgcacagaattatccacagtgcagcgcgaagcttcccaaggcgccctgctgcgcgacggcatgaccgtggtcatcgccggacgaccgaatgccggcaagtccagcctgctgaatgccctggccggtcgcgaggcggccatcgtcacggacatagccggcaccacccgcgatgtattgcgcgaacatattcacatcgatggcatgcccctgcatgtggtggacaccgcaggcctgcgggataccgaggaccatgtggaaaagatcggcgtggaacgtgcgctgaaagccatcggcgaagccgatcgcgtgctgctggtggtggacgccaccgccccggaagcagcggacccgttttccctatggccggagtttctcgaccagcgaccggaaccgggcaaggtcaccctgatccgcaacaaggcggatttgtccacagagtccattggcctcgaggaaagcgcggacggccacgtcaccatcaccctctcggcgcgcaccggcgccggcctggagctgctgcgcgaacacctgaaggcctgcatgggcttcgaacagaccgcggaaagcggtttcagcgcccgccggcgccacttggaagcgctacgcctggcagggcaggcgctggagcatggccacagccaacttatccacaatggcgccggcgaactgctggccgaggatctgcgccaggcccagcagcacctgggcgaaatcaccggcgcattcacccccgacgacctgctgggtcgcatcttctcgagtttctgcatcggcaagtaa

SEQ ID NO: 353677 - DNA, 1737 bp, Pseudomonas aeruginosa
atggacattcaacgctcgattctcatcgtcgcccttgcagtcgtgtcctacctgctggttctccagtggaacaaggattacggtcagcctgagctgcccgccgccagcgcttcgatgaacaccacgcaaggcctgccggacactccgtccgcctcgggcaccagcagtgacgttcccactgcccagagcagcgcggccggcagcgaagccgccgacaagccggttgcggtcagcgacaagctgatccaggtgaagaccgacgtcctcgacctggccatcgatccccgtggcggcgatatcgtccagctcggcctgttgcagtatccgcgccgcctggaccgtccggacgtgccgttcccgctgttcgacaacggtcgcgaacgtacctacctggcgcagagcggcctcaccggtgccgacggcccggacgccagcagcgccggccgcccgctgttccacagtgcgcagagcagctaccagttggccgacggccagaacgaactggtcgtggacctgagcttcagccacgacggtgtcaactacatcaagcgcttcaccttccaccgtggcctgaaagccgattgctcggacaaggaaaaggcccagaagaagatcgagtgcatcaatgaaaacgcctatcaggtcggcgtcagctacctgatcgacaaccagagcggcaaaacctggagcggcaacctgttcgcccagctcaagcgcgacggcagcgccgacccgtcctcgaccaccgccaccggggtgtccacctacctcggcgccgcggtctggaccccggattcgccgtacaagaagatctccaccaaggacatggacaaggaacagttcaaggagtccgtgcagggtggctgggtcgcctggctgcaacactacttcgtgaccgcctgggttccgaccaagggcgagcagcaccaggtcatgacccgcaaggacggccagggcaactacatcgtcggtttcaccggcccgaccctgagcgttccggcgggtagcaaggtggaaaccgacctgaccctgtatgccggcccgaaactccagaagcacctgaaggaactctccccgggcctggaactgaccgtcgactacggtttcctttggttcatcgcccagccgatcttctggctgctgcaacatatccacagcctgatcggcaactggggctggtcgatcatcgccctgaccgtcctgatcaagctggccttcttcccgttgtccgccgccagctaccgttcgatggcgcgcatgcgcgcggtgtcgccgaagatgcaggcgatcaaggaacagcacggcgacgatcggcagaagatgtcccaggcgatgatggagctgtacaagaaggagaagatcaatccgctgggcggctgcctgccgatcctggtccagatgccggtcttcctctccctctactgggtactcctggaaagcgtggaaatgcgccaggcgccgtggctcggctggatcaccgacctgtcggtgaaggatccgttcttcatcctgccgatcgtcatgggcggcaccatgctgatccagcagatgctcaacccgaccccgccggacccgatgcaggccaaggtgatgaaactgatgccgatcatcttcaccttcttcttcctctggttcccagccggtctggtgctgtactgggtagtcaacaactgcctgtcgatcgcacagcagtggtacattacccgcaagatcgaggcagccgcgaagaccgcctga

SEQ ID NO: 353678 - DNA, 408 bp, Pseudomonas aeruginosa; identical to SEQ ID NO: 337858

SEQ ID NO: 353679 - DNA, 135 bp, Pseudomonas aeruginosa; identical to SEQ ID NO: 319214

SEQ ID NO: 353680 - DNA, 1545 bp, Pseudomonas aeruginosa
gtgtccgtggaactttggcagcagtgcgtggatcttctccgcgatgagctgccgtcccaacaattcaacacctggatccgtcccttgcaggtcgaagccgaaggcgacgaattgcgtgtgtatgcacccaaccgtttcgtcctcgattgggtgaacgagaaatacctcggtcggcttctggaactgctcggtgaacgcggcgagggtcagttgcccgcgctttccttattaataggcagcaagcgtagccgtacgccgcgcgccgccatcgtcccatcgcagacccacgtggctcccccgcctccggttgctccgccgccggcgccagtgcagccggtatcggccgcgcccgtggtagtgccacgtgaagagctgccgccagtgacgacggctcccagcgtgtcgagcgatccctacgagccggaagagcccagcatcgatccgctggccgccgctatgccggccggagccgcacctgcggtacgcaccgagcgcaacgtccaggtcgaaggcgcgctgaagcacaccagctatctcaaccgtaccttcaccttcgagaacttcgtcgagggcaagtccaaccagttggcccgcgccgccgcctggcaggtggcggacaacctcaagcacggctacaacccgctgttcctctacggtggcgtcggcctgggcaagacccacctgatgcatgcggtgggcaaccacctgctgaagaagaacccgaacgccaaggtggtttacctgcattcggaacgtttcgtcgcggacatggtgaaggccttgcagctcaacgccatcaacgaattcaagcgcttctaccgctcggtggacgcactgttgatcgacgacatccagttcttcgcccgtaaggagcgctcccaggaggagttcttccacaccttcaacgcccttctcgaaggcggccagcaggtgatcctcaccagcgaccgctatccgaaggaaatcgaaggcctggaagagcggctgaagtcccgcttcggctggggcctgacggtggccgtcgagccgccggaactggaaacccgggtggcgatcctgatgaagaaggctgagcaggcgaagatcgagctgccgcacgatgcggccttcttcatcgcccagcgcatccgttccaacgtgcgcgaactggaaggtgcgctgaagcgggtgatcgcccactcgcacttcatgggccggccgatcaccatcgagctgattcgcgagtcgctgaaggacctgttggcccttcaggacaagctggtcagcatcgacaacatccagcgcaccgtcgccgagtactacaagatcaagatatccgatctgttgtccaagcggcgttcgcgctcggtggcgcgcccgcgccaggtggccatggcgctctccaaggagctgaccaaccacagcctgccggagatcggcgtggccttcggcggtcgggatcacaccacggtgttgcacgcctgtcgtaagatcgctcaacttagggaatccgacgcggatatccgcgaggactacaagaacctgctgcgtaccctgacaacctga

SEQ ID NO: 353681 - DNA, 1104 bp, Pseudomonas aeruginosa
atgcatttcaccattcaacgcgaagccctgttgaaaccgctgcaactggtcgccggcgtcgtggaacgccgccagacattgccggttctctccaacgtcctgctggtggtcgaaggccagcaactgtcgctgaccggcaccgacctcgaggtcgaactggttggtcgcgtggtactggaagatgccgccgaacccggcgagatcaccgtaccggcgcgcaagctgatggacatctgcaagagcctgccgaacgacgtgctgatcgacatccgtgtcgaagagcagaaactcctggtgaaggccgggcgtagccgcttcaccctgtccaccctgccggccaacgatttccccaccgtagaggaaggtcccggctcgctgaacttcagcattgcccagagcaagctgcgtcgcctgatcgaccgcaccagcttcgccatggcccagcaggacgtgcgttactacctcaacggcatgctgctggaagtgaacggtggcaccctgcgctccgtcgccaccgacggccaccgactggccatgtgctcgctggatgcgcagatcccgtcgcaggaccgccaccaggtgatcgtgccgcgcaaaggcatcctcgaactggctcgtctgctcaccgagcaggacggcgaagtcggtatcgtcctgggccagcaccatatccgtgccaccactggcgaattcaccttcacttcgaagctggtggacggcaagttcccggactacgaacgcgtactgccgcgcggtggcgacaagctggtggtcggtgaccgccagcaactgcgcgaagccttcagccgcaccgcgatcctctccaacgagaagtaccgcggcattcgcctgcagctttccaacggtttgctgaaaatccaggcgaacaacccggagcaggaagaggccgaggaagaagtgcaggtcgagtacaacggcggcaacctggagatcggcttcaacgtcagttacctgctcgacgtgctgggtgtgatcggtaccgagcaggtccgcttcatcctttccgattccaacagcagcgccctggtccacgaggccgacaatgacgattctgcctatgtcgtcatgccgatgcgcctctaa

SEQ ID NO: 353682 - DNA, 1110 bp, Pseudomonas aeruginosa
atgtccctgacccgcgtttcggtcaccgcggtgcgcaacctgcacccggtgaccctctccccctccccccgcatcaacatcctctacggcgacaacggcagcggcaagaccagcgtgctcgaagccatccacctgctgggcctggcgcgttcattccgcagtgcgcgcttgcagccggtgatccagtacgaggaagcggcctgcaccgtattcggccaggtgatgttggccaacggcatcgccagcaacctggggatttcccgtgaacgccagggcgagttcaccattcgcatcgatgggcagaacgcccgaagtgcggctcaattagcggaaacacttccactgcaactgatcaacccggacagctttcggttgctcgagggagcgccgaagatccgccgacagttcctcgattggggagtgttccacgtggaacctcggtttctgcccgtctggcagcgcctgcagaaggcgctgcgccagcggaactcctggctccggcatggtaaactggatcccgcgtcgcaagcggcctgggaccgggaattgagcctggccagcgatgagatcgatgcctaccgcagaagctatatccaggcgttgaaaccggtattcgaggaaacactcgccgaattggtttcactggatgacctgacccttagctactaccgaggctgggacaaggaccgggacctcctggaggttctggcttccagcctgttgcgcgaccagcagatgggccacacccaggcgggaccgcagcgtgcggatcttcgcatacggttggcaggtcataacgccgcggagattctctcgcgcggtcagcagaagctggtggtatgcgccctgcgcatcgcccaaggccatctgatcaatcgcgccaagcgcggacagtgcgtctacctggtggacgacctgccctcggaattggatgagcagcatcgaatggctctttgccgcttgcttgaagatttgggttgccaggtattcatcacctgcgtggacccgcaactattgaaagacggctggcgcacggatacgccggtatccatgttccacgtggaacatggaaaagtctctcagaccacgaccatcgggagtgaagcatga

SEQ ID NO: 353683 - DNA, 2421 bp, Pseudomonas aeruginosa
atgagcgagaacaacacgtacgactcttccagcatcaaggtgctgaaggggctggatgccgtacgcaagcgccccggcatgtacatcggcgacaccgacgatggcaccggtctgcaccacatggtgttcgaggtggtggataactccatcgacgaagcgctggccggttactgcagcgaaatcagcatcaccatccatacggatgagtcgatcactgtccgcgacaatggacgcggtattccggtggatatccacaaggaagaaggggtttctgcggcggaagtgatcatgaccgtcctccacgccggcggcaagttcgacgacaacacctacaaggtgtccggcggcttgcacggtgtgggcgtctcggtggtgaacgcgctgtcccatgaactgcgcctgaccatccgtcgccacaacaaggtctgggaacaggtctaccaccacggcgttccgcagttcccactgcgcgaagtgggcgagaccgatggctccggcaccgaagttcacttcaagccgtccccggagaccttcagcaacatccacttcagttgggacatcctggccaagcgcatccgcgagctgtccttcctcaactccggcgtcggcatcctgctgcgcgacgagcgtaccggcaaggaggagctgttcaagtacgaaggcggtctgaaggccttcgtcgagtacctgaacaccaacaagaccgcggtgaacgaggtattccacttcaacgtccagcgtgaagaggacggcgtgggtgtggaagtcgccttgcagtggaacgacagcttcaacgagaacctgctctgcttcaccaacaacatcccgcagcgtgatggcggcacccacctggccggtttccgttcggcgctgacgcgtaacctgaacaactacatcgaggccgaaggcctggcgaagaaattcaagatcgccaccaccggcgacgatgcccgcgaaggcctcaccgcgatcatctcggtgaaggtaccggacccgaagttcagctcgcagaccaaggacaagctggtctcctccgaggtgaagactgcggtggaacaggagatgggcaagtacttcgccgacttcctgctggagaatcccaacgaagccaaggccgtggtcggcaagatgatcgacgccgcccgtgcccgcgaggccgcgcgcaaggcgcgcgagatgacccgccgcaagggcgcactggacatcgccggcctgcccggcaagctggccgattgccaggaaaaggacccggcgctctccgaactgtacatcgtggagggtgactccgcgggcggttccgccaagcagggccgcaatcgccggacccaggcgatcctgccgctcaagggcaagatcctcaacgtcgaaaaggcgcgcttcgacaagatgctctcctcccaggaggtcggtacgctgatcaccgccctgggctgtggcatcggccgcgaggaatacaacatcgacaagctgcgctaccacaacatcatcatcatgaccgatgctgacgtcgacggttcgcacatccgcaccctgctgttgaccttcttcttccgccagatgcccgagctgatcgagcgtggctacatctacatcgcccagcccccgttgtacaaggtcaagcgcggcaagcaggagcagtacatcaaggacgaccaggccatggaagagtacatgacccagtcggccctggaagacgccagcctgcacgtcaacgagcacgctccgggcctgtccggggcggcgctggagaaactggtcaacgagtatcgcggggtgatcgccaccctcaagcgcctgtcgcgcctgtacccccaggagctgaccgagcacttcatctacctgcctaccgtgtcggtggacgacctggctaacgagtcggccatgcagggctggttggagaagttccaggcgcgcctgaccgccgccgagaagtccggcctgacctacaaggccagcctgcgcgaagaccgcgagcgccacctgtggctgcccgaggtggaactggtggcccacggcctgtccagctacgtcaccttcaaccgtgacttcttcgccagcaatgactaccgctcggtgtcgctgctcggcgaccagctgaacagcctgctggaagacggcgcctacgtgcagaagggtgagcgcaagcgcccgatcagcgccttcaaggacggcctggactggctgatggccgaaggtaccaagcgccacagcatccagcgatacaaggggctgggcgagatgaaccctgagcagctgtgggaaaccaccatggatccgaacgtccggcgcatgctcaaggtgaccatcgaggacgccatcgccgccgaccagatcttcaacaccctgatgggcgatgccgtggagccgcgccgcgacttcatcgaaagcaacgcgctggcggtgtcgaacctggacgtgtga

SEQ ID NO: 353684 - DNA, 774 bp, Pseudomonas aeruginosa; identical to SEQ ID NO: 324649

SEQ ID NO: 353685 - DNA, 537 bp, Pseudomonas aeruginosa; identical to SEQ ID NO: 319208

SEQ ID NO: 353686 - DNA, 1707 bp, Pseudomonas aeruginosa
gtgaaacgcctgaaaaagacactgcacctttcaagcttgtccctcgcttccctggctctttcttccgccgccctggcggccgctccggtcatgctcgaccagggcaaggaatggaccgaaagccaccgccaggacttctacagccgcgaccagggctcgcaggtgatgcccctgccctggctcaaggcgttgcgacagccggatggaacgcctttcctcgccgacagcctggcccgctacggctatttgcccaaccccaaggcgcccgcggaaggcctgccggtgggcttcaccgtagccggcacgggcgcccggcagatggtcggcatgacctgttcggcctgccatacccggcagatcgaggtgaagggcactgcctatcggatcgacggcggtccggcgatcgtcgacttccaggcattcctcgccgacctcgatcgggccgtgggaccgctgaccagcgatgacgccgccttcgacgccttcgccaagccgatcctcggggccaatccgcctcccggtgcgcgcgacgctctgctcgcggcggtgaaggaatggtacgagccctatcacacgctgatcgagcgcgcgctgcccaaggacacctggggaccggcgcggctggacgcggtatcgatgatcttcaaccgccttaccgggctggatatcggcaccgcgccgccctacctgattcccgacaacatcaaggcggccgatgcgccggtgcgctatccgttcctgtggaacgcggcgcggcagaacaagacccagtggcccggcttcgccgccaacggcaacgacctgctcggcctggcgcgcaatgtcggcgaggtctacggggtgttcgccaccttccacccgcagaagagcaagttccacctgctgggcatggactacctgaagatcaactcggccaacttccacgggctgggcaagctggaagacctgatcaagaagatcggcccgccgaagtggccctgggcggtggacaagcacctggccaggaaaggcgcgctgatcttcgcccgcaagaccgacgaaggtggctgcgtggagtgccacggcatccggatcaaggacctggtgctttgggacactccgctgagggacgtcggcagcgacagccgccagcacgccatcctcgatggccaggtgcagaccggcgtgatggagggcgcgcggatgccgttcggccagccgctgaaggcgaccgacggagccttcgatgtactcgccgtagcggtggccggttcgatcctgcagcacttcgtgccgatcctcggtgagaagcacgatgccaaggcggcggcggtcaagccggaaagcgtgatgaccgacgaaacccggcaactgctgaccgccttccagaagccggtgcgtacccaggccgacccctacccctacgagtcgcgggtcctgcaggggatctgggcagcggcgccgtacctgcacaacggctcggtgccgaccctggaagagttgctgaagccggccgcggagcgggtggaatccttcccggtgggcacggcctacgacgtggacaaggtcggcctcgccgcccagcagacccaattcggcagctatgtgctgaagaccaccggctgcgagcagcgtgattccggcaacagccgctgcggccatgagtacggcaccagcctgtcggccgaggagaagcgtgcgctgctggagtatctgaaggtcctgtag

SEQ ID NO: 353687 - DNA, 2058 bp, Pseudomonas aeruginosa
atgatgagcgccaaggatttcctggtcgaactgggcaccgaagagctgccgccaaaagccctcaacagcctcggcgaagccttcctcagcggtatcgagaagggcctcaaggctgccggtctgagctatgccgctgcgcgtttctatgcggcgccgcgccgtctcgccgtgctggtcgagcaactcgccgtgcagcagcccgaccgtaccgtcaacctagacggtccgccgctacaggccgccttcgacgccagcggtaacccgacccaggccgccctgggcttcgccaagaagtgcggcgtggatctgcagcagatcgacaagagcggtccgaagctgcgcttcatccagaccatcgccggccaaccggccgccggcctgctgccgggcatcgtcgaggcctcgttgaacgaactgccgattcccaagcggatgcgctgggcagctcgccgcgaggagttcgtgcgtccgacccaatggctggtgatgctgttcggcgacgatgtggtcgagtgcgagatcctcgcccagaaagccgggcgcgaatcccgtggccaccgcttccacaatccggacaatgtgcgtatttccagcccggcagcgtatctggaagacctgcgcggcgctcatgtgctggccgatttcgccgagcgccgcgagctgatcgccaagcgcgtggccgaactggccgccgagcaacagggcagcgccatcgtgccgccgagcctgctcgacgaagtgactgcactggtcgagtggccggtgccgctggtctgctccttcgaggagcgcttcctcgaggtcccgcaggaagccctgatcaccaccatgcaggacaaccagaaatacttctgcctgctggacgccaacggcaagctgctgcctcgcttcatcaccgtcgccaacgtcgagagcaaggcgccggagaacatcgtcagcggtaacgagaaggtggttcgcccgcgcctcaccgacgccgagttcttcttcaagcaggacaagaagcagccgctcgaaagcttcaatgagcgcctgcgcaacgtagtgttccaggcccagctcggcaccgtgttcgagaaggcccagcgcgtctccggcctggccgcctacatcgccgaacgtataggcggcaatgcgcagaacgcctcgcgcgccggcatcctgtccaagtgtgacctggcgaccgagatggtcggcgagttccccgaaatgcagggcatcgccggctactactacgccacccacggcggcgaagcggaagacgtcgccctggccctcaacgagcagtacatgccgcgcggcgccggcgccgagctaccctcgaccctgaccggcgccgccgtggcggtggccgacaagctcgataccctggtcggtatcttcggcatcggcatgcttcccaccggcagcaaggacccctacgcgctgcgccgcgctgcgctgggcgtgctgcgcatcctcatcgagaagcagctcgacctggacctggtagccgcggtcaacgccgccgtcgagcaatacggcgacaaggtcaaggccgccggcctggccgagcaggtgctggacttcgtgttcgaccgcctgcgcgcgcgctacgaggacgaaggcgtggacgtggccgtgtaccagtcggtgcgcgcgctcaagccaagctcgccgctggacttcgaccagcgcgtacaggccgtccaggccttccgccagttgcctgaagccgaggccctggccgcggcgaacaaacgggtgtcgaatattctcgccaagtccgaggacgaggttccgccgaacgtggatgccagcctgctggtggaagccgccgagaaggccctgggcagcgccgtggcgaacgccgaaagcgaagtcgcgccgctggcagcggcacgcgactatcgcgccgcgctggcccgcctggcggccttgcgcgagccggtggatacgttcttcgccgatgtgatggtcaatgtcgacgacgcggcggtgcgcgccaaccgctatgcgctgctggccaagctgcgcgggtcgttcctcggggtggcggacatctcgctgctcggctga

SEQ ID NO: 353688 - DNA, 948 bp, Pseudomonas aeruginosa; identical to SEQ ID NO: 319205

SEQ ID NO: 353689 - DNA, 552 bp, Pseudomonas aeruginosa
atgccacgctgcttctggtgcaacgacgatcccctctacatggcctaccacgatgaggagtggggtgtgccgcagcgcgatcccgacgcgctgttcgaacttctgctgctggagggcttccaggccggattgtcctggatcaccgtgctgaagaagcgcgagcgctaccgcgaggtgctgttcggcttcgacgtgcagcgggtggcacagatgagcgacgcggagatcgacgaactgatgctcgaccccggcatcattcgcaatcgggccaagctcaacgctgcgcggcagaacgcccaggcctggctggagctggacgacccggctgggttcctctggtccttcgtcggcggccagccgaagatcaaccatttcgccggtcgcgccgaggtgccggcgattaccccggaagccgaggccatgagcaaggcgctgcgcaaggccggcttcaacttcgtcgggccgaccatctgctacgccttcatgcaggccagcggcatggtcatggaccatacccaggactgcgaccgttacgcccaactcgtcggctag

SEQ ID NO: 353690 - DNA, 888 bp, Pseudomonas aeruginosa
gtggagaaattcaaaggtgccctggtggtgggggccctacgcctgttcgcgttattgccctggcgtgccgtgcaaggcgtcggggccggcataggctggctgatgtggaaattgccgaatcgatcccgcgaggtagtgcggatcaacctgtccaagtgcttccccgagttgtctgaaaccgaactggaaaagctggtcggacaaagcctgatggatattggccggaccctcaccgaaagtgcctgcgcctggatctggccgcctgaaaagtcgctgagatacatccgcgaggtcgaaggcatggaggtgctggaggaagcgctggcttccggcgatggcctggtcggcattaccagtcacctgggaaactgggaagtactcaaccacttctattgctcctacgccaagccgatcatcttctatcgtccgcccaagctgaaggcagtggacgagttgctgaagaagcaacgcgtgcaattgggcaatcgcgtcgcaccttccactccggagggtatcctcagtgtcatcaaggaagtgaagaaaggcggttgcgtagggattcccgccgaccccgagcccgcgcgtaccgctgggctcttcgtgccctacctgggcaccactgcattgatcagcaagttcgtcccgcagttgctttcacgcggcaaggcgcgtggagtgttcttccatgcggtgcgcctgcccgatggtagcggttacaaggtgatcctcgaagcggctccggcggacatgtacgacaaggacctggaagtgtctgtagcagccatgagccgcgagttggcgaagtatgtacgagcctatcccagccagtacatgtggagcatgaagcgcttcaagaaccgcccggatggcgagaaaaaatggtattga

SEQ ID NO: 353691 - DNA, 267 bp, Pseudomonas aeruginosa
atggataatcaacgacaatacccacgaaccccgctcaagtgccgaatccgtatcagtcacccgttatttggcgagctgatggcgcagacacgcgacctctccgacaccggggtctatgtcaaacacccggatctgacccagctcccaacaggcagtgtcgttactggccaggtaccggatctgccgatcgacgcgccgatcctgcagatggaagtcgtgcgagtcgatgcggaaggcgtcggcctgcgctttctcagcgaagcctga

SEQ ID NO: 353692 - DNA, 654 bp, Pseudomonas aeruginosa
atgtcagcctcttctccggcggcctggcgcggcaccctggccggcctgatcgccttccacatcttcatcatcatcgccagcaactacctggtgcagttgccgatcaccctgtttggctggcacaccacctggggcgccttcagctttccgttcatcttcctggctaccgacctcaccgtgcgcttgctgggcaagggccctgcccggctggtcatcgcccgggtcatgatcccggcgttgatcgcctcctacgtggtctcggtgttgttccaggaagcggcgttccgtggtttctccgcgctgctggagttcaacaccttcgtcgcacggatatccctggcaagcttcctcgcctatgtgctcgggcagatcctcgacatccaggtattcgaccgcctccgtcgttcccggcactggtggaccgcgccagtcgcctcgaccatcctcggcaacctgctggacaccttcaccttcttcttcgtggcgttctggcgtagcgacaatccgttcatggcgcagcactgggtggaaatcgccacggtggactacggagtgaagctgagtatcagccttctgctgttcgtgccgctctacggcatgctactcaacggcatcctgaagatgctgccggggcggccgcagagcaacgcttga

SEQ ID NO: 353693 - DNA, 273 bp, Pseudomonas aeruginosa
atgtcgaagcaagagcgttcagtcccgtcctatgtcgaatacccatacgagcaagcgattctctacgttcaccggaacgcctccgccaatgagatgctcgaatccgtacaggagcgcctcagggctctcctcggcctcctccatgccttggaaaggatcgaagtgcggacagggctgggcgttcccattcagcgcgtggcgcacatcctggtcacgctcggcggcgatgccctgacgctgctcacggccgcgcaccgggctaccacctcctga

SEQ ID NO: 353694 - DNA, 318 bp, Pseudomonas aeruginosa; identical to SEQ ID NO: 319199

SEQ ID NO: 353695 - DNA, 1374 bp, Pseudomonas aeruginosa
atgaaaatcatcatcctcggtgccggccaggtcggcggcacactggccgagcacctggccagcgaagccaacgacatcaccgtggtcgacaccgacggcgaccgcctgcgcgacctcggcgaccgcctcgacatccgcaccgtgcaaggcaaggcctcgttccccacggtgctgcgccaggccggcgccgacgacgccgacatgctggtggcggtgaccaatagcgacgagaccaacatggtcgcctgccaggtcgcctacaccctgttcaacaccccgaccaagatcgcccgcgtccgcgagccggcctacctgacccgtaccgggctgttcgacaacgaggcgatcccggtggacgtgctgatcagcccggagcaggtggtcaccaactacatcaagcgcctgatcgaacaccccggcgcgctgcaagtcatcgacttcgccgagggcaaggcgcaactggtcgggatcaaggcctactacggcggccctctggtagggcaggagctgcgccagctgcgcgagcacatgccgaacgtagatacccgcgtcgccgcgatctaccgccgcaaccggccgatcattccccagggcgacacggtgatcgaggccgacgacgaagtcttcttcatcgccgccaaggcccatatccgcgcggtaatgggcgagatgcgcaggctcgacgacagctacaagcggatcatcatcgccggcggcggcaatgtcggcgagcgcctggccgaggccatcgagagccgctaccaggtaaagatcatcgagcgcagcccgctgcgctgccggcacctctcggataccctggacagcaccatcgtgctcaacggcagcgcttccgaccgcgacctgctgctggaggaaaacatcggcgagaccgacgtgttcctcgccctgaccaacgacgacgaggccaacatcatgtcctcgctgctggccaagcggctcggcgcgagcaaagtgatgaccctgatcaacaacccggcctatgtcgacctggtgcaaggcggcgagatcgacatcgccatcagcccgcaactggcgaccatcggcaccctgctggcccacgttcgccgcggcgacatcgagagcgtacactcgctgcgccgcggcgcagccgaagcgatcgaagtggtagcccatggcgacgccaagtcgagcaaggtgatcggtcgctcgatcaacgagatcaagctgccgccgggcaccaccatcggcgcgctggtgcgcgacgaggaagtgctgatcgcccatggcgacacccgcatcgagagcggcgaccacgtgctgctgttcctggtcgacaagaaatacatccgagacgtcgagcgactgttccaggccggcctgacgttcttctga

SEQ ID NO: 353696 - DNA, 1305 bp, Pseudomonas aeruginosa
atgaacccgcgtctcgccgcctgccaggcgctggccgcggtgctcgccggacgcgcctcgctgtctggcgcgttgccgccgcaactggacaaggtcgccccgcgcgatcgcggcctgacccaggagctggccttcggcgcggcgcgctggcaaccgcgcctgcaggctctggccgcgcgcctgttgcagaagccgttcaaggccgccgacaccgatatccacgccctgctgctgatcggcctctaccagttgctctacacgcggattccgccgcacgccgcgatcggcgagaccgtcggctgcgccgacaagctgaagaagggctgggccaagggcgtgctcaacgccgtgctgcgccgcgcgcagcgcgaaggcgagacgctgctggccgaggtcgaccgcgatccctcagcgcgcctgggacatccgcgctggctgctgaaagcgctcaagcaggcctggccggagcagctcgacgcgctctgcgcagcgaacaacgcacacccgccgatgaccttgcgggtcaatcggcgccgcggcgagcgcgatgcctacctggccgaactcgccgaagccggaatcgaggcccgcgcctgcgactacagccgcgacggcatccagctcgccgcgccgcgcgacgtgcgcgaactaccgggcttcgcggagggccgcgtcagcgtccaggacgaagccgcgcaactggccgccgagctgctcgaaagcgcgcccggccagcgtgtcctcgacgcctgctgtgcgcctggcggcaagacctgccacctgctggaaacccagccggaactggccgaagtggtcgccgtcgacctcgaggagagccgcctggtaagggtccgggaaaacctccagcggctcggcctgcaagccagcctggtcgccgccgacgccagggccaccggggagtggtgggacggcaagccgttccagcgcatcctcctcgacgcgccgtgctcggccaccggggtgatccgccgccacccggacatcaagctggcgcgcaagccggaagacatcgccgccctggcgcacctgcagggtgaattgctcgacgcgctgtggcctaccctggaagtcggtggcgtactgctctacgccacctgttcggtgatgccggcggaaaacagcgacagcatcgccgccttcctcgcccgcacgcccggcgcccgcgaactggaccttcccggcccctggggcatgaaacagccccacggccgccagttgctgccgcaggtggagggccacgatggcttctactatgccaagctgatcaagatatccgcccgttga

SEQ ID NO: 353697 - DNA, 945 bp, Pseudomonas aeruginosa
atgagccaagcattgcgcatcgtcttcgccggaaccccggaattcgccgccgagcatctcaaggccctgctcgacaccccacatcggatcgtcgccgtctacacccagcctgaccggccggccggccgcgggcagaaactgatgcccagcgcggtgaagagcctggccctggagcatggcctgccggtcatgcagccgcagagcctgcgtaatgccgaggcccaggcggagctggcggccctgcgcgcggacctgatggtggtggtcgcctatggcctgatcctgccccaggcggtactcgatatcccgcgcctgggctgcatcaacagccacgcctcgctgctgccgcgctggcgcggcgccgcgccgatccagcgcgcggtggaagccggcgacgcggagagcggcgtcaccgtgatgcagatggaagcagggctcgacaccggcccgatgctgctcaaggtgagcacgccgatttccgccgcggacaccggcggcagcctgcacgaccggctcgccgcgctcggcccgaaagcggtggtcgaagccatcgccggcctggccgccggcaccctgcatggcgagatccaggacgacgccctggccacctacgcgcacaagctgaacaaggacgaggcacgcctcgactggagccgtccggccgtcgaactggagcgccaggtccgcgccttcaccccctggccggtctgccacaccagcctcgccgatgctccgctgaaagtcctcggcgccagcctggggcagggcagcggggcgcccggaaccatcctcgaggccagccgcgacggcctgctggtcgcctgcggcgaaggcgccctgcgcctgacccgcctgcaagtgccgggcggcaagccactggccttcgccgacctctacaacagccgccgcgagcaattcgccgccggccaggtgctcggccaatga

SEQ ID NO: 353698 - DNA, 507 bp, Pseudomonas aeruginosa; identical to SEQ ID NO: 319195

SEQ ID NO: 353699 - DNA, 1026 bp, Pseudomonas aeruginosa; identical to SEQ ID NO: 319194

SEQ ID NO: 353700 - DNA, 1089 bp, Pseudomonas aeruginosa
atgaagaaccattctccagccgaactggaagcacggctgcgcctgcatggcctgcccgaactgggacccatgcgcttcctgcgcttgatcgaggccttcggttcggcctcttccgcgcttgccgcgccagccggcgcctggcgcaccctgggagtgcctgccgaggccgccgccgcgcggcgcagcccggcggtgcgggaagcggcgggtgaagccctgcgctggctggaaggtccgcgcaggcacctgctgatgtgggacgacccgggatacccggcactgctcgccgaagtcgccgatgccccgccgctgctgtacgtcgaaggcgctccggagactctggaacggccgcaactggcgatggtcggcagccgccgcgccagccccgccgggctgggcaccgcccggagctttgcgcgcagcctggcgcagggcggcttcgccatcaccagcgggctggccctgggcatcgatggcgccgcccacgagggcgcgctggaggctggcggcgcgaccgtggcagtcctcggcaccggcctgcgcaggctctatccgcggcgccacgaagcgctggcgcggcgcatcgtcgagggtggcggcgcgctggtttcggagctgccgctggacagcccgccgctgccggcaaactttccccggcgcaaccgcatcatcagcggactctcgctgggtgtgctggtggtcgaggcaagtcccgccagcggctcgctgatcaccgcgcggctggcggcggaacaggggcgcgaggtgtacgccattccgggttccatccaccatcccggcgcacgtggctgccaccaactgattcgcgatggcgcgctgctggtggaaagcgtcgggcacgtgctcgaagcactgcgcggctgggcgcaggcggagccagcggaagcgccggcgcagcccctgccccaccctttgctggcgctgctgcgcgccgcgccctacaccagcgaaggcctggccgccgccagcggcatgacgctgcccgatgtgctggcgacgctcagcgaactggaactcgacggccgggtcgcctgcgaggccggcacctgggtgcatcgctccggctga

SEQ ID NO: 353701 - DNA, 558 bp, Pseudomonas aeruginosa; identical to SEQ ID NO: 319192

SEQ ID NO: 353702 - DNA, 978 bp, Pseudomonas aeruginosa
atggccaagcgcatccagttcgctgcctacggcggccccgaagtcctcgaataccgcgactaccaacccgccgagccgggcccccgggaagtccgcgtgcgcaatcgcgccattggcctgaacttcatcgacacctactaccgcagcggcctctatccggcccccggcttaccctcgggactgggtagcgaaggtgccggcgaggtcgaggcggtgggcagcgaagtgacccgtttcaaggtcggcgaccgcgtcgcctacgccaccggcccgctgggcgcctacagcgaactgcatgtgctggcggaggagaagctggtccacctgcccgacggcatcgacttcgaacaggccgccgcggtgatgctcaaggggctcaccacccaatacctgctgcgccagacctacgaactgcggggcggcgaaaccattctcttccatgccgccgcgggcggcgtgggcctgttcgcctgccaatgggccaaggcccttggagtgcagctgatcggcaccgtcagctcgccggaaaaggcgcgcctggccaggcagcacggtgcctgggagaccatcgactatagccatgagaacgtggcgcggcgggtgctcgaactgaccgacgggaagaagtgcccggtggtctacgactcggtgggcaaggatacctgggaaacctcgctggactgcgtggcgccgcgcggcttgctggtcagcttcggcaacgcctcggggccggtgaccggggtcaacctgggcatcctctcgcagaagggttcgctgtacgtgacccggccgaccctgggcagctacgccgataccccggaaaaactccaggcgatggccgacgagctgttcggcctgatcgagcgcggcgacatccgcatcgagatcaaccagcgcttcgccctggccgaagcagccagggcgcataccgaactggccgcacggcgaaccaccggctcgaccgtactgttgccctga

SEQ ID NO: 353703 - DNA, 918 bp, Pseudomonas aeruginosa
gtgaccgaccgtatcgccgctgtcaaaacctacctgctcgacctgcaagaccgcatctgcgccgccctcgaggcggaggacggcaaggcccgcttcgccgaggacgcctgggagcgtccggccggtggcggcggacggacgcgggtaatcggcgacggcgcattgatcgagaagggcggggtgaatttttcccacgtcttcggcgatagcctgccgccctcggccagcgcccatcggccggaactggccgggcgcggtttccaggcgctcggcgtgtcgctggtgatccatccggaaaacccccacgtgccgacgtcccatgccaacgtgcgtttcttctgcgccgagaaggaaggcgaggagccggtctggtggttcggcggcggcttcgatctgaccccctactacgcccacgaggaagactgcgtgcattggcaccgggtcgctcgcgacgcctgcgcgccgttcggcgcggacgtctacccgcgctacaaggaatggtgcgaccgctacttccacctcaagcaccgcaacgagccgcgcggcatcggcggcctgttcttcgacgacctcaaccagtgggacttcgacacctgcttcgccttcatccgcgccatcggcgatgcctatatcgacgcctacctgccgatcgtccagcgccgcaagcacacgccgttcgatgaacggcagcgagagttccaggcctatcgtcgcggtcgctatgtggagttcaacctggtcttcgatcgtggcaccctgttcggcctgcagtccggcggccgtaccgaatcgatcctgatgtcgttgccgccgcaggtgcgctggggctatgactggaaacccgagccgggcagcgaggaagcgcgcctgaccgagtatttcctcgccgaccgcgattggctcgccggccagccctga

SEQ ID NO: 353704 - DNA, 825 bp, Pseudomonas aeruginosa; identical to SEQ ID NO: 319189

SEQ ID NO: 353705 - DNA, 987 bp, Pseudomonas aeruginosa; identical to SEQ ID NO: 319188

SEQ ID NO: 353706 - DNA, 1287 bp, Pseudomonas aeruginosa
atgcaccgactgctctctgatcgcgcccggggctggcgtcgcgcactgtgcgggatcgtcctcgggctgctggcgtggagcgcccatggcgtccccgccaaggcgccgcaggatctgcggatcgacggcgaggtgctgccggggagaagcatcgacttgctcgagcaggccctgtcgcgggtcaagttcaacaccgacccgcagcagttgcgccgtggcctggtggaaaaccgcctgctggcgcgcgcggtggaagaccagctcaccgcgcagagccgcgccgatctcgacgccagcgtggagatcgaggccggcaacctgctcgaacaggtatacggcaggcgctaccgcgaggacctcgggccatacctgcgccagccccgggccctgagcgcggagcgtttgcgcgaggtgctggcgccgaggagccgcggcctggtggaaaacagcctgctgctggacgagacgcagcgccgcgaggcggccggggtcgagctgatcggctggcagtttcccggccagccggcacaggtcctcgacctgctatcgctgtacgaaggcgacaacgtccagggccaggtggaattgcaacagggcaacctcgcttacctggcgcgccaggtccagacccgcatccgccgcgactacctctggtaccgcctggcccgggacggcttcggcccggcagagcggcagggcgtgaggaccctggtgcgggacaagctggtgcgccatcgctatctgcaccagatcggcctctacagtgatttccaccatgagtccgatgcgctgcgggaactcgccggcaaggtcagcgacaaggacgccgaggcctactatcggcgcaacctggagcgttaccgcaacgtcgcgcaggtgcaggcggcgcatatccgcctggccgaccaggcgagcgcggacaaggtctacgccgagttgcgcggcggcctggccttcgacgaggcggtacgccgctattccctggccgacgacagggaccgcgacccgcccggcgacctaggcctgatacggccccaggacggccggctcgacctgctgcgcaagactgcgctgatccagaaggccgatacggtttcccagccgatgcgcatcgacggcgcgttcgagatcgtccgggtgcgtagccgcgaggatcgccagttgcccctcgacgaccgcagcgtgcgcttcgaggtgaaccaggcggtggcgcgcgagcaactggcagcgcagttcgagacgcgcctgcgcaacctgctggccggcgccagggtggaaggcctgtga

SEQ ID NO: 353707 - DNA, 384 bp, Pseudomonas aeruginosa
gtggcggaactggatcgcgagcaggcgatccagttcatgcagatgctgcgcgacgagggcgacccgcgcagcccgccgctcggcggcctgcaaccacgccagggcgcgacggcgcaggagctggccgatccgaagcagtaccaggccttcgaggaacgacagacccgcgaactggtacaggcctacaccagcggcgtacagcagataccggaaatccgcgcgcggatcgaggcggccgaacagggtggcgagcgcagcgccgaggaaatcgacgaggctcgcgccgcccttggacagttggagatgatgcgcgacaagctgcagcgggaatcgccgcaactgctgcccggcgacagcgcaccgacatcgccggcggcgccctga

SEQ ID NO: 353708 - DNA, 1554 bp, Pseudomonas aeruginosa
atgtggacgcgcctgctgccgttcctcgcctggctaccggggctgcaccggggcatgctcgggcgcgaggcctgggtcggcctgaatggcgcaatcctggcactgccgcaatcgatggcctatgcgctgatcgccggcctgccagcggagtacggcctgtacgcggcgatgctgccagtggcgatcgcctgcctgtggggctcgtcgcgctacctggtgagcggtcccaccgcggcgatctcggtgctgctgttcagttcggtggccccgctggcgccgctgggcagcccgcaatacgtccaggccgtgctgctgctgacctttctcgccggcgccttccagtggctgctcggcgtcctgcgcgtcgggtcgctggtcaatttcgtctcgcattcggtgatgctcggcttcacccttggcgcggcgctgctgatcgtcctcggccaactgccctatcttctcggcctggccgcgagcggggagggcgcagcgccgggaaacggctggcggctgctggcgcggttcgccgagttcgatggcccatcgctgctggtgggcggcttcagcttcgcgctcagcctgctggtcaggcgcctgcgaccgcgctggccggccctgctgcttggcttgctgggcggtgccacgctggtctgggcgctacccgggaccttcgcctcggtagcccatgtgcaggccttatcgagcgcactgccgggctggagtccgctggtcttcgattcccgatcgatcctcgacctgctacctgcggcggtggcctgcggcatgctcgggctggtcaccagcctatcgatcgcccgcgccctggccgcgcgccagggagacgcgttcgatgccaaccaggaggtccgcgcccagggcctgtcgaacctgctcgggccttggctgtcggcgagcctgtcggcgggctccttcacccgctccgggctgaatctggaagccggtgcgcgctccccgctggcgggtgcgttttcggcgctctgggtggcactgctggccgtgctcggtgcgcgcctgatcgagcatgtgccgttgccggcgatggccgcaggcatcctgctgatcgcctggggcctgatcgaccgcccagcgctccgcgcgctctaccgcagcggccgcgccgaatgcctggtggccggcctaaccgccctggccacgctgctgttgccgctgcagaacgccatctacgcgggagtgctggcgtcgctggtcttctacctgcggcgcacctcgacaccacgcgtactgcgccagcgcaacgacgaggaagaagtgctgcgcatcgaaggctcgatcttcttcggcgcctgcgactacctgcaacgcctcatgcgccaatgcgacaggccacggctggtgctggacgcccgccaggtgaacttcatcgacttcgccggcgcagtgctgttgcagcaggaagcccgccgcctgcacgccgagggccgccgcctggtattgcgccacgcccgcccgcaggtccgcgaagcgctgggccggcaggccgacgaaggctgccgcctgcactacgaaggctga

SEQ ID NO: 353709 - DNA, 924 bp, Pseudomonas aeruginosa
atgaaccggcttcccacctgcctgctggccgcaaccctgttcctgggcagcgcctcgctatacgccgaagaccccgcctgtgcccgcgtcaggctggccgatccaggctggagcgatatcgcggtgaccaacgccaccgccgcgtttctcctggaaagcctcggctaccaggtgaagatcgataccctgtcggtgccgatcatctatggcggcctgcgcgacggccaggtggacgccttcctcggcggctggatgcccgcgcaccaggactatcacgacaagttcgtcgccagcggccaggtcgaacgcctcggtcgcaacctcgacggcacccgcttcaccctggcggtgccgcgctacgtctgggacgccggcgtacaccgcttcgaggacctcgccgcgcaagggcaacgcttcaaccgcaagctgtacgggatcggctccggcgcgccggccaatcagtcgatccagaagatgatcgacgccaaccagttcggcctcggcgactggaagctggtggagtccagcgagcaggcgatgctcgccgaactcggccgggccgagaagcgccagcgctggctggtgttcctcggctggacgccgcacccgatgaacatccgccatgacctgcgctacctggaaggcggcgagcagtacttcggcgaccgcggccaggtctacaccctggcacgcaagggctacgccgcgcagtgcccgaacccggcgcggctgctggccaacctgcgcttcgacctggacatggagaaccgcctgatgagcgacgcgctggaaggcacggcgactccggcctcggcgacccgcgcctggctcaaggccaacccgcgggtgctcgaggcctggctgcaaggggtgaccagccgcgacggcggcgacgccctggccgcggttcgcggccagccatag

SEQ ID NO: 353710 - DNA, 1512 bp, Pseudomonas aeruginosa
atgaagacctcgccgaacatcctgttcatcatggccgaccagatggccgcgccgctgctgccgcttcacgatccgcgctcggtgctgcgcatgcctcacctctcgcgcctcgccgaacgggccgtggtgttcgactcggcatactgcaacagcccgctctgcgcgccgtcgcgcttcaccctggtcagcggtcgcttacctacccgcatcggcgcctgggacaacgctgccgacttcgccgccgatacccccacctacgcccactacctgcgcaacctcggctatcgcacggcgctgtcgggcaagatgcacttctgcggtcccgaccagttgcacggctacgaggaacgcctgaccagcgacatctatccggcggactatggctgggcggtgaactgggacgagccggaggtgcgcccgagctggtaccacaacatgtcctcggttttgcaggccggtccctgcgtgcgcaccaaccagctggacttcgacgaggaggtggtgttcaaggcccgccagtacctctacgaccatgttcgccagcacgccggccagccattctgcctgaccgtgtcgatgacccatccgcacgacccctacagcatcccggcgagctactggaatctctaccgcgacgaggacatcccgctgccgcgccagcgcttcgcccaggaggagcaggaccctcattcgcaacgcctgctgaaggtcatcgacctgtgggacaagccgttgcccgaggagcgcatccgcgccgcccggcgtgcctacttcggcgcctgcagctacgtcgacgcgcagatcggtgcgctgctggcgaccctggagaaatgcgggctggccgacgacaccatcgtggtgttctccggcgaccatggcgacatgctcggcgagcgcggcctctggtacaagatgcactggttcgagatggccgcgcgcgtgccgctgctggtccatgcgccggcgcgcttcgcgccgcgccgcatcggcgcttcggtatccaccgtggacctgctgccgaccctggtggagctggccggcggccaggtcgatccacgcctgccgctggaaggccgctcgctgctgccgcacctgcgcgacggcagcgggcatgacgaggtgatcggcgaatacaccgccgagggcaccctcagcccgctgatgatgatccgccgcggcgactacaagttcatctactccgagcaggacccctgcctgctctacgacctgcgcaacgatccgcaggaacgcgagaacctcgccgccagtccggcccaccgcggaacgttcgaggcgttcctcgacgaggcccggcgacgctgggacatccccgcgatcacccgcgccgtactcgacagccagcgccgccgacgcctggtggccgccgcgctggcgcgaggacggctggccagctgggaccaccagccgtgggtcgatgccagccagcagtacatgcgcaaccatatcgacctggacgatctcgagcgccgcgcgcgcttcccgcaaccctga

SEQ ID NO: 353711 - DNA, 900 bp, Pseudomonas aeruginosa
atgccgctgtccctcgacctgctccgggtattcgagtccgccgcccgccaactcagcttcaccgctgccgccgaggaactggggaccacccagcctgcggtcagccagcagatcaaacgcctggagaaagagctggcgacccctctgttccagcgcgttcatcgaggcatcgtgctcaccgacgccggccagcttctgctccgccacgtggccgccggcctcgagacgatcgatgccggcatcgccgcgctgggcgcgcgccagcgccacgaggtgctccaggtggccaccgactacgccttcgctgcctactggctgatgccgcgccttccgcgcttccatcaggcccatccgcacctggacgtgagcctggtgaccagcgagcgcggcctggccggccagcgcggcgatatcgacgtggcgatcctgttcggcgacggtcgttccaagcacggcgaagcgcaccggctgtttcgcgaggaggtgttcccggtctgtagcccgcggctggtcgagggattgcagttgccgctggccaaggcgcacctggcgcgcctgccgatgctgcatctgaagccggcgcagcacgcccgctggttcgactggccggcgttgttcgaagcgttggccatcgatcggcagccgattccggcggtgctcagcttcgacaactacaccttgctgatccaggcggccatcgccggccagggcgtggccatcggctggcgccacctggtcgacggcctgctcgaacaggggctgctttgccggcccattggcgagagctgcctgtcgcgatacgggtactatgcggtattgccggagcgcaagcggcgccagcggctggtcgacggtttcgtcgactggctacaggccgagttgcaggccggcggcgcttga

SEQ ID NO: 353712 - DNA, 378 bp, Pseudomonas aeruginosa
atgaacgagtattccaccccccgcatccagggcttccatgctcacgtctatttcgatgcgcagagcatcgagcgagcccgcgccctttgcgaagaggcggcgcggcgctttccgctgaagatggggcgggtccatgagcggccggtagggccgcatccggactggagctgccagctggcgttcgctcccgaggtgttcggcgagctggtgccctggctggccatccatcggcaggacctggtggtgttcatccacccggtcaccggcaacgatctgctcgaccatcgcgaccgagccatctggatgggagccattcgcccgctggacctgtcgatcctggacgaaggcccgcaacgctatgacttcgccgtgccttga

SEQ ID NO: 353713 - DNA, 366 bp, Pseudomonas aeruginosa; identical to SEQ ID NO: 319180

SEQ ID NO: 353714 - DNA, 624 bp, Pseudomonas aeruginosa
atgagtaaggtgctgatcgtcgatgatcatcccgctatccgcctggccgtgcgcttgctgttcgagcgcgacggtttcaccatcgtcggcgaggccgacaacggtgccgaagccctgcaggtagcccgcaagaagtctcccgacctggccatcctggacatcggcatccccaagatcgacggtctcgaagtgatagcccgcctgaagtccctgaagctggacaccaaggtcctggtcctgacccggcagaatccggcgcagttcgccccgcgatgcctgcaggccggcgccatgggcttcgtcagcaaaagggaaaacctctccgagctgctgctcgccgccaaggccgtgctggccggctacatccacttccccaccggggcgttgcgcagcatcaaccagcagagccgcgacaacgaggcccgcatgctggaaagcctttccgaccgcgagatgaccgtgctgcagtacctggccaacggcaataccaacaaggccatcgcccagcagctgttcctcagcgagaaaaccgtgagcacctacaagtcacgcatcatgctgaaactcaacgcccattccctggccggcctgatcgatttcgcccgccgccacgagctgatctga

SEQ ID NO: 353715 - DNA, 807 bp, Pseudomonas aeruginosa
atgagccgcctgcagacccgcttcgcccagctcaagcaggaaaaccgcgccgccctggtgaccttcgtcaccgccggcgacccggactacgcgtcttccctggaaatcctcaaaggcctgccggcggccggagccgacgtgatcgaactgggcatgccgttcaccgatccgatggcggacggcccggccatccagttggccaacatccgcgccctggacggcggccagaccctggccaggacgttgcagatggtccgcgaattccgcagcggcgacagcgagacgcccctggtgctgatgggctacttcaacccgatccaccactacggcgtcgaacgcttcatcgccgaggcgaaggaggtgggagtggacggcctgatcgtggtcgacctgccgccggagcacaacgaagacctctgccacccggcccaggccgccggcatcgacttcatccgcctgaccaccccgaccaccggcgaccagcgcctgccgacggtgctagaaggcagttccgggttcgtctactacgtgtcggtggccggcgtcaccggcgccaacgcggcgaccctggaacacgtcgaggaagcggtggcgcgcctgcgccggcataccgacctgccgatcggtatcggcttcggcatccgcagcgccgaacacgccgccgcggtcgcgcggttggccgacggcgtggtggtcggctcggcgctgatcgaccggatcgccaaggcccgcgacaatgcccaggcggtcaaggatgtcctcgccctgtgcggcgagctggccgaaggcgtgcgcaacgcacgctga

SEQ ID NO: 353716 - DNA, 1209 bp, Pseudomonas aeruginosa
atgacttcctatcgcaacggccccgacgccaagggcctgttcggccgcttcggcggccagtacgtcgccgagaccctgatgccgctgatcctcgacctcgcccgcgagtacgagaaggccaaggacgacccggcgttccaggaggaactggcctacttccagcgcgactacgtcggtcgaccgagcccgctgtacttcgccgagcgcctgaccgagcactgcggcggggcgaagatctacctcaagcgcgaggagctgaaccataccggcgcgcacaagatcaacaactgcatcggccagatcctcctggcccggcgcatgggcaagaaacgcatcatcgccgagaccggcgccggcatgcacggcgtggccactgccaccgtcgccgcgcgcttcggcctgcagtgcgtgatctacatgggcaccaccgacatcgaccggcagcaggccaacgtcttccgcatgaagctgctgggcgccgaggtgatcccggtgaccgccggcaccggtaccctgaaggacgccatgaacgaggcgctgcgcgactgggtgaccaacgtcgacagcaccttctacctgatcggcacggtcgccggcccgcatccgtacccggcgatggtccgcgacttccaggcggtgatcggcaaggaaacccgcgagcaactggccgagaaggaagggcgcctgcccgattcgctggtcgcctgcatcggcggcggctccaacgccatgggcctgttccacccgttcctcgacgacgccggggtgcagatcgtcggcgtggaagccgccggccacggcatcgacaccggcaagcacgcggccagcctgaacggcggggttcccggcgtgctgcacggcaaccgcaccttcctgctgcaggacgcggatggccagatcatcgacgcacactccatctccgccggcctcgactatcccggcatcggcccggaacacgcctggctgcacgacaccggccgcgtcgagtacacctcgatcaccgacgacgaagccctggaggccttccacacctgctgccgcctcgaaggcatcatcccggcactggaaagctcccatgccctggccgaggtcttcaagcgtgcgcccagcctgcccaaggagcacatcatggtggtgaacctgtccggtcgcggcgacaaggacatgcagaccgtcatgcaccacatgcaacaggagtcgaaagcatga

SEQ ID NO: 353717 - DNA, 888 bp, Pseudomonas aeruginosa
atgagccgcgacctgccctccctgaatgccctgcgcgctttcgaagccgctgcccggttgcacagcatcagcctggcggccgaggaactgcacgttacccatggcgccgtgagccggcaggtgcggttgctcgaggacgatctcggggtggccctgttcggcaaggatgggcgcggcgtaaaactcaccgattccggcgttcgcctgcgtgacgcctgcggcgatgcgttcgagcgactgcgtggcgtctgtgccgagctgcgccggcagaccgccgaggccccgttcgtcctcggcgtacccggcagcctgctggcgcgctggttcatcccgcggctggaccagctcaaccgtgccctccccgacctgcgcctgcaactgtccaccagcgagggcgagttcgatccgcgtcgtcccggcctggacgccatgctctggttcgccgagccgccctggccggcggacatgcaggtcttcgaactggcgcccgagcgcatgggcccggtggtcagcccgcgcctggcgcaggaaaccggcctggcccaggcgcccgccgcgcggctgttgcaggagccgctgctgcataccgcctcgcgaccccaggcctggccggcctgggccgcgagccaggggctggcggcggaggcgctgcgctatggccaggggttcgagcatctctactacctgctggaagcggcggtggcgggcctcggcgtggccatcgccccggagccgctggtccgcgacgatctcgccgcgggccgcctggcggcgccctggggcttcatcgagaccgatgcgcgcctggccctgtgggtaccggcacgcctccacgatccgcgtgccgggcgcctggcgcaatggttgcgggagcagttggcaggctga

SEQ ID NO: 353718 - DNA, 612 bp, Pseudomonas aeruginosa
atgccccacgccttgccgcccttgccttacgcctacgatgccctggaaccgcacatcgatgcgctgaccatggagatccaccacagcaagcaccaccagacctatgtgaacaacctgaacgccgcgctggaaggcacgccctatgccgagcagccggtggaaagtctgctgcggcaactggctggtctgccggagaagctgcgcaccccggttgtcaacaatggcggtgggcatgccaaccactcgctgttctggaccgtgatgtcgccccagggcggtggccgtcccgatggcgacctggggcgggccatcgatgagcagctcgggggcttcgaggcgttcaaggatgcgttcaccaaggctgcgctgacccgcttcggcagcggctgggcctggctcagcgtgactccccagggcagcttgctggtggagagcagcggcaaccaggacagcccgctgatgaacggcaatacgccgatcctcggcctggacgtatgggagcacgcctattacctgaagtaccagaaccgccgcccggaatacatcggcgctttctacaacgtgatcgactggcgggaggtcgcgcgtcgctatgcgcaagccctggcctag

SEQ ID NO: 353719 - DNA, 759 bp, Pseudomonas aeruginosa
atgtgtataagagacagaaagcgcatcgccgccatcctcgacaaggccgacgccatccgccgcaaacgccagcaagccatccagctcgccgacgatttcctccgcgccgtgtttctggacatgttcggtgatccggtgaccaatccgaaggggtgggaggttaaatcagtcgctgacttaattcgagcgggtgtaatacttcaggttcaggatggaaaccatggtaatgaccatccaaaagtaagtgatttcacagaaagtggtattccgttcgtaaccgcaaatgttgtgcgtagagggaaaattctctttgatcagtgctattaccttgatcattcttggctggataagcttcgtatcggctttgctaagcccagagacgtacttatttcacacaaagggtcgttggggtttactgcagtcctagatgacacatacgaagattacatttttagcccccaaactacgtattaccgggtcaacgaagaaaggctgttgcccgaatatcttaaagggtattttgattcaggcttctttcagagcttatttgcgaaggagggcattcagtcgacgcgtgcttacctgggtattacaaggcagaaagatctcccagtaatgatcccggagatatctgctcaaatgaaatttctggatgttttttcaaagtacaaaaatttatctgaaaaactatttgagcctacagctagcgctgaatttttttcatccctaagccaaaaagccttctggggcgaactgtga

SEQ ID NO: 353720 - DNA, 126 bp, Pseudomonas aeruginosa
atgtgggtagtcgacaccgagcaaggcgttctacccatcatcaatgagcaggcgctctcgcagctgaaaacgaagactcgtgcagatggcgaagaggatgacgagcacaccggtggaaaacactga

SEQ ID NO: 353721 - DNA, 381 bp, Pseudomonas aeruginosa
atgatcctgcgcctgcacgaggtcgcccgcagccacggcgccggtcgccagcgctaccgcctgcgggtgccggcgctggaattgcgcgcgggtcgccaactggccatcgtcggccccagcggctgcggcaagagcaccctgctcgacctgctggcgctggccctggcgccggacccgggcgggcgcttcgaattcctcgccggagaacgcccgcaggacatcgccgcgctctggcgcgacggccgccaggaccgcttggcggcgctgcgccggcagcactgcggctacgtgctgcaaagcggcgggttgctcgagttcctcgatgtgcggcgcaacatcggactgccctgcgcgttgctcggcgcccctgtggggaggtga

SEQ ID NO: 353722 - DNA, 924 bp, Pseudomonas aeruginosa
atggcttacttcacaggaacagcgaacaacccggccgacttgctcgccaagctgcgcgtccacgccgagtcgctcggctgggtcaccgaccgcgcctcggcatcggaatggctttgtcacaacgccgacggctactggtcgttcaacgccggttccgatcaatggcagctcgcgggcaatacggggttcgacgacgggcttgcgtggaatgcgcagcccggcaactcggtgcagaacaacccgtattcgtcgaaagaagcaaccatagcgcagctcagcgccgggccattcacgcgctatcacctgttcgccaccgctgcctatctgcacctgcacgtcgaaatcgctgccggtcagtttcgtccagtgatgatcggctccctcaacaagcgtggcgtcggctatacgggcggccagtatgtttgcggctcgttcctctacagctctggccaggcgctcacaaacaactggtcatcgcatccattcgatggttaccacattcgatacagcggcggcggcagcatgctgcggctagacagcctcgacggtagcccatcgccggactggttgccgttcgactacacaacgaacgtctcccggcgcgtcgtcggccccggtcgcggaaactacagcagtcagtaccatcccgatgtggggctgatcgacgccagcgcaaacgagctgaacagctcgaccacccctgtgccctgcgccatctatgcgttcggcgctcagcagcgctcgcggtacgtgggcgaggtgccggactttggcatatgcaacatggcgttcctcgcgcccggcgatccgctggtgatcggcagcgacacttggcgcgtctatccgttgctccaacgcggaagcgctaccgatttcggcaacaccagcgcctgggtcggctactgctttcgggtgcttgagtaa

SEQ ID NO: 353723 - DNA, 585 bp, Pseudomonas aeruginosa
atggccttggttgacggttttcttgagctggaacgctcaagtggaaaattggagtggagcgccatcctgcagaagatggcgagcgaccttggattctcgaagatcctgttcggcctgttgcctaaggacagccaggactacgagaacgccttcatcgtcggcaactacccggccgcctggcgcgagcattacgaccgggctggctacgcgcgggtcgacccgacggtcagtcactgtacccagagcgtactgccgattttctgggaaccgtccatctaccagacgcgaaagcagcacgagttcttcgaggaagcctcggccgccggcctggtgtatgggctgaccatgccgctgcatggtgctcgcggcgaactcggcgcgctgagcctcagcgtggaagcggaaaaccgggccgaggccaaccgtttcatggagtcggtcctgccgaccttgtggatgctcaaggactacgcactgcagagcggtgccggactggccttcgaacatccggtcagcaaaccggtggttctgaccagccgggagaaggaagtgttgcagtggtgcgccatcggcaagaccagttag

SEQ ID NO: 353724 - DNA, 1581 bp, Pseudomonas aeruginosa
atgacgaaccttcaaattgccgcgcttgtacagccctccatggtgacccaactgctcaccgccgacggtggcgagtgggaggtctcgaagcacctgcaagagatcatggccctggccgccgacggcacgctctatctatcggagagccaccagaacgacattcacgttctgtcgttcatcgaccgtctcgatcgccgtggcttccgataccagctcaacctcaccgacctgcagaccattcaccagctctaccgcgccgtcgccatggacggcctggtcgatagcgatggccagcgcgccacccagatgcaggagcgcgtggtcaagatcattcgtaaggccacagagctgcgcgccagtgacgtgcatttcgtcgtgagtcccgccggcaccggcagcaagatccgtttccgcgtcgacggcctgctgaagaccgtcgagcagtaccgcagccaggaactgcacgaactttgcgcaaccatctaccagtccatgtgcgacgtggccgagccgcttttcaagccacaacttgaccaggacgcgcggatgagccaggccttcgtcgagaagctgaacctgttcggcgcccggatcgcgacccgcccgcgcgccggtgggttcctgatgatcctgcggctgctctacgacgataccggcctcgacagcctggagcagctcggctacctgcccgagcagaacgcgctgttcgatcgcatgatgcgcatgccttacggcatcaacatcctgtccggccccaccgggtcagggaagtcgatgaccttgaaggtcaccatggaaggactcgataagctgcatggcggatccaagcatatcctgaccatcgaggatccaccggaataccgcattcgcggcgaaggcatcaaccagaccccactggtctatgacgccactgacccagacgcagaacgccaggcctgggccgcaggcatcgccaacggcatgcgcctggatccggactacatgatgatcggcgaagtgcgcgacctcttcgccgctgtcgccgccttccgtggcgcgatgaccgggcacggcctgtggtcgaccctgcacaccaatagcgcgatcggcattgtccagcgcctcaaggacctgggtgtcgaccccggcttgctgttcgatccggccctgctgaccggcctgatcaaccagagcctgctgcctaagctctgcccccactgcaaagtgcgcttccaagaccaccaagaccagctcgcgctcgacctggtcgaacgggtccagcgcttgaccgatgtttcccaggtgtacgtcaaggggcctggctgccaggcctgccgtggctccggggtcaacggccgctcgatcgtcgccgaggtggtgctgcccaccctggccttcatgcgtgtgttcgccaaaggcggcccagccgaggcacgcaactactgggtcaagaccatgcagggcatcaccaagcacgcccacgccatccgccgcatcaacgagggcatgttcgacccgcagatagtcgaggatttcattgggccactcgacttcgatgagcatctgctcgacgacagcttctactcgcaggaggcgtgctga

SEQ ID NO: 353725 - DNA, 534 bp, Pseudomonas aeruginosa
atgcgaactgagccgatcggcatggccgtggccgtgctcttcctcctcgcgtccggccaggcctgcgccggcaccgttggcgaactggcggagatccaggcccaggccatcctcaccgaggccaaggtgcgtctggccacggcgcagcggcaactggagggcaaaggcgaaaccggccagatcgtcagcgcccaggggcagacgttcgccatgccggtgccggcggcgccgccgacgatcacgcagccggttccgccggtggtgcggaccatctacggcgccggcggcaagatgactgccacattcttgttcccgggcgggtacgagattgacgccgccagcggcgcggagctgccgggcaactaccgcgtcgagtcgatttccctggaccaggtcgtactcaccgacaaggacggcaaccgcgtgcccgtgggcttctccagcgttgccccgacccaagccgcctcctcggcccaaggcgcctccgttccgccggcgctgcccggggcggtaccgcagccgttcatccagtag

SEQ ID NO: 353726 - DNA, 1326 bp, Pseudomonas aeruginosa
atggagaagcctgacctcggcagccgtggaccagacgtctcgatcctgagctaccacggcaacaagttcgtcagcggcctgttctggcggccgctatccagccagcggcagtacatgaaggaagcgcgcaagctgggcaaggaagagcatctggacatcgttgccatccgccattcgccgacagtgatccaggccggcttcgtttcgaagtcgcaaggcgcagtcaagggcatgtactccctggcctcggcgctttcaggccagttcgaaggcgacttcctggcctgctggaaggtcgacgaggaccgctacgcactggtcgccacgctcgatggcgcgatcgtccccggccaggacctggtcaccaccttcgacgaagccagggaccggatcaggaagctctctacgcgcggcgtgcttcgaaacgcacaggtcttcgttcccgaaggattcgaattccccgtcaaggacttcgacatcgaggaactgctcgcgccgaagcgcctgcggcgcgactaccgcctccggcaactcaccttcggcttgtccgccagagagtggacggcagtggccctgctcggttgcttggtaggcgggtcgctaaccgcctactacctatggaatgcccaccagcaagagctcgccagacaagccgcgctcctcgaggagcagaggcgcctcgccgagctggccgagaagaacgcccaggccaagcagccgctggacctggcttcattgcagaagccttggacgctcatgcctgacctcgaggacatgctacgcgcctgtagcaaggcaacgggggtactgtcgctgtcgatccagggctggctcttcgaatccagcaagtgcgacggcagggtcctggtcgccacctaccaccgtaccggcaacagcacggcagccgacctgacagcggccagccagcacctgttcgccgaccgccccgccttcgttatcgacaacggcaacaccgcggccctgaaggtcgacctgaaagtcgccatcggtagcgatgagccgctgcagccagccgacgacgcgctgcaggcgctcaccagccatctgtaccgtcagggtgtcgagcccaagctgtcgatcagccaggagacaactccgccccttcctggcgcggaagcggcgacggagcagcaagtggtgttgccctcctggaagaaattcaccttcagcgcccagaccaggctcccggcagacctgaccttccaggggctgcccgccgccggggtccgcatcaccaacctcgaaaccacgctcaaggacagccagttggactggactgtcacaggagaaatctatgcgaactga

SEQ ID NO: 353727 - DNA, 300 bp, Pseudomonas aeruginosa; identical to SEQ ID NO: 324438

SEQ ID NO: 353728 - DNA, 291 bp, Pseudomonas aeruginosa
atgaccgagcaaatttatgattatgaccccgcgcaagcgctggatagcccggaggccatggctctgttcatcgcagacgctttggatactggagacaccgcctatatcgctaaggctatgggagtcgtggcccgcgccaaggggatgacggagttggccaaggaaacgggtttggccagggagcagctttacaaatcgtttagtgagcgcgggaaccctacattgaaaaccatgctggcagtaatgcgagctctgggagttgatctgaccgcccgcccgcatgctcagtga

SEQ ID NO: 353729 - DNA, 243 bp, Pseudomonas aeruginosa; identical to SEQ ID NO: 340927

SEQ ID NO: 353730 - DNA, 243 bp, Pseudomonas aeruginosa; identical to SEQ ID NO: 340928

SEQ ID NO: 353731 - DNA, 489 bp, Pseudomonas aeruginosa
  misc_feature (123)..(123): n is a, c, g, or t
atgaacggtcagcggtacagggaaacacccctcgacatcgagcgtctgcggcgcctgaatcgcgccacggtggagcgctacatggcaatgaagggggccgaacggttacagcggcacagcctnttcgtcgaggacggctgcgccttcaactggaccacggaaagcggcgaacccctggttttccggggccatgagagcctcaggcggctcgccgagtggctcgagcgctgcttccccgactgggagtggcacaacgtgcggatcttcgagaccgaggatccgaaccacttctgggtcgagtgcgacgggcgcggcaaggcgctggtcccggggtatccgcagggctattgcgagaaccactacatccattccttcgaactcgagaacggccggataaaacgtaatcgcgagttcatgaacccgatacagaaactgcgtgcattgggaatagccgttccgcaaataaaacgtgacggtattcccacttga

SEQ ID NO: 353732 - DNA, 1005 bp, Pseudomonas aeruginosa
atgaataattcgaatcttgctgctgcgcgtaatttgatacaagttgttaccggggaatggaagtcccgttgcgtctacgtcgctacgcgcctcgggctggccgatctgatcgagagcgggatcgacagcgacgagacgctggccgccgcggtcggttccgatgccgagcgcatccatcgactgatgcgcctgctggtggccttcgagatcttccagggcgatacccgcgacggctacgccaatacccccaccagccacctgctgagggatgtcgagggctccttccgcgacatggtgctgttctacggcgaggagttccacgccgcctggacgcccgcctgcgaggcgctgctcagcggtaccccaggcttcgagctggcgttcggcgaagacttctacagctacctgaagcgctgcccggatgccggccggcgcttcctgctggcgatgaaggcgagcaacctggccttccacgagatccccaggctcctggatttccgtgggcgtagcttcgtcgacgtcggtggcggttccggcgaattgaccaaggccatcctgcaggccgagcccagcgcccggggcgtgatgctcgaccgcgagggttccctcggcgtggcccgcgacaacctctccagcctgttggcaggggagcgcgtcagcctggtgggcggcgacatgctgcaagaggtgccgtccaacggcgatatctacctgctgtcgcggatcatcggcgatctggacgaagccgccagcctgcggttgctcggcaattgccgcgaggcgatggccggcgacggccgggtggtggtgatcgagcggaccatctcggccagcgagccgtcgccgatgtcggtgctctgggacgtgcacctgctcatggcctgcgctggccgccaccgcaccaccgaggaggtggtcgacctgctcgggcgcggcggcttcgcggtggagcggatcgtcgacctgccgatggaaacccgcatgatcgtcgctgccagggcctga

SEQ ID NO: 353733 - DNA, 1464 bp, Pseudomonas aeruginosa
atgaagcgctcctacccgaacctttcgcgcctggcgctggccctggcggtcggcaccggcctggccgcctgcagcgtcggccccgactaccagcgtccgcagtcgccgccgccacgcgtcgccagcgagcacctcggcgagttctccggcgagcggcgggaagcgccctggtggagtttcttcgacgatccgcaactggtgcgcctggtcgaccaggcgctggcgcgcaaccacgacatccgcgaggcccgcgccaacctgcgcagcgcccgcgcgctgttcgacgaccgctggctcgaccagttgccgcaggtcaccagccaggccggctacagccgcagcatcgaacaacagctggactacgacggcgagccgcgccggcgcctggcggagagctaccgcgccggcttcgacgcgcagtgggaaatcgacctgttcggccgcctcggccgactttccgacgccgccctggcccgcgccgaagcggccgacgccgacctccggctggtacgcctgagcatcgccgccgacaccgcccgcgcctacttcgagatccagggctaccagcgccggctggacgtggcgcgcgcccaggtgcgcagttggcgcgacaccctggagctgacccgcagcagcctgcaactgggcagcggcctgccggaggacgtggagaacgcccaggccaacctgctgcgcagcgaagcggcgattccgccactgacgaccgcgctggagagcgcccgctatcgcctcgacgtgctgcgcggcgaggcgccgggcagcggcgcgccgatcctcgacggcggcgccgccgcgccattggcgaagaacctgccgctgggcgacgtcgaccgcctgatcctccagcgccccgacgtagtcagcgccgagcggcaactggcagcgagcaccgaagacgtcggcgcggccaccgccgaactctatccgcgcctcgacctgggcggcttcatcggtttcttcgccctgcgcagcggcgacctcggcagcgcctcgcgcgccttcgaactggcgcccagcgtcagttggccggcgttccgcctgggcaacgtgcgggcccgcctgcgcgccgtcgaggcgcagtccgacgccgcgctggcgcgctaccagcgctccctgctgcgggcccaggaggacgtcggcaacgcgctcaaccaactggccgaacaccagcgtcggctggtcgccctgttccagtccgcgacccatggcgcgaacgccctggagatcgccaacgaacgctaccgcgccggcgccggcagctacctggcggtgctggagaaccagcgcgcgctgtaccagatccgcgaggaactggcgcaggcggagaccgcctcgttcgtcaacgtcatcgccctctacaaggcgctcggctggggcagcggcgacctggcgccgggcgccggccaactggccgccggcgaaaccgccggggccaaccgttga

SEQ ID NO: 353734 - DNA, 3090 bp, Pseudomonas aeruginosa
atgacctttaccgacctgttcgtccgccggccggtgctggcgctggtggtcagcacgctgatcctgctgctcggcctgttctccctgggcaagctgccgatccgccagtacccgctgctggaaagctcgaccatcaccgtcaccaccgagtaccccggcgcctccgccgatctcatgcaaggcttcgtcacccagccgatcgcccaggcggtgtcgtcggtggagggcatcgactacctttcctcgacctcggtgcaggggcgtagcgtggtgaccatccgcatgctgctcaaccgcgattcgacccaggcgatgaccgagaccatggccaaggtcaactcggtgcgctacaagctgcccgagcgtgcctacgactcggtgatcgaacgctcttccggcgagaccaccgcggtagcctacgtcggcttttccagcaagaccctgccgatcccggcgttgaccgactacctgtcgcgggtggtcgagccgatgttctcttccatcgacggcgtggccaaggtccagacctttggcggccagcgcctggccatgcgcctctggctcgacgccgaccgcctcgccgggcgcggcctgaccgcctccgacgtggccgaggcgatccgccgcaacaactaccaggcggcgccggggatggtgaaggggcagtacgtgctgtccaacgtgcgggtcaacaccgacctgaccaacgtcgacgacttccgcgagatggtcatccgcaacgatggcaacggcctggtgcgcctgcgcgacgtcggtaccgtcgaactgggcgccgcggccaccgagaccagcgcactgatggacggcgatccggcggtgcacctggggttgttcccgacgcccaccggcaacccgctggtgatcgtcgacggcatccgcaagctgctgccggagatccagaagaccctgccgccggatgtccgcgtcgacctcgcctacgagacttcgcgcttcatccaggcctccatcgacgaggtggtgcggaccctggtggaagcgctgctgatcgtggtgctggtgatctacctctgcctcggctcgctgcgcagcgtgctgatcccggtggcgaccattcccctgtcgatgctcggcgccgccgcgctgatgctggccttcggcttcagcgtcaacctgctgaccctgctggcgatggtgctggccatcgggctggtggtggacgacgccatcgtggtggtggagaacgtccaccgccacatcgaggaaggcaagtcgccggtggcggcggcgctgatcggcgcccgcgaagtggccggcccggtgatcgccatgaccatcaccctggccgccgtgtacacccccatcggcctgatgggcggcctcaccggcgcgctgttccgcgagttcgccctgaccctggcgggcgcggtgatcgtgtccggggtggtggcgctgaccctgtcgccggtgatgagttcgctgctgctccaggcgcaccagaacgaggggcgcatgggccgcgccgccgagtggttcttcggcggcctgacgcggcgctacgggcaggtcctggagttctccctgggccaccgctggctgaccggcggcctggcattgctggtgtgcatcagcctgccgctgctgtattcgatgcccaagcgcgaactggcgccgaccgaggaccaggccgcggtgctcaccgcgatcaaggcgccgcagcacgccaacctcgactatgtcgaactgttcgcgcgcaagctcgaccaggtctacaccagcatcccggaaaccgtgagcacctggatcatcaacggcaccgacggaccggcggcgagcttcggcgggatcaacctggcggcctgggaaaaacgcgagcgcgacgcctcggcgatccagtccgagctgcaaggcaaggtcggcgatgtcgagggcagcagcatcttcgccttccagttggccgccctgcccggctccaccggcggcctgccggtgcagatggtgctgcgcagcccgcaggactatccagtgctctaccggaccatggaagagatcaagcagaaggcccgacagagcgggctgttcgtggtggtcgacagcgacctcgactacaacaacccggtggtccaggtccgcatcgaccgcgccaaggccaacagcctgggcatccgcatgcaggacatcggcgagtcgctggcggtgctggtgggcgagaactacgtcaaccgcttcggcatggagggccgctcctacgacgtgatcccacagagcctgcgcgaccagcgtttcactccgcaagcgctggcacgacagttcgtgcgcacccaggacggcaacctggtgccgctgtcgacggtggtccgggtggagcttcaggtcgaaccgaacaagctgatccagttcgaccagcagaacgccgcgaccctccaggcgatccccgcgcccggcgtctccatgggccaggcggtggccttcctcgacgacgtggcgcgcggcctgccggccggcttcagccacgactggcaatccgactcgcggcaatacacccaggaaggcaacaccctggtgttcgccttcctcgccgccctggtggtgatctacctggtgctcgccgcgcagtacgagagcctggccgacccgctgatcatcctgatcaccgtgccgctgtcgatctgcggcgcgctgctgccgctggcgctgggctacgcgacgatgaacatctatacgcagatcggcctggtcaccctgatcggcctgatcagcaagcacggcatcctcatggtcgagttcgccaacgaactgcaactccacgagcgcctcgaccgccgcgcggcgatcctgcgcgccgcgcagatccgcctgcggccggtgctgatgaccaccgcggcaatggtcttcggcctggtgccgctgctcttcgccagcggcgccggcgccgccagccgcttcggcctgggcgtggtgatcgtctccgggatgctggtcggcaccctcttcaccctgttcgtgctgcccaccgtctataccctgctggcgcgcaaccacgcggaagtcgacaagagcccgcgcagccggcaactggccgaggccgatctgctggtgaacaaggcatga

SEQ ID NO: 353735 - DNA, 1113 bp, Pseudomonas aeruginosa
atgcagaaacccgtcctgatcgccagtgccgcgctcatctgcgcggcggttatcggcatcgccgtctacgccaccggctcggcgaagaaagacgccggcggtttcgccggctacccgccggtgaaggtcgccctcgcctcggtggagcggcgggtggtgccgcgcgtcttcgatggcgtcggcgagctggaggccggtcgccaggtccaggtggccgccgaagcggcaggacggatcacccgcatcgccttcgaatcgggccagcaggtgcagcaagggcagttgctggtgcaactcaacgacgcggtggaacaggccgagctgatccgtctcaaggcgcagttgcgcaatgccgagatcctccatgcccgtgcgcgcaagctggtagagcgcaacgtcgcctcgcaggaacagctggacaacgccgtcgccgcccgcgacatggcgctcggcgcggtgcgccagacccaggcgctgatcgaccagaaggcgatccgcgcgcccttctccggccagctcggcatccgccgcgtgcacctcggccagtacctcggcgtcgccgagccggtggccagcctggtggatgcgcggaccctgaaaagcaatttctccctggacgaaagcaccagtcccgagctgaagctcggccagcccctcgaggtcctggtcgacgcctatccggggcgcagcttcccggcgcgcatcagcgccatcgacccgctgatcggcaagtcgcgcacggtgcaggtccaggccttgctggacaaccccgaaggcctgctcgccgccggcatgttcgccagcatccgggtctcgcgcaaagccgacgcgccgtcgctgagcgtgccggaaaccgcggtcacctacaccgcctacggcgacaccgtgttcgtcgcccaccaggacggcgaccggccgctcagcgccaagcgcgtctcggtgcggatcggcgagcgctgggacggtcgcgtggaaatcctccagggcctcgccgagggcgaccgggtagtgacttccggacagatcaacctgagcgacgggatggccgtggaaccggtcaaggaagacaccctgagcagcgccgcgccccccgtgccggtcgcaggccgctga

SEQ ID NO: 353736 - DNA, 447 bp, Pseudomonas aeruginosa
atgcagcgcttcatcgataactcgctcgaaagcaactggctctggctgaccgcccggatctgcctggccctgatgttcgtcgcctcgggactggcgaagctgttcgactatcaggccagcctggaggaaatgcgcgccgccggcctggagccggcctggctgttcaacatcgccaccgccgtgaccctgctggccggctccgcactggtcctgctggaccgcaagctatggctcggcgccggggcgctggcggtgttcctgctgctgaccatcctcatcgtccacaccttctggagcaagaccggcgtcgaagccaagctggcgatgttcttcgccctcgagcacatcgcggtgatcggcggcctgatcgccacggccatcgccagcgcgcaacgccagcggctgcgccaggacgtctccgtggccgccacctaccagaaggcctga

SEQ ID NO: 353737 - DNA, 1167 bp, Pseudomonas aeruginosa
atgagaagactgcccaccctctgcctgctggccctcgcgccgctcaccggcgtggcgccccaggcccaggccgccagcctctacaacctgctggtggggacctataccgaaggctccagcgagggcatccaggtataccgcttcgacggcgccgacggctcggtgaaaggcccgctgcgcgtggcccataccagcaacccctcgtacctgaccttcgccccggaccaacgcactctgttcgtggtcaacgagaacggacggggcggcaagggcgataccgtcggtcgcgccacgtcctaccgtttcgatccgatcagcggccgcctgcaacagatcagccaggtccagaccctcggcgatcatccgacctacagcagcctcagccacgacggtcgctacctgttcgtcgccaactactcggtacagccggaaggctcggtggcggtactgccggtgcgcgcggacggctcgctggcgccggtggtgcaggtggagtcgcaccaggccagcaaggtgcatccgcgccaggtttccggtcatgtgcactcggtggtgtcctcgcccgacggccagtacctgttcgcccccgacctcggcgccgacaaggtattcgtctaccgctacgccccggaacaggccgaacgtccactgcaggcggccgatccggcattcgtcccgaccccgcccggcagcggcccgcgccatctgatcttcagcgccgacgggcgtttcgcctacctgaccctggaactgagcggccaggtgatggtgttcgcccatgagggcaatggccgcctgcgtcagttgcagacccacgacctggcgcctgccggcttccagggcaaggtcggcgccggcgccctgcacctgtccgccgacggccgcttcctcggcgtgctcaatcgcggcgacgacaaccaactggtgaccttcgccgtcgacccggccagcggccagttgcgtttcgtcgaacggcgctcggtggaaggcaccgagccgcgcgaattcgccttctcgcccggcgggcgcttcgtcctcgtggccaaccagaacagcgaccagttgcgggtgttcgcccgcgatccgcagagcggccaggtgggcaagacgctgcaaagcgtcgaggtggggtcgccgagcgatctgcgcttcgtggcggtgccgtga

SEQ ID NO: 353738 - DNA, 687 bp, Pseudomonas aeruginosa
atggcgaatggcgtgagtgtcaatgctagcgccgtcaggctcgccagccacaataaatgtccgctgctgggcagtccctgcagcgaagcctgcagcgccccgctaccgagaatcagcaccgggatgtacagcggcaggatcagcagcgccagcaacaggccgccgcgcttgaggcccacggtcaaggccgcgccgacggcgccgagcaggctcagcaccggcgtaccgagcaacagggaaagcagcagcaccggtatgcaacgggccggcaggcccagcatcagcgcgaacagcggcgacatcaggaccagggccagcccggaaaacagccagtgtgccagcaccttggccagcaccagaagagccagggggtgcggcgaaaggacccactgctccagagaaccgtcctcgaaatcgctgcggaacagcccttccagcgagagcagcacggccaatagcgccgccacccagaccaggccgggcgacaaggtttgtagcaattggctctccggcccgaccgccagggggaacagggcgatgacgatggcgaagaacaccagcggattggccagctccgccggtcggcggaacagcaggcgcgcctcgcgcgccaggagcaggctgaagacgttgctcatgccgggtcgcccagcgccggctcgaccgtcgcgccgctggccgccttga

SEQ ID NO: 353739 - DNA, 1302 bp, Pseudomonas aeruginosa
gtgagcaaggaactgaacaaggcaccggtagagcaggcaggcggggatgagcgcgcggcgttctttaagcatctgatcggacgccacccagcccatgaaaccgagatagtccgagtggttgagcataactatgccgcatggaaggcatggcgagcccgcgccgccctggcgcaaccctccccgacgctaccgcctttcgcggagaaggtgctggctaagctgcgccgcttctatgactgcgccgaagacttcgaatcgggcggtgttgatatcggccggcactggctagacctgctgactcagctcgggctgctcaatcgcgttcagcgcagcccggcgctctgggagatcagccagcagggagaggatttactcggtacgccgcacccctccccggcgcctgccgatgaaaagcccggagacagcattctctgctccggatgtttcgccaaaggcgtcggacctgagcatttcgacgaggccggaaagtgtctcgttaggcagcaaaccgagccgctgggcgccgagttcgcccaggtactgagcgacaacctgccggagctgctgtccacggcccaggccgagcaggcagaggcggagcggccggaggtggtggcgtggcgttacggcttcagcggcggaatcgtcagcgacaaggcatgtctcgatgaatggaaatccggcggcgaatatcaatcgctgatgaccgtcgcccagcatgagcgcatcgtcggggcgctgcgggctgagcgtgacggggcgatcaaactactcgggcagagcgtctggcagaagattgaacggctaacgcaagagcgcgacgccgccctggccagggtcgcggagctggaacgcggcaaggtctacgtcgaggccaggcgatgcgacgagtgccagcatggcgggatcaacgattccgccacgggcgtggctgcctgccacgaatgcgattggaccggaccagagccggaagaggacaagtgccctggttgccagagggagaattgcatggccgcagcctgcccgcagtgtggtgcccgatatgtccttgttgccagcgaagagatagccgcccctgtagcccaggctcagcacagcgtgccggcttacgtgagctacacaacgcgaccagccgaaagccttgccgggatcgccctccgtcagttgaaggacgagagccgttgggtcgagatacgcgacatcaacgcacatgccttccccgacatgcagtcgcacagctactacccggctgggaccgtgattaagctacccgccgccgcgcccggcaaggagggggtgtga

SEQ ID NO: 353740 - DNA, 2838 bp, Pseudomonas aeruginosa
atgaagcccctcaaactctcccacgttcctggttgctgggtcagccagactctacccagcggccagggcgaacgccggggcatcgtcaaaatggccattgctaaagaagccgaagatcagcttcaggttcactggttcagtccggagaagaaactggcctatgtcgatgcatctgccgtgcgctcaggctttcaaaatggcatggacgtagtcgacgaaacacctggtagcggtgttcgctcactagggcagggcgtgatcatgcagcaacgcaccttggcggggagcgagcaagtccttgtcgactttcctgagcgaggcgaacgccattggctgccctatcagtacctgcgtcaggtgaagggcgttaagcatcggtttgtcactgccagtaaaggcgaagcggtcgatgcggaacgcatgcgactgcgcatgctcgcccatgccatcaaggtatggaatgaaaacacgggggccctttctcacctagagattgaaccgctacctcatcagattcacttggtgcaccacattatcgcctccggcaactacaactggttgatcgctgacgatgtgggccttgggaaaaccattgagaccggaatgctcctgcatgcgctacggcaacgagacctgatcaaacgcatcttgctggttacccccgccggcctgaccaagcagtggcaggaagagctgtaccacaagttcaagatcgaagactttgaaatctatggtgaggactttttcatcaatgaacctcgccaatggaagatgcacgactgtgtcattggctccatggatcgactcaagcaggagggtcacttggagagcctgctccaggctgagccctgggatctggtgatatttgacgaaggccatcgactcagccgtcgccaatacggccagaagctggacagctctgagcgctacgacctggcgaaaagcctacgtagtcaaaccgagcacatgctgttgctgagtgcgacccctcaccaaggcatgcaagacaagtttgtcgctctactggaactgcttcgccccgagcgacgtaccgatctcatggcactcaacgtcaagccggagatcctgcatgacatggtgttccgtaaccacaaagcagatgtgacggatgcagaaggcaatttcatcttccaaggcaaaataaccagtgccttgcaggtacccagcagcacggaatccatcgagttcgataaaacccttcaggactatctgcgcaaaggctatgacgcgggtgaagcactggggcgaaccggtaatgccattggcttcgtgatgaccgtctaccgcaagttggcagcctccagtgcagcggctattcatcgggcgttgtgcaaccgccttcagcgcctgctcgacgatgaggccaacgggctctcagatgaagagcccagagaccagcgttacctgggtgagtgggaagaacagttcaccagtgatgcccgcgaattcttcgctggtgaagtgcagctgcttaaagacctgattgccgaagcagcggccctgaaagcaaacgacctcaagctgaagctgtttatcgaagatatcatcggcaagatccacgccgccaatgccgacgagaaggtgctgatctttaccgaataccgcaccactcaaaactacctgcgcgaagcattggctggccactatggcagcgaccaagtcgagctcatcaatggctccatgcaacatgctgagcgacgcgaggccatcaagcgtttcgaggagcaaggccgctttctgatttcgaccgaggcaggcggggaaggcatcaaccttcagagcaaatgccacgtcatggtcaactatgacctgccctggaacccaatgcgcctcgtacagcgcattggccgcctgtatcgctatggccagaaaaagaaggttgttgtattcaacatccagcaaaccgacagcttggatcagaacatcgtcgacctgatgtatgagcgaatcgacagcgtggtgaccgacctcgccgaggttcagcggcatgagtttaacgaaggtctgaaggatgaaatcctcggccagcttgccgagctcatcgacgtagaaaacatcctgcaagaggcaacaaaacttggcatagaccgtacccgggagcgcattgacgaagcgctgaagcaggcgcgtactgctgccgctaaacaacgagagctgtttgcccatgcggccaccagcaaccccaatgaactgcgcgatgaactcgaaattactgtcgatcatctctacagcttcgtccttgggatgttcgatcaattgggtattgaggtcgctgagcgcagccacaaagaacggttgctgcgaatccgattgtccgagcaggtgatgcgcgaaatggggctatccccgaagggctcgcagcgtatggatgtgaccttggatcgcatgctggcagccaatcgccctgacacccacatgctcgacctcaactccaagctgatgcagtacctgctgggcaaggcctgcgagtacgaatttggcggtctggctgcaatgctcaaagcaccagaactagaagagggtgctctgcttggggccatgctgcactggcaaggcccccagggtaaacgcatgcggcaggagtttgtgaccatccaggttaacgatggtaaagccaagctgaatcctgcaaaagccagccaatggctactggcacctgcggagcacagcccccataaccccgaccctgaatcctccaaagggctgttcaaggttgcagaagaaatggctaaccagcgactggccgatgccagtaaccgctacctgatacccgagaatttggactgggctgccgcaggctggacgcagcagcactga

SEQ ID NO: 353741 - DNA, 264 bp, Pseudomonas aeruginosa
atgatcaagaaagaactcgaactcggtaaaaaactcgctctggggagagatgctatcaataataccgaccgagtcattgatgtcataggccgaaaccaggcagttaccggtgtctttgatggcgcgcatatggcgaggagcgatgtagccggcagcaccgatgagagcgaaatttttcatggttcgtcctatggaaatgagcggatccgcccggccttctggcacgagcggatggacatgctgggatgggtgatcaagccttga

SEQ ID NO: 353742 - DNA, 705 bp, Pseudomonas aeruginosa
atggccgttcacaccgctgatattgttgtttccaagaggcacgttgtaagtattgggggttatcgagaaccatccgctttcgttcaccgtgtccatatccagggccatgggtgcttgggtcttggaaacacctcccaagaaccccaatgcattgcctacggtagaggctccattgatagcacggccaacttcggtgatccccatgtcagcctgcgcctgcgaaccggtagacgctatcgcccaaggcttcactgccgccaggagggaaccccattgattgctgaggtcacggaactgatccgccagtgtcttcgagtacccctgcaccggggtgatcgaatatgcctggccgttggcggtagctccttgatatgcgggcttgatggtcagcacagtggcgctggcaacgttgccgatctcgtaccagcggccatccggccctctgaaggcatcgccggcgcgcgcattggcgctgaaggcggtgccgctgccggtcaccgtgtccgaattaaggacgacggaaaccgtgcctgtggaataccaaggcatgacgttctccagataatgaaaaacccgcagtcggcgggcttgatagggttagttcggaaccacagggctgacgcccaggcgagcctggagttcggctattcaggcatcgggtatcgtgacttgatctcttccaccttggcgatccaggcgccatag

SEQ ID NO: 353743 - DNA, 267 bp, Pseudomonas aeruginosa
atggtccgactgaatgcgtgcatagactcgctcaaggatcgtttgcggaggaacttcgctcaaatcggaatcgccaaggtaagccttagcggaaagacttacatcgttctgcacagcttttcggagagcttccagggcggctcgatcctcgtcgtccgtggctcgcatgatgtctttctcgaggctctccagggactttatctggcgagtgatccgttggttgacgtccaccatggtctgggcaaactccgtacccaatccgagtga

SEQ ID NO: 353744 - DNA, 1350 bp, Pseudomonas aeruginosa
  misc_feature (140)..(149): n is a, c, g, or t
  misc_feature (1329)..(1338): n is a, c, g, or t
atggtcctcgaactgcttgggatggactgggacacctcccgtgaaggagacaaccaagcccttagggacgctatcgacctagagaagaggagcggttcaggttacctctccctcgaacggttcaacgatgctctggaagnnnnnnnnnngtccaagccgaccatcgaaacgatcaatgtacccatcagaggcagtgccaccttcgacatccttccagacaacgaaaaaatttacgtcgttgtccgacctgacccgaataccccagccaaagcgctcgaagtccttttcgccggaattggtggtcagttcttggcgtgcttcgacccagaaacaaaggtattcacaagagctttcagaccgcatcaggagcagagagtcagcctattctttgtccgaaatgccaaccaccatctgaacgtgcgcttcaccgtgtcgtctgggggggcgagcaatctggcgtccctaggaagcaccggcaacctcgcggccctgtcgagatacctcggacaggacgaagggtttatagcgttagctgcaaaaatccttgaagcagaagtccgaaagcaagccgcattagcggaaagcgatgccgcggaggaatcgatcaccggcgaagacgccgagaatggactagctgtcgatgaccccaaacttgaaggcgttcctgtccaaagcttcccggtaggacagatttggaaaaccatcacatcaacggagcttgaggcgcaaccgtcgttcagggttgcagcagagccgcggttccatcgagacaatctgggacttctcattccttacatgatggagtcgaaggcgcttgagggcttcgaggctgacgacagcattcgtctgatcctaagggatggggagaaggacatcgatgttggcgaaatcgacttggccaaaagcctccgcgatgcggtctacatcccggcctcgagcaagtcacgacgcgtaaaagctgactcggtgctgtatcttcagagtcagcagaacaaaacgtctatggcccgccgcaaaagtgcaatggatcggatcatcaaccgacaatctgtccagccagatctattggactacttcgacgaaaagtgcaagctagtccccaaacagtactcagatgccccaacagaagaagacttcgcagtttatgagcggatcacgtctgacggcactgtcattggcttgaatggcgcacaaaaggaagccttcacgaatctggttactactggacctgtaggcttgctccagggccctccaggtacagggaaaactgagttcatcgccgcgtttgcgcactacctgatcgataaggtcggagtgagaaacatcctnnnnnnnnnntccttctggtga

SEQ ID NO: 353745 - DNA, 417 bp, Pseudomonas aeruginosa
ttgaggatagtttgcctattggtattgctgagtctgatcggcggctgctcccattcagtcactttgcaggagcgagcagagcaagaggccatttttatccaggaattccgccaggaattcgccaagaggcttcgttacccgctgttcgcaccgggagatgagatccccgaggccgatgttatggtgtttttccgcttcgcaagctcgtcggggcgcataagcagttgccgggtacagtacggcgcggggaatgataagagccgcagtacgctcgatgaagtcttcgccaagcgcgtgatagccacctgccgcgagcccgatctaccggttgctccgccggcgctgctggatggtggcggaggtttcagcttcaagcagagagtgatgcttcgcaaggaagtggaacgcctcaggtga

SEQ ID NO: 353746 - DNA, 699 bp, Pseudomonas aeruginosa
atgacgaaacctcctctagactcagagccacctcgcacctactcaagccttgtcttgtgcatagctgccgctttttcgacaatgacatacgcatctcccggcgcaattcttgaaccaaaaaagaaatataaattcgccaacgacatctaccttcccatcatcgaagaaacattaacaaaagtaatactaaagataaacgaaaaacaagaagaaacattcaagcaatgtacaagcaaagcagtatatagctgtaccaagttcatcatcacccatgcagaaggcagtgagatattcggaaaaaccaatggagaatacaatagccattcactaataagacactccattagtcaaagcataaatgctgccggcatcgtaactattagcccaccagccccagcaggctccctgggcactcaaacagtatggacatgccccgaagattattggcctagatctgagactatcgctcccaagcagatcaggaaaacttgcgttatcaaaacacagcccgccaagaacaaaggtccttctgatatatcttgcccatcgccgtacggaggaaaccctataaatttcgctattggcaataaatatcaggaagaaatagatctgcggggcggtagagggaacgccctgatcctcagccgaaattacaacagtcttgatcggaaaccaagtggctggttgttctcgtcttga

SEQ ID NO: 353747 - DNA, 378 bp, Pseudomonas aeruginosa
gtgtgctctctgaataccgagcacattttcaagctcaacctcagctctgacgagatcgttcagcatccgcgcagcttgctcgacacctacctcattggtatctggaagcgagcggaagcgtggaacaagatccacatgaacggcttcctgtcgcagcagcgagttggcagatacaccatagcagcggctaagtgcctggatttcatcgagccgcgcagtacgttgccctttctcaatggccacaagcgtggtgcgcgctacgcctactgctttagcggcagcatcttgggtgatgttcgcggtttcccgcgcaaccttcagtcgttcacccagctctactgggctgagttcgtaatttggtttggtcatgatgcgtga

SEQ ID NO: 353748 - DNA, 177 bp, Pseudomonas aeruginosa
atgatgatcatgccgaactcggtctgggacatttcactcctcctcctcggtgagagcgatacctatgagccagattaccatacccatgacgaaagcatatgccgtcagcaagcggtgctcgctgaggaatatacccaccaggctcgcggcaacggcagtggtaccgatttttcgtag

SEQ ID NO: 353749 - DNA, 1815 bp, Pseudomonas aeruginosa
atgaaagttagaaaactaacaattaaaaattttcgtgggatatcttttgccgagattgacattgaagatttcaccagctttattggacccaacaacattgggaaatcaacaatactccatgcactcaacatagttctggataataaaaatcccacaatagaagacttccccaacaaacagccgtcaccagaaccgcttgagataatctgtgagttccgagaactggagggctgggaaaagaacaagcccgcaatttccggcttgctgcacgaagaaaatctgcatgttaagttgagtgctctgtgggaagatgaagacgccaaagtgtcctctgaatacagtgtcttctgtacaattgaagaacttccttggagtggatttagagaggcgaaggcacatccgcaggcggcagcatgtatggaagagctcggtattgccaaggctgatgatctgaaagcaatgggcgctgaactagaagccatgttcaaagatcgccatccagatttagttagacagaagacagattggcatcctaagaagtttgccaactctctacagcaagccgtacctcatgtaatgtatgtccccgcctgctttaaaattgaggatgaacttaagtccacagcaaacactccattctcctttcttttttcaaataaattattccccattgtgaaaaatgataactcctacagggaatatatggataaagctgcataccttcaggggaagctaaaaggaaaggcagagagtggtggcgaaattgacggacttggagatgcgctagcgcaagtcagtgcaactttgaatcaagtgttggattttgactcaaaagtccgactggctgttggcgaggtagacattgagccactctttatgaaggcggctactctcttggttgaggaagagtttgagtccagcctccaataccaggggagcggagtgcagcgagcgctggcgtttgcgatgcttgagagcaacgccggtcatgcgtctatagtagagggcggggagcggtcagttgtcgttttatatgaagagccggaactgtatattcacccacatctgatgcgcaggctaaagtccgcattagtagaaaaaaccaactctccaaaatggcaggttatttgctcaactcactcccccttcttgatctcgctagcagacaagccgcaatctttaaagcttattagaagaaacgcggataacaagcgcataattcatcagctcgctgccaatatttttgaagagggtggtgactatgatgagcgttccttgctgagggctaccctcgacttccatccaaccgtttgtgaaagtttgtttgcgaaacgtgtagttcttgtcgagggtgatacagaagttgccgtattctcactagcggaagacttgttgaaaaagatgtcaatcaacgcacctctagcacgagacacaaccataatttccgcaggtggcaagtggactattccggctatttgtaaagttctaaatacgctaggaattgattaccgtgtaatccatgacgaggataggcatggcttaagcgacgacgagttaaccgaaaagccggcgatacatccatttaaagcaaatgcaaaaatagcaagtattgctaatgcaaataaggtttttgtggtttcggatacttttgagcacgttctatgggattctgcagaagacgaaaatgccagctcgaaagataaaccgtacaactcttggaaaagagtcaagggctacattgacggcgaggtccagttaactgccgcaagtgaagctaggctgtccgatatcttaacctttgcgtttactgcctaa

SEQ ID NO: 353750 - DNA, 225 bp, Pseudomonas aeruginosa
atggatatggacgaacccaatctcacgttgaaagaccttcccagctctcccccaatgatgccttggagggacttcgctgactggatacgaatgggtgaccgtcatgatgtggtctggggctggattcgcaacggctacatcccgtcccagaagtacggcaaacacatgatggtcaatctgaccgcgttgaacagccagctactggagaaaggagaacgattgtga

SEQ ID NO: 353751 - DNA, 276 bp, Pseudomonas aeruginosa
atgagcctagaggaactgatcaacgccgtagctctcgtgctgatggcctacctcttgggcggcggcgctcagcccaagccacccaccatcccttcctgttgggtcagcccggtgcagttggagcgctggacgttcgccgcgacgccggcctggccggggcgcgcgcgaacggctcgtctcggagtgagcaagcgccacggcggggccggccgacgcccctgtaacacgtcggacaacccatttctaaaacgttggttattggacattgttaggtga

SEQ ID NO: 353752 - DNA, 1044 bp, Pseudomonas aeruginosa
atgaatagcgaaagacaatatccgggcggttcaaaatctcgagtcaacaaagcaggcgcaaacattagaacagggaccgccaccatcgaagacttattcgtcatcgaaacttggcgagcagcacatcgagccgtattaaataccttccaagccattctgagaaacaggacccgaggaacaagaatcacggttgcacagcgacataagcgacgcaataccattttcgacaaacttagaagactccccaaaatggagctttctaggatggacgacatagcaggatgccgcttgatattcccgtcgatagaagatttatacagcttccgcgaaaatttccacaaggcacgtttcaatcacaagcgtcgaaacgaaaacgacaaatacgactacattaaagcaccaaagcggacaggatacaggggaatacatgatatttacgaatacgatgtaaactcctacaccggaaaaaacttagccggactatatgtcgagatacaatatcgaactgcagttcaacacgcttgggcaacagctgtagaagtaataggctttgtaaccgagagccaaccaaaatttcagcaaggtgacaatagataccacctggccatggcctacgctagtgaaatactagcaagagtctacgagggtcgtaagggaacttttcccaaagtggatgatcgagaggtggttgctaatttcctagctctagatcgagagctaaagctaatgaagactctcaaaggtctaaattctgcaaacaagtcggtaactgaaaaccggaacgccatcttaatattttcagattcaggagaactggaaatcaagacatacagggactctacagacgcattaagaaatctgtttgacctcgaaaagagattccctcaaaaagatatcgttcttgtaaaggcggacacaagcgaagaagttagaatagcattcaaaaactacttctcggatgctagggactttattgaatacatagagcagggatgtacgaaactttcaaaagcaaagactataaacagaaaaataacaaaatag

SEQ ID NO: 353753 - DNA, 492 bp, Pseudomonas aeruginosa; identical to SEQ ID NO: 341971

SEQ ID NO: 353754 - DNA, 996 bp, Pseudomonas aeruginosa
atgctcgagcgcctcgccagcgagatgatgcttctggtcgtaggtcgggcgcttgaagctgtagtcccgctgggtctgtcgagccgtacgaacattttcgctgtagcggaaagaatgaagcaccggctgcgggttgtcgccctccggctgggcgctgaacagtaccgggccgccggcgatacgctcctggacgtagagccggtcgctgcagaccagggtgtggcggtgttcgtcgaagcggaagtagtagaccaggccttcctcgaaggccagccggtcgtgcaggtagtgatcgctgtcgccggcctgcacgcagtattcgcgtggcaggtgctcgtggtagatacgctgttcgtagtcgagcacccggtgctccttgagcagcgcctggagaatctccggaacactcttctcctggaatatccgccagttgcagcacagctccaggcgcgccaactgcggttccagcagcagttcgtagcgggtccggcgaaaacccgagctgccctgggtgaagtggctgacgatgccatggacgtagcgggccggacggccctcctgccagagggtgaaggtgcccggctggtcgagtacctgcctgaaatcgatggcgttcttgtcgctggccagcttcaggttcaggcggaaaggctcgcagagcgcttcttccagttcgaactcgacgacatcgaacgcgagtttcccttcgccgacgacgaaggtgaatttcaggtccctttgacgcatggatcgttccttgttcctggcgggcggttcctcccccatccgttggagaagcgagccccacgttactcttgctcagccgctgccgaaagtcttggctcggtgtctatttcgcgaagtagcggacattttcggctcgacggagaaccggccgtacaggtgtacgaccggtgtgcctgtcaactcaccctgcgaccggcgagcgccagtcgtcggagccggaggtgccggagacttcgtgggtccaggtga

SEQ ID NO: 353755 - DNA, 135 bp, Pseudomonas aeruginosa
atggggttctgcttaggattaataacgctactggcatactttttgattccacctttatgcgttatcagccacagtctcttcaggggcaactacatcagcaggtatttcttcctgactcaggccgaagtcttctag

SEQ ID NO: 353756 - DNA, 234 bp, Pseudomonas aeruginosa; identical to SEQ ID NO: 335098

SEQ ID NO: 353757 - DNA, 531 bp, Pseudomonas aeruginosa; identical to SEQ ID NO: 347587

SEQ ID NO: 353758 - DNA, 582 bp, Pseudomonas aeruginosa
atgcctaaatacagcgctctcaatctgatcaaacgcaaggctaaggcctttgcggatgcgaacggcattccgctttcctccgcccacaaccagctggctcagcagttcaagttcaacaacttccacgaactgaccgtggtcgctggccaatcgacgttagacccccgcattgcacttgcggctttcggcactaccgagctagaccaagcaatctgggaagatgacctgcccgatgccctggacatgcttctggaagaagcgctgagcagcgcaatagccgacaccaacgcctatgacttctcgttcgaagatcttgatatcgagcaagcaacctacgatgaggcgaatgggactctgacgctgatcgggtcactgacctactccggcacgccggacgaagatcgtatgtaccacggcagcaagttctatttggacgtacaactgacgctgctgcgccgtgacgagaaatggatctttcacgatgaaatagggctggaaatccttgctggtgaaagcgacgtagatcgtgaccatcaagcggaggaagaagatctctaccaaagctacctcaaggatcagtga

SEQ ID NO: 353759 - DNA, 1074 bp, Pseudomonas aeruginosa
atgtctttcttgcgagtggatgggcgaagaattgatggtcggaacatcccgaagcatacgtggaatgccgacttaatagactttgatggccctctccttagtttattcaaaagtgaagagggggatgatgttctctattcttggcttgattgtacggcttcgcggaatcggtggtgtatggttccagtggtgcgtgcagatttaagggggtacttagatggcctattttctttgcgggaattatttgagcgtgcggactggttaactgtttttgatatgggggcgtctgctagaagatctgccttcgtcaaaactacttttcagcaacttcccgaagaatatcagccgtctgagaattcttatctgacttttgatatagcaacgcctgctgcgcggcagttagcttttgatgtaactgatgattattttattggcttggatcgtgagttgtacatagacgatctttcgttagtgcccaagctatatcagcagctatattcatttcactatggtcttgagcacttagggcgagaggcggtcagaggtactcttgcgagggtaatggcgaaatggactggcggctttagcgctgttaatatttttagtggattgaagtcagttataccatcgattcatcgaccttgggtggctgagctgagatttaactcgcccgggcacataaggttaaatatgttgccgcgaatggcggctcagattgagcgtgcggctgttagaatttgcgatgatgatgtttttaatgatttagagttgttctatagaagggtctatcgctacttttcagaaaataatcttggcggcttcgaagatgaaaggcgtcaggtagatattttcctaactgatggcgttgttcagcagcttgtaagctttgttgatcagttcttttccgtcatgctttgggagcagtatagagaggaattcaatgctatagaagcaaatgcattgcaacagattagagtgcttttggcttactatcgacggttaaggaagttaaggccgtacatggtaagtggtcaggtcactcttgggcggtctcgcttagccccttctagttaa

SEQ ID NO: 353760 - DNA, 186 bp, Pseudomonas aeruginosa
atgcagcataaactcattacttacgaagaggcatgcacgctgattagcgactacgatgccgaggagatttttagcttgggctggtcacagagcttcagagcagaagccgataaccgaacaatctacatacagctaaacggagccaatgaaagtcttctgattgaagaaacacaaagggccgcatga

SEQ ID NO: 353761 - DNA, 204 bp, Pseudomonas aeruginosa
atgaaggctaatcacctagcacttgcactttacgtcacgctcagcgggctcccaggagcgagcgcggacgatcagagaccgttctcgggcgatgacttgaggatcgacgaagacgggccggagcaagacgagctgtacgacgaagacgacccgctatacgacgaagcggatgactatgaagatcatgaggacgggacagaatga

SEQ ID NO: 353762 - DNA, 657 bp, Pseudomonas aeruginosa
atggatgcggtgcgtcgcttaccgttttttgcatctactcccgatggggcagtcgctggctcagcagatttttttgcaagagggcgctttctgcttcccgaggcgggggaggaaaagcctccccagtcattgggcttagaagcgtttactggcaaaaagcttggctcgtactcttcgcttgcggctggcccggggaacgatggtgctgacggccggcgatacttggccagaagctcatcacacatctcgtctagctcacgatccagctcctcgggggtcttatggagccgctcggtctcgacttggggcgggatgcttatctcgtctgcgtgctctttgaggagcagcgaatggccggtgtcggggtatagcgttgcttcgagttcgtcaaaaagcgcttcgcgctcttccttgctcagtgtatgccctgtcttctgttgcattgcccatgctcgttgtggtcgctcttccctctgcccgattttcaatttcgggtcgtccgcagaaagcgctatggggtcgagtcatcgtcgtttttctaagggtttgacaaccgggcctgtggtgtcaggttcggcccggtgtcgggtcggtgtctcgctactcgtgcaccggctctactacctcatcgtcctcggggcttcgctcattcagtag

SEQ ID NO: 353763 - DNA, 1230 bp, Pseudomonas aeruginosa
atggatcgtgggtattccacagtagacggtgcttacgtctgtgccaggtgctttggtgatgaggggctaaaggagtttattcgacagaacagccagcccggaaagtgctcttactgtgagaggcgtcgcagggtctgctctttgaatcaagttatagagcacattatgaatagtgtgaggcttgaatgggggcacccggctaatgaaggcctgccatatgaaactagggaaggggggtggcaggttgctgatgtatatgatacgtgggagcttttggaggagttggatattcaatgtggttccgatgaattgtttggcgatatttcaggcgcaattcatgattcggagtggtgcgaagtggagccttattctttgccgttagatagaactcttgtgtatggctgggagagtttttgtaattttattattcatactgccaggtttgttttttttaaggcagaaaatgctgcgtatgatcgtcatcagcatgatgaaatgaatccggtagatattcttgaggcaattggaggtatctgtgatcgtctggatttggttggctcgcttgccgtcacggagaaaatttacagggttagggttgtcgatccagatgctaccttgagcaaggcaaaagagctcggttctccgcctgataatttagctaatatgcctaatagaatgagtcctgttggtatatcaatgttctatggtgcgtttagtattgataccgctatcagggagacttttgatccatcaattagtgtggataaaaaagctgtttgtggggagttttctccggtaagggagttggtggtaattgatctctcagattctttttatgtgccaagtttgtttgatccggataaacaggagctaaggtcatactataagtttatgtgcgactttatttctgatttctctaagcctatagagcgcggagaaagagcgcatgctgactatgttcctactcaggtagttacagagttctttcggcatatatatcgaagcagggagggggctagcattgacggggtgatttatccgagttccaagaccggtgaacgggctatagtgatttttgcagactccgctgcatgtgttgatgctggtgaggaaaagcagcgcggagctctgctcaagttaaataatgtaattgaagtcgaccttcaagagtacatagctaagaaggtcgatgattcagatgatgaggtttttggtggcttgttaagatga

SEQ ID NO: 353764 - DNA, 1317 bp, Pseudomonas aeruginosa
atgtggggcatcgcttcggtgcccaccatgaaaccctccccctcctacctcacacgcaaccgacacggaaccttctacttccgcatcgtgattccacgactattgcgagccttgctccatggccagcgagaagtcagacgcaccctgaaaacagacagcgaaaggctggcgcgtaagcgtgcccggcaatacgtcgcacgttacgaagccatctttgacaaggtagtgaacatggttgagcgtgatgaactcggcctgaccgaggccgattacaaggagctgatggagctcctccccgatacaaagccgacgccggatttctccagtccgcaggacgaaaaccaatcagccgagccaattctttccgagaaggaaatcgaggctcgccagcgccgcagggaagtagagcgcctgctaactggagcctatggccgcccgatcccggccaaacttgagcagactgcgcaagaacttgctcacccctaccaaacgacagagctgcgggccgttctaccaaagctcagagatgagctagcactccgcaacctcgcccctacgaccaccagcgtggcaccagcagcaagcattgaccccgcaatgtctagctggacgctatatcaggtatggcagcatcagcttgagcgtgacagagccgatacctctgcaaggggcggccaagccaaacatggcgggacactggaggagcgcgagcggcgagcccgcgtaatgaccgtgctgaccaaacatcagcctgtatgccagcttaagaaaagcgactggcaggcagcatacgacgcagctcggaaaatgaaggccggcgccaaagcatcaattgacccaccgacaccgctcagcgagtttctaactgacgacccagaacagatgaccgggcacgaacgagtaagcgcccttatcggctcgatgaagcaaatccaagagcacgcccgcttccttgatctaactacaatccggccagatgacctgctaatcaagccagtacaaaaacgggtaacgaaacgcagtcatgatggtgtgccattttcgtcagccgatgttgaagcaattttctccggatacatctaccaaggtgctctgccgagtgacagaaccaaagcttatcctttttggttctggcttccattggtcgcctacttcactggcgccaggacaaacgaaatagctcagctcgacaccgccgacattcgaacaattgacggacatccctgcttcgacttctgtccggacgacccaaaagctttgaggccaaacgagtcaagacagaggaagctcgacaggttccaattcatccacgcctga

SEQ ID NO: 353765 - DNA, 1089 bp, Pseudomonas aeruginosa
atgagcatcgctgagatccaatctggagtggatatgctgccgaatgctgcaaggctcgtggcgttttacttaagtcgtgaccgtacgctcgggctgctgcatccccagcacctacctgcccatatcattgcggcgcttcagggccacaacattcaaatgtcggcagcaatcctttcgaatgttgtgggctcataccttctgcatgcaatcgcagtaggtggggtaaaaacactgccgcaattggccttcgaaggcgaattgaaggaaggcaccccgttcatttataacgggcatttctctggcaaaggttttggggctaccagcaagagtcctgcgttgagtctcactgcgaagcttgacgcaccgcttgctggcaagaaactcctcttcgagttttctaggaacggactggtgaatgccaccgcgtacacccgcatgtctggctcgacacgcctgttcgcgttcggttatatctcggggatcgacgacaccaccatccgcgctgtgccttacgtcgtgggagacctagttgcagacaaccacgcgatggcctcaccgttcttgtcgacgctcgaattgcgccccgaggaaatcaagcaatttggcggaatggacgagacttggtttccttccaaagccgagttccagcgcatgaccatggtctcggaactggccgtcaaagaactgatctgtcgcctgcttggtgaacactcggtgcccagcgattgggggggagaggagtgcgatgtgctgtcggccaatgtggttgttgatggccagcgtcacacaggggcgtttttgctcaaggggccagcgcggtttcacccaatgaagccaaccgaccttggaaaaaatggcgaccagctctatcgcctcttcaacattcctgcccagatctacttcgtccagcattgccacaatattggtgctgctgttcgcaagcaggcagaagcgtttgctctcgcacgaagctttatcgctccctgcaagatcgttttcatggatggcctcacaacagcgcgcttgctgagggctcatgggctttggccggaggcaccgatgacttcgataaaaggcaagatggtatga

SEQ ID NO: 353766 - DNA, 687 bp, Pseudomonas aeruginosa
gtgcagggatctgcaggctttcccttatgtacaagctccaagtcaagacccattcctatgcgccggcaaagcatgtgcagaactgcagaaaaacaagcctatttagaggggaggcgtggcggggggacgactgcgcgcgccggggcatggtcgggttgcggcagccgcaggccagggagggggcacactacatgggaaatggcagggaaggggtttgagcgggacagagagaaagccgcgtatagcggctttcctggggggctgtggttgagtgggagttcagacctcgagtcgagactgatcctcttcgagcaaggcagtcagctctttgtgcctgcggaacctggacattgggctgctggccaacggttcaggaagatcttcttctgccagggaatggatgggcgacaaggcattccacacggggtcgctgctctctggtgttggttcaggaacaccagcctgatggatcaaggctgccattgtcttgccaaggcgcagcaactgctcattgtcgtaggccgattgcctttcgcccgggctgggagcggagatcagaccattacggaccagcgcgctgaaaaagatacttgcctcctgatgtgcgaaaagcgccatggccgagtctacaaggcagtggctgttgtagctcgagcaagcgctctgcctggccagcaggtaatgtag

SEQ ID NO: 353767 - DNA, 1353 bp, Pseudomonas aeruginosa
atgccggtagaaaactggatgcagtttggtacttttgcagagcaagaggagttcatctatccctctcgagatgcctatgccggcgtcatgataaatggaaacatggttgcacacacgccatccgctatggctggtttcttacttgaaagaatacccgctagcaccaagtttataatcgatccatttactcacgccttccaacactcaccagcattcataactggtaaaaaaggcgaaatcaaaacctctatctcgaagcttgctgaaagatatgacagcccaatagttgagaacctcggcagtcgcccactagctccgaaagactttacagaaaagaacattagaaaatacacagaaaaagcccttgagtttcaacgctgcttcttgcacgactacatgatcaatagtgaagtagcaaaatattttgacgaggacgaagtaaaaagagagccctacgccttagtagcaccttacttctatctaacagatataaaccatgagtactggaccgaaatatccatcaagctactcagaatagcaagaaattacacatcggaaaaagaaaaaaaactattctgcaatctagtcataaacaaagggctcatgcagagcgaagatgtaatagctgaaataatatctaaactaaagaatgaaaaaccagatggatttatagtttggattgacgatcttgacgaagcttcatgctcggtatccgaattacatagcctaataaaaatatttaaacttatccgaagcaacaaagacattgaacttataaatctgcatggaggatatttttccatactgagtggagcagaagactttggcagcttggcaactggagtatgtcatggtcccgaatacggagagtcgagagcggtggtgcctgtaggtggagggattccaacatctaaatattacatacccgacctacacagcagagaaaaatatcgcgattgccttatgtggtttaacaaggctggctggcttgaaaactacgagaattttcaccactccgtctgcaactgcagacaatgcgtaaaagttatagacggaaacattgaaaacttcacaaagttcggaggagaagggacaactaaaacaatccaaaggggaagaagcgttgtaaacctacaattccctacacgtgacgagaagaccaactgcttacgccactacctgaatgtaaaaagcaaagaatatgaaaaagctaatacattaagtggtggcgagctaataagtgacctaagcagcagcatacagaagtatattgaaattacaggaccggaatacatctctcatctgtttcggtggcgccaaatcctagaaagcgagtcaggtacaactgattaa

SEQ ID NO: 353768 - DNA, 939 bp, Pseudomonas aeruginosa
atgggcttgagggaatcaaggcaaaataacccattcgacgacaccagctccacggcgagtgagagcggatccctcgtcgagaagttgtgcgaaagagaagacgtcgctgccttccagcgagttaataaaagtcatcatcaagaagcctcaccatttttgaaatgggctggtgggaaaagatggctagttgagaagcactcacacctcttaaatatagagcacgaaaggtatatcgagccttttgtgggaagtggcgcagttttttttagccttctcccgacctcagccatcctctgcgacaaaaacgaaagactcatagaagtttatgaggcaataaagcacgaatggaaaaaggtggcagaccttcttcaaattcatcacaggaagcattctccagaatattattatcagattcgcctaaagcgcttccgaacaccggaaacaagagcggcgcagttcatttacttaaacagaacttgctggaacggattgtatagggtaaataaaaagggcgaattcaacgttccaataggaacaaagcaaaatgtggttcttgcgactgatgattttgaaagaattgcccggtatttaaaaaatacagaacttttttctggcgacttcgaaattgccctggaaaaggcagggcgaggcgattttgtttttatagatccaccttatacagtcaagcacaattacaacggatttcttaagtacaacgaaagtattttctcatgggaagaccaggttcgtcttcgccacgccgttgagcgtgcggttttgcgtggtgcaaaagtgcttgtgaccaatgcttgccatgacagcataaagcgtctatatgaaaatctaggtgagatttcaactctaaatagagccagcatcatagccggcaaatcttccgctcgtggtaggtacgaggaggttgttataaaatgctattaa

SEQ ID NO: 353769 - DNA, 627 bp, Pseudomonas aeruginosa
atgctattaaagactcttggttacctcccctttatacagtgtttggttcattttccttttgatgcacacaaagcggcgctaaagaagttctctacactttggattctgaccagccttcccgtcatagtcgctgtatttttatcgccaataccagatggaagctcaagcgtgggaattaagctcctatctaagctcagagagtccattacggtttcggagttgtttgtgtacacggctacatttctaactccggttttttatatgatttttgagaaatatcaagaatcatctgaaactcaaattggtgaaaaaatagcgcaaagcgtcagaaggctattcaagggttatgggctagtggccttgatctcaattgtcatcatgacattgaccgcgattgcttttggacagataaaggctggagcaagtgactttcaaggctcattccttgggtactatctgaccaacctgtcgttgccgatttatattttttctttgttctgttggtacctcactctgcttgatggggcattaaagggtgattttgtctcggagaatagaaactctgaaaaaaacatagtgaaagatttttctgcaaggctgcgtaatcgggagtctgacaatgagtaa

SEQ ID NO: 353770 - DNA, 189 bp, Pseudomonas aeruginosa
atgactatttcgaaatggctcatcgccttgatgtgcgtcgggtccgcgctggccggttccgtggtcaccgtggtggttcaaagtaacagcgaatgtacggtggtggcggagcagcaacggcaacagcgtgacgctgatgcctcgtttgaggcgcgcccgaacactcgcggcggcgtcaaggggtactag

SEQ ID NO: 353771 - DNA, 474 bp, Pseudomonas aeruginosa
atgctcagtcaactgccgctcctgctcggccaggcgagcgagagagcgctgagtcggatcgatggcacccagcaacttacgtgcggccgcatcctgcttggctgtttcagcagcagccttggctgccgcctcggcagcgcgttgctcggtcgccgcctgctggacgcgagcacgctcggcattgtgataggcgttcatggcggtggactgcgcttgagcgctatcgcgccaggcagtgttccccgcttgcacagcagcattgaggcgctgcgtactggctgccgcagcatcctgggccgattgttgttgcagcgaggccgccaccatggccctgatgcgggccgtctgctgatcggcggactcgccgacgctgctcagcttacggccagcttgttcggccttatcgcccaccgcttgcacggattcgctcacctggtcgagagcagctttgccctgggcgagatcggcgcgtag

SEQ ID NO: 353772 - DNA, 1782 bp, Pseudomonas aeruginosa; identical to SEQ ID NO: 332345

SEQ ID NO: 353773 - DNA, 924 bp, Pseudomonas aeruginosa
atggcctatttcacaggaacagctaacaacccgtccgacctgctcgccaaactgcgcgtccacgccgagtcgctcggctgggtcaccgaccgcgcctcggcatcggaatggctttgtcacaacgctgatgggtactggtcattcaatgccggagccaatcagttccagatggcgggcaatacggggttcgataacagcctggcgtggaacgcgcagcccggtaactcggtgcagaacaacccttattcgtcgaagggaccgaccgtcgcacagctgagcggtgggccgttcacgcgctaccacctgtttgccacggcggcctatctgcacctgcacgtcgagattgcggccggtcagttccggccggtgatgattggctcgctcaacaagcgcggagtcgaatacagcggcggccagtacgtatgcggctccgtaatctatcagtcgggccagatgctgacatcgaactggtcctgtcatccgttcgacggctatcacgttcgctatagcgacggtggttgcgtactgcgtgtggatggcctggatggcggcccctcgcccgactggctgccattcgactacgcgacgaacatcccccggcgggtcatcgggccaggccgtggaaactacagaagtcagtaccatcctgacgtcggactgatcgacgccagcgcaaacgagctgaacagctcgaccaccactgtgccgtgcgccatctatgcgttcggcgctcagcagcgctcgcgctacgtgggcgaagtgccggactttggcatatgcaacatggccttcctcgcgcctggtgatccgcttgtcgtcggtagcgacacttggcgcgtatatccgttgctccaacgcggaaccgctaccgacttcgacagcgccagcgcctgggtcggctattgcttccgggtggtcgagtga

SEQ ID NO: 353774 - DNA, 1032 bp, Pseudomonas aeruginosa
gtggatcgcgagcggcagttgctggacatgacgctgttcggctggggcgcgcgcatttgggcgctgccgatctggtctgatatccagctgctccagcagccgctggcggccggctcgctgagcattccgtgcgacacggtcggcctcgacttccgcgacggcggtctagcgatgctgcgcggcgaggacgccttcaactatgaggtcgtcgaggtcaaggcggtgaccgtcgccggcctggacctggtccgccccgtccaggccacctgggtaactggctcgcgactgtacccggtacgcaccgcgcagctgaccgaacagcccacgctgacccggctgaccgataccgcacagtctgcgcgggtgtcgttcctggtgatggagcccagcgcctggcccgaggtaatgccggcgacgacctacagggggcggccagtgctggagcagcgcccggacgaaagcgaagacctcacctctaactatcagcgcctgctgtccaccctggacaacggcagcgccattccccgcgtgaccgacgtcgccgggatggcgctgcccgtcatcggccatcggtggatcggcatgggccgagccgagcggtcggcgttccgtagcctggtctatgcgctgcgcggccagcagaagccgctatgggtgccgacccacgccgacgacctgactctggtcgccaccgtctcgcagctgtccaccgcgctggacgtgcgcaatatcggctatgcccgtttcgccaatgggcgaccgggtcgtcgcgatatccgcatcgagctgtacgacggcaccgtctatcaccgccgcattctcaccagcaccgagctggacgccgacaccgagcgcttggccatcgacgccgccctgggccgcctggtcgagccgacagatgtagcgcgcatctgtttcatggcgctctgtagcgccgccagcgacgtgatcgagatcgagcacgtcaccgatagcgagggcgtcgcaaccgccgcgctgactttcaaaggggttcgtgacgatgagttttaa

SEQ ID NO: 353775 - DNA, 273 bp, Pseudomonas aeruginosa
atgagcacgaagcgttatacggatgagttcaagatcgaggcggttcggcagattgtcgagtacggccgaccggtagctgaggtggctgagcgactaggtgtgtcggtccatagcttgtatgggtggagacgtcagcacggccagggagaggtagggcgtcgcgttgagcaggaccagaacgctgaggttcgtcgacttaaggctgagttgcgtcgcgtcactgaagagcgagacatcctaaaaaaagccgccgcgtactttgccaaggggtaa

SEQ ID NO: 353776 - DNA, 585 bp, Pseudomonas aeruginosa
atggttggctatggccgtagaccgcgcccattgagcgggcccgtgggctcagtggcaaagaacgtcttggcgcgcggtttcaaagtaagtgaaccgaatcgcgcatgggtaacggacatcacctacatccgaacctacgacggcttcatgtacttagccgttgtgctcgatctgttctcacgccaggtggtgggttgggcgacgcgccccacgcagcacaccgacttggttctgcaagcgctgctcgctgcggtttggaggcgcaaacccgctccaggtttgcttctgcactctgaccaaggaacgcagttcaccagcgaagactggcagtgcttcctgcgtgagcacgacatcgtatgcagcatgagccgacgaggaaattgccacgacaacgcagcaatggagagcttcttccagctgttgaaacgcgaacggattaagcggcggatctacagcaatcacgacgaggcacgcgccgatgtcttccagtacatcgagatgttttacaacccgacacggcgacacggttccaatggcggcctgtccccgatagagtttgaacggcagtacgcactaaacggctga

SEQ ID NO: 353777 - DNA, 762 bp, Pseudomonas aeruginosa
gtgcaagacctgattcagaaaaatgtcctgatacgcgaggactacaggctgcagttccaggcaacgctggcggcatccgccgacgccatcgccgaccagttgtttgctctgatcaagcagaccgcaggtgactttcgcgggcaggacgaagcaccggcgaccatcagaagattgttcgatggccatgacctgaacagcaaggatggggcgctagccttcattgcctccttgcaggagaaggttttggcagcggcgaaggcctccggctcggatgccgggatattcagtttgctgaagaaggggcagccggccgcggccgtctatgacctcatctttggcttgaacttccttgagcctcgctactcgctcctcttccaggacacgcagatcgagcaactgtcccctggtcaacgtggcgcgctcttgctgatcttctacttgctggtggacaagggaaaaacccccatcattcttgatcagccggaagagaatcttgacaacgagacggtgttccgtctgctcgttcccgttctctccgaagccaaaaagcagcggcagatcatcatggtcacgcacaaccccaatttggcggttgtgtgcgacgccgaacaaatcatccacgcaagattcgaccgcgcatcggactccactatccgctacgaatcgggagccatcgagaacacggggctgaacgaagctgtcgtgaccatcttggaggggacgaaacccgcattcgagaaccgctacgggaagtaccactga

SEQ ID NO: 353778 - DNA, 1797 bp, Pseudomonas aeruginosa
atggcggcccttgaaccacagcacatgaccgtcctgaagaagattctggcggagcgcttcgtgccgttccttccgcccctcctgggtgcggcgaagccggaggatcaggctgccaagcagctctcgcgtgccttcagcgccttcgccctgaacaagctgctcaacatcacgccaaaggacgccgccgcttccgtggtggacgatttcaacgacaaggggctggatgcgatccactaccacgcccccacggaaacgctctacctcctgcaaaccaagctgaaggaatccgagcagttcaagcaggatgaagcacaatcgttctgcaccggcatccggctgctgctgaagcaggatttcaccgggttcaatgggaacgtccacaaccgcaaggccgagatcgaaggcgcgctcgatgcgtgcagtcgcatcaaactggtcgtgccctacactggggacggtgtgtcgcagtcggccatcgatgcgctgcaagtgctgctggacgacgatgatctcgacgaagagcggctcgacaagcaggtggactactacgcggcagtcgacatcacccgcgacctgctggcggagcaagcctatccgccggttcataccgacatcgccttgcagaagcacgcgaaggtcgagaacccgcgcacgacgtactacggcatcgcccgtttgaccgacctggtcgcgctgcacaaggacaagggcaaggcgctgtacgagcgcaacatccgctacttcctcggcagcagccgatccgacgtcaacaaggccatcaagacgaccctgcgcgacgatcccggcagcttcttctacctcaacaacggcgtgacggcggtctgcgacgagattgagttgaagggaaagaaccccagcagtgggttccggaagttcaaggttcgtggcctgtcgatcatcaacggcgcgcagacggtcgcgtccgccgccgagttcgtggcccagcatccaggcagcaacatcgacgatgccaaggtgatgctcaccttgatcaaggccccggcggacggcccgttcggtaagcgcgtcaccaaggcgcgcaaccaccagaacccagtgcagacagcgaacttcgcttcgctggacgaaaaccaggagcggttgcggcaagaaatcgcgcatctcggcttcgcctaccactaccgtccggaagcctcggccaccggcctccaggctatttcgctcgacgaggcgctgcgcgcgctcgcctcgcgccaggacgatccgcgctacgcggtctggctcaaaagcgaaccggcgcggctggccaatccggaatccgccgaataccaggcgctgttcccggccaccctgaccggcgtggccctgctcaacgccgtgctgtgccaccgggccatccgcacgctggtggtcgactacgagcagaaggcggcggcgcgcagccaagaaaagctgatctaccgccacgccactcatgtcatcacggctgtgatgatgaagcgcctgcgccaacgcatcggcgcggcgacggtcatggacgccgcagcaattcccggcttgatcagccagccgctcgacgagttgcggcagcagaccttcgacctcgggcggcaacgcctgctcggcgaggggccactggcctacttccgcaatcagggcagcgtcgcctcgttcatggccgacctgatggaaacgcatttcgcgctgaccgccgatccaacgctacccactctgcgcaatatcgatactgcggcggatgcctatccgcgcaagcgcctgctcgactacttgtcgggcaaggccccccaactatga

SEQ ID NO: 353779 - DNA, 1719 bp, Pseudomonas aeruginosa
atgagcaagcaaaaactagaactgacatggatcggcaaggaaaagcgccccaagctggagccgcgcattctgctcgaagacccggacaagtcgtaccacgcccagcatcgcgttacagagaacgatatcttcgataacaggctgatcttcggagataacctgctggcgctgaaggctctcgagcaagatttctcggggaaggtgaagtgcgtgttcattgacccgccttacaacacaggcagcgcgttcaagcagtacgacgatggattagaacactccatttggctggggctgatgcgcgaccggctggagatcattcggcgattgctagcagatgatggttcgctgtggatcactattgacgacaacgaagcgcaatacctgaaggtgctgtgcgatgaggtgtttggacgagcttgtttcgtcacgacgtttatctggaaaaaggtagatagcccgaacgataacaaagtaccaatcacgccagatcacgagtatttgttgtgttttacgaaaactcctggatctcgcccattcagacagaaatacgatgattcgatattggcggcgtaccgtaagccagatgccgaatctgacagaccgtatcgcgaccgtctcttgaaaaagaacggcaagaatagccttcgctctgaccgtccgtcgatgttctttccattaaccgctcctgacggaacggaagtactgccgattcacgatgatggcagggaggcacgatgggcaatggggaaaacctctgttgaggatttgattgaaaaaaacgagttgatttggaaaaagcgcgaaaccggctggattccgtatacccgagagtttgcaccggatagtccatcgcggccttatccaacgatatggaatgacctcgacacaacacggcaaaccaaggcgcatcaaaagacattgtttggagaagatgtttttgatactccaaagccagaagacatgctgaagcgcatttttgatatgtctactaaccccggggatcttgtcctcgattcctttgctggctctggaaccactggcgcggtcgcgcacaagatgggccttcgctggatcatggtggaactgggagagcactgtcacacgcacatcattccgcgcctgcagaaagtcatcgccggtgaagacaaaggcggcgtcacggaaagcgtgaactggcaaggcggaggcggcttccgctactacagcctcgcgcccagcctgatcgtcaacgaccgctggggcaacccggtcatcaatcctgaatacaacgccgcgcaactagccgaagcgctggcgaaagtggaaggttttacctacgcaccctccgaggtgcagtggtggcagcacggccactccagcgagcgcgacttcatctacgttaccacgcagaacttgtctgccgaccagttgcaggcactctccgacgaagtgggttccgaccggagcctgctggtctgctgctctgccttccgaggcgtgacagcggcgaaggcggcagaacgctggccgaacctgaccttgaagaagattccgaagatggtgctggcccgctgcgaatggggccacgacgactacagcctcaacgtggcgaacctgccgatggccaagcccgatcccgttgatgcctcggcagccgccggagcgaacaagaaaaccaagagcaggaaagtgcccgctgcgcatttgaatcagggcggtctgtttggggagaacgagtaa

SEQ ID NO: 353780 - DNA, 2751 bp, Pseudomonas aeruginosa
atgaacagccgtgtcctgcacgccgtcaccggtcgtctgtcgctgcgcccgccgcaggaggaatctctcaaacgcttggttcgcgcgctcgaaacctcgcctgacctcttgggccatgagcgggatatcgccgccgttctttccacgctgaaggccgagttccccacgctggaggactttgagcgcgagtttccctcgctgtgcttcgcgctggccacgggcgtcggcaagacgcggttgatgggcgcgttcatcgcctatttgcatctggcgcatggcatcaacaacttcttcgtgctcgcgcccaacctgaccatctacaacaagctgatcacggacttcacacgcaacacgccgaagtacgtgttcaagggcattgccgagtttgcgcagcagccaccgctgatcatcaccggtgacaactacgaccagactggcgcagcggtggacgaccaaccgcagggtttcgcccacgacgtgcgcgtcaacatcttcaacatctccaagatcaactccgaagtgcgcggcggcaaggagccgcgcatcaagcggatgaaggaagtgctgggcgacagctacttcaaccacttggcgaacctgcccgatctggtgctgttgatggacgaatcgcaccgctaccgcgccagcgcgggcgtgcgtgccatcaacgagctgaagccgctgttcggcctggaagtaacggcgacgccgttcgtcgaaagcagcaaggggccggtgccgttcaagaacgtggtgatggactacccgctggcgcgggcgatggaggatggtttcgtcaaggagcctgcggttgtcacccaacgcaacttcaaggccagcgaccacacgccggaagaagtggagaagaccaagctggaagacggcgtgcgcttgcacgaaaccacgaaggtcgagctgctcacttatgcccgcgagaacggtgtcaagccggtgaagcccttcatgctcgtcatcgcacgcgacaccacgcacgctgcgagtcttttggcacttctggaatcggaagccttctacgaagggcgttacgcgggcaaggtgatccaggtcgattccagccgcaccggcgcggaagaggaagagatgatttcgcgcctgctggctgtggagagtgtggacgagccgaccgagatcgtgattcacgtcaacatgctcaaggagggctgggacgtgaccaacctctacaccatcgtgccgctgcgcgccgccaacgcgcgcacgctgatcgagcagagcatcgggcgcggcctgcgcctgccttatggcaagcgcaccggcgtggcggcggtggatcgcctgaacatcgttgcccacgacaagtttcaggagatcatcgacgaggccaaccgtggcgattcgccgattcgcctgaagcagatcatcctcgacgtgcccagtgccgacgacaagaaggtaagcgtgcaggtcggctccggtgctgcagcgcggcttggactggcggatgccgcgcccgcagttgatccagcctcggcggctgcctactctgactcggatggtggcgaggcaaaacccgcgccgacgccggtgttcaccaccgaggccgagaagcaagcggcgcgcgtggtgatcgaagtcatcggcaagctggagacgcagcgtgatctagtgccgaccagtggcgcactgctcacgcccgaggtgcagaaggtcattcaagcggaggtggcagaacgcctgaagccgatgcagggcaacctgctggcaggcgcggacgatgcggcaccggtgattgatctgaccaaagtggtagccaagaccaccgagatcgtggtgcaacagactatcgacatcccgcgcattgccgttgtacccaagggtgaggtcacgaccggctttcgcccgttcttgctggacgtgagccagcttcgcctgcaaccgggcgagcgcgagatcgtcggccagatgctgcgcaccaacgaacaatttgcgctggcggcggaaatcggcctgaaagaacagcgcccggaggactacatcgtccacgcgctggtggacttcgacgacatcgactacttcacccacgccgacctgctctatgacctggcgggccagatggtgcggcacctgcagagctacctctcggaatccgaggcggtcaacgtgctgaatgggcagcgcaagaccatcgcaaaggaaatccactcgcagatgatggcgcacttcttcgaggaagcgaccgagttcgaggtgcaggtcagtcgcggcttcacggaactgaaagcctgcaactacaccgctacggcgggacaagccccgcgccatttccgcgaaacggtggaggacgtgggccgcatcaagcagatgctgttcggcgggttcaccaagtgcctttacccattgcaaaagttcgactcggacaccgagcgccgcttcgccgtcatcctcgaacgcgacgcgaacaagtggttcaagcccgcgaagggacagttccagatctactacaagctcggcaccgagcagccggagtacgtgccggatttcgtggtggaaatggatgcgttcatcctgctggccgagaccaagaagcgcgacgatctgaaatcggatgaagtcgtcgccaaggctgcggcggcattgcgctggtgcaaatacgcttcagatcacgccagaaacgtcggtggcaagccgtggaaatacatcctggtgccacacgatgaaatcgcagagtcgaagcggctggccgatttcctgcggttcgaagtgaaggactga

SEQ ID NO: 353781 - DNA, 1755 bp, Pseudomonas aeruginosa
atgagccgtgcccagctgcgttttcaggttgattcccgactcgccacattgctgagtcaggaatacccgtcatcagagcgggcgttgaaggagctcgtcgataacgcgtgggatgccgacgccgagcacgtatctgtcactctcccgaagccactgagcggtggctccatcgtcattgaggacgatggaagcggtatgaccgaagaggagctgcggcggcattatttggccattgcatccgatcgccgctcacggcgcggagaacgtaccgccgggaagagccgcccggtcaagggcagaaaaggcatcggcaagttttctggcctcatggcggcggccaccatgatgctcgaaacgcgtgcgcgcggccgcctgtgccggatttcgctgcgcttggatgaccttgcgcgcgttgaagatatcgagcagttggatatcagcttgcacagcgaaccgtgcgcgcccgaactccacgggacaaccattacgctcaacgacttgcaccagggtttggcttacccggatgccaaccgcctacgccagatcctgttacaggattacggtcggcaggatgacttcgcgatcacggttgacgacaagcgtctggatgttgacgacgtatcagggcgttatgcagagcaggatcagtccttgccaaatgtgggcaaggtgaaactgcggttctctatcagcgatggcaagtcaggattgcgtcagcctggcattaccttgcgcgtggatggcaaggccgtggggcggccaggattctttggcttggatcaacgggatgacttcccgcgcaagttacttcgcaagctctacggcgaagtcgaggcggacggactgcgcgatcacatcactgctggttgggatgctgccgttgagaatagtgaacttttgaaggaggttgaggcatacgtccagcccattctccgggaggcgtatgagcagcagtaccggcaagagatccagcttgcacaggctcgactgcaaaaagcgatccttactcgactctcagcgctgccggaacacaaaagggtttttgcagatcgggcgatcaagaaaatcctcgacaagtattacggcgaaccggagagcaaggtcgagccggtggtgaatgtgttgctggaggcaatggaacgatccgattaccgtattcttcttgagcacattgcggaagcaacttcgagcgacgttgcagtggtggccgagcggctggatgagtttggcttggcagagatggcattcctggttcagcaagccgcagcgcgccaagtttttcttgatcaactggaactgcttgttcgtgacgcaacaactaccgaggccgtcttgcacaaagccctggaacgtaacttgtgggtgtttggtccggagtattccctgttcagctcaaacagcacattgcggcgacaagtggaagatgttcttgggaaggtctatacgggagacaaggccgacaaacgtcctgacctgcttctcaacgagaatctgagcggcaagtacttattgatcgaattcaaacggccaagccacgcgctgaatcacggtgattacgtacaggcaatcggctataggcatgaactgacaaagtacgttggctctgctgttcaggttttgttggtcggtggaggcaggtctgccgactttcctactggaaatcgtgagccggatgttgaggagcgaatctttggacagatcatctccacagcacggcgacagattgagtggctgctccggacggagagctcttga

SEQ ID NO: 353782 - DNA, 558 bp, Pseudomonas aeruginosa
atggaaaacatcactaagcaagaccgcatcacgctgaaagacctcagagtgtccgacttcgccagcgacgaaacgctgtgcttcaccgccattgtcgtgttcgacggcactcccattgccgaggcccacaacggcgggaacggcggttcgacattcctgcgtgcgctcgatggcaagaaggcgcttctggctcaggccgaagccttcgccaagggtctgccgcctgctccgctcgacctcggccaggagggcgaagaccctcactacatcgacatgacgctcgacttcctggtcgatgaactggccgaagccatgcacggggaacgcaagttgcgagccgcgttcaagcgcgacatcggcaacagggtgctgttcatcaaggacggcaaacttctgttcatcaagggcatcaagctcaaggccatcgcggaccgcaaggcgtacttcgcttcgctgcgcgctcggcagacccagcccatcatcatccttgccgagcttccgcccgagcaggcaattgacctgtggaagaagcatatcctgggcgacacgcccgactga

SEQ ID NO: 353783 - DNA, 159 bp, Pseudomonas aeruginosa
atggccgactcctttgccgccgacctcatggtcggcctgttacctgtgcaggaagcgagttccgatgcccgcttcgtcatggggcttgagtacttctcaccagttcgcgctactggtagccgtcgtgtgctcgatgtgcaaaaattcatcgatcgctag

SEQ ID NO: 353784 - DNA, 399 bp, Pseudomonas aeruginosa
atgcctgttctctttcgttccctcgcggcaggcgccgcacttgtcctggcatccgtcacggccttcgccgcaggcgaccatgaccatgctcatgatcacaagccgctacatggcggcgtcgtgaccgaagtccgggacgtggactacgagctggtcgttcagccagcgatggcgcaactctacctgcgcgatcacggcgagcaggttaatgtaagcaactccacagccaagctcacgctgttgaccggctcacaaaagcaggaggtgcaactcacgcctgccgcagacggaagtcgcctcgaaggcagcgggaccttcgctgcgaccaaggatacaaaggccgtcgtccaagtcgaacgcgagggcaatgtcacgggtgtccggttcgttctgccgtag

SEQ ID NO: 353785 - DNA, 552 bp, Pseudomonas aeruginosa
atgtcgcaatcctctttctggcgtgccgctgccttgtccagcctcctgcttggcagcagcgcaacgtgggccggcgacggccatgaccatggcgaagccgctcctgcccccgtggcggccgcgtttccgcgctttgccgcagtttccgatgacttcgaactggtgggtgtgctgaacggccagcgtctcacactctacctcgaccatgctgccgacaaccggccggtgaccgatggcgagctgaccctcgagctgggtggtcaacaggtaaaggtcagcccacacggggttggagagttcgaggccgatctgactgagccgctatccgatggcgagacctcaatcatggccactgttactgcgcagggccaatcggacctgttgacgggcgttctcgatgttcatagcgaagacgccgaacacgagcataccgccgcatccggccgcgtggtcgtactaggtggcggtgctgcagtcctcggcgtcggtgtcctagcgtgggcgctgcgcagacgtacacgcaccaacggtgcactgcgaggtgcagcatga

SEQ ID NO: 353786 - DNA, 261 bp, Pseudomonas aeruginosa
gtggtggacgggctgcgcgtcatcaacggcggcctgcaggccggtgagaagatcatcatcaagggcctcgtgcgccccggcatggcggtcacgccgcgcatggtgcccatgcaggcgcccgcggcaccggccgccggcgcggccggcgcgaccaaggctgcggcaaacgctccggctcccgctgcggcgcctgccaaggccggtggcgcggaccccgccaaggctgacggcgcggccggctcggcggaggcccgcaaatga

SEQ ID NO: 353787 - DNA, 360 bp, Pseudomonas aeruginosa
atgaccccggtgagttccagttggctgcggccgcgctggctgttcagccggcgcgcggcgaagacgctgctgtggacggcggtactcgttgccgctgccgtgggcgccaacatcgtcggcatctatctcgtcggcagcgtggccggctgggagcagtggctggcggccgcgtcgggctacttcctggtatggcggctgtgcttgtacggcgcgacggcctgcggatggatgtggatgcgccgccggctcctggcgcgcgagggcgacgacgcccaggcacggcgccgtctggtgcgcagcgagatcgccggcggcgtcgccatcgtggcgctggaaatcagcctgctgatgcagggctga

SEQ ID NO: 353788 - DNA, 198 bp, Pseudomonas aeruginosa
atgactgatgccgaaaacgaaatcctcacacttgaagaggtggcggtttacctcaaagcaggaaaaaggacggtctatcgcctggctcaaaagggagagattcccgcgttcaagctggggggaacctggcgcttctgtcgttctgatcttgagcgctggattgccgaaagcaccaacaagcagaagccgggggcttga

SEQ ID NO: 353789 - DNA, 2913 bp, Pseudomonas aeruginosa
ttgacgacgcagcaacctttgacgccgtatcaaagccagtacgtcgcgtggctgctcacccgtcgcgcggcgggcgacaccgttgaatcgctggcctcgacactggtcgattcgcaggtcgatctcaacccgcatcaggttgacgccgccctttttgcctgccgcaacccgctttcgcgtggcgtcatactggccgacgaagtgggtcttggcaaaaccatcgaggcaggcttggtgatttcacagcgctgggcggagagacggcgcaaggtgctcatcatcgtcccggccaacctgcgcaagcagtggcatcaggaactgcaggacaagttcagtctgcaggggctaatcctcgaagccaagagttacaacgcggcccgcaaacaggggcagcaggccccctttctgtcggaatccggcccgatcatctgctcctatcagttcgccaaggccaaggccaaagatatcaaggaaatcgagtgggacttggtcgtcttggacgaggcccatcgcctgcgcaacgtctacaagaccagcaacgtcatcgccaagacgctcaaggacgcaatggcgcacgtccattccaaggtgctgctcacggccacacccttgcagaactcgctggtggaactctatggtctcgtcagcattatcgatgatcgtgtattcggcgaccttgacagcttccgcgcgcaattcacctccagcgggcgcgatcaagccttcggagcattgcgcgaacggctggccaccgtctgcaaacgcaccctgcgcaagcaggtgcagccttacgtctcctacacggcgcgcaaggccatcgtgcaggaattcaccccgtcaaacgaggagcaggaactgtcccgcctcgtcgccgactacctgcgccgccccaacctgcaagcgctgccgcaaagccagcggcaactgatctccctcgtcttgtggaagctgctcgcgtccagcacgcacgccattgcgggcgcgctggaaacgatggccaagcgcctgcaaggcgtgctcgatgcatcgccggtggtcgatctgacggacgagctggacgaggactacgagtcgctcgatgaggttgctgacgaaagcggcgcagaggatttcgccgacggcgaggacgacccggcagcggatgcggccgggcctagccaagaggagcgcaccgccatctccaacgagatcgacgagctgcgccacttcaaaacgctggccaccagtatccgcgacaacgccaaaggcaaggcgctactcacggccttggacaaagcattcgccgaactgaatcggctgggcgcggccaagaaggccatcatcttcaccgaatccaggcgcacgcaggattacctactgagcctgctggcggacacgtcctacggcgacggcatcgtcctcttcaacggcaccaacagcgacgcccgcgcgcaggccatctacaaggactggctcaaacgccacgaaggcactgaccacatcaccggctccaagaccgccgacacgcgcgccgcactggtcgagcacttcaaggaacgcggcacggtgatgattgccaccgaagcgggcgcggaaggcatcaacctgcagttctgctcactggtcatcaactacgacctgccgtggaacccgcagcgcattgagcagcgcattgggcgctgccaccgctatgggcagaagcacgacgtggtagtggtcaacttcgtggatcgcagcaacgaggccgacgcccgcgtgtacgaactgctggagcagaaattccaactgttcgacggcgtgttcggggccagcgatgaagtgctgggcacgattggctccggcgtggactttgaacgccgcatcgctgacatctatcagaactgccgcaacccgagcgaaatcaaggccagcttcgaacagctccaactcgacctctccggcgagatcagcgaagcgatggtcaagacccgacagattttgctggagaacttcgatgaggaagtgcaggacaaactccgcgtccgcgccgaggacagccgcagcgcccgcagccgcttcgagcggatgctgatggacttgagtcgggcagagttgggcgattgcgccagcttcgatgacgacggctttcacctgtggcgcgcgccggatggcatcgaaggcagcagcattgaaggcatcgaactggggcgctacgaactgccacgccgctccggtgacgcgcacctgtaccgcatcaatcatccgctggcgctgtggatcgcgcagcaggccaagacccgcacgctcgatggggccaagctggtgttcgattatgaaggctatggcagcaaggtcagcaccctggagccgtatcgcggcaaggctggttggctcacgctcaagctgcttgtcgtcgaagccctgggcaatcaggagcagcatctcttggttgcagccaccactactgacggcgtgtcgctggacgaagaagacccggagaagctgctgcgcctgcccgcgaccacgcaggcagcgagcctgttcaataacgcaggcgacgccacgctggtagccaacgtggcaacccgcaagacggagctgctgcgcgacatcaaccaacgcaaccttggctacttcgagcaggaagtgcagaagttggacgcctgggccgatgacctgaaactcggccttgagcaagaaatcaaggagatcgaccgcgagatcaaggaagttcgccgcacggcagccacctcgcccacgctggaagaaaaactgtcatggcagaagaagcagcgcgaactggaaggcaagcgcagcaagctgcggcgggaactgttcaatcggcaggatgaggtcgaagcgcagcgcaacgacttgatcagtcagttggaggtgcagctccatcaacgggtggaagagcgcacgctgttcactatcgagtgggggctgacatga

SEQ ID NO: 353790 - DNA, 2139 bp, Pseudomonas aeruginosa
atgatcgaagccatgaacaaggcagaaccggctgtgttcgcgatcatggattactggacctttgacggctggcttgcactacgaaagcgcctcaaggacgaggacgcccccgtcctgaaaaaaaccgtccttccagggatcgaacttcggcttgccgcgccaatgaaggggcgactgaatgcacacgtactgttctcgaacgaggtcgatgaacaggtgctcagggatttcatatctgccttgcgcattgagttagtggacaggccactttccgagcctgcgttgagagagcttgccaggaaggtcggcgaggacaagttgaagcatcacggcttcaaaaaggccgatgtagatgcttccgacgagaaggctctgcttgctggggcggtgattgcggagatcaacgctgactcatacagggaagcgattcggaaggtcccgaacgagcacgcgattggccttatgccgtttgatacgaatgacggactggccgaggttgggtggcaagagcactacgcctatgccatgaacctctttcaaacttctccgatcttcgagacacgagacaccgacctgcgtggcgcatttgttggcgagcagacagccggcaacgccaagtggttcaagaattttcaagcaggtctgaataatattccgcgcttggcagtctcaggaagcgacgcccactgcttcgttggaacacctggcgacaacaacaagcggggctatggcgacttcccctccgggaaaaggacgtggatcaaagccgacccgacgttccacggcctcaagcaagccattcttgagccagcgaaacgctccttcattggtgacaagccgcccaaggttcaagaagtcgagtccaacaagaccttctacatcgagtcgatcgagatcaccaaaacaggggacaaggctggcgttgggcggtggctgcatggctgtgacatcctgctgaaccccgatcttgtcgccgttattgggaacaagggaagtggcaagagtgcattggcggatgtcatcgcgacgctcggcaactccaagcagtccaagcacttcagcttcttgaagagggatcgcttttggggcaagaccggcgagcccgctcgccacttcaccggaacgctaacctggcgagacgaaagcaccgagtccaggccgttgaatgagtcaccttcagaggagaaggccgagcttgttcgctacatcccgcagggctatttcgaagagctttgcaatgagcacgtatcgggtaagtcgaacgcatttgagaaagagctgaggtcagtgatcttctcccatgcgagcgaagaaatgaggcttggcgcactcgacttcgatcagttgaccgagcagcaggagcaatcgctcaggaaccgattgggtgaataccgcaaggaactgacatcgaccaacgcaaccatcgttcgcatcgaggagcagcttcaacccattgaactgaaaaaactcactgatctgctcctgctgaagagcaagcagatcgaggaacacgacaagctgaagcctgcggaggttgcggtgccgaccgaagctatgagccccgagcagaaacaagcggctgaaggcttggcggcagcaagtcaacaggtggacgctgccagaaagcgcagccaagagatcgctggcgagaccactgaactggccaaacgtcaaaaggccataggaaatattcgtgagcagttgagattgctgcaacgtgctttcgatcaagccgaaaaaaccgtctccgacgatctcaatcttcttggcttcgcttggtccgatcttgccgccatcgacatcaagaccgccgttctggaagaaaaatcgaccgagttggcgacgaagcaaggcgagataaagatcgaggctgaaaaactggcggaagtcctcaattccgccactgcaacccagcaaggtttcaccgcaaagttgaacgcgccgcaacagcaatatgaggcctaccagcgccagcttgcggaatggaacacgaagcgcgacgaactcatcggctcaatcaccgaccctgagaccaaggtcggcttggaaaccagaatcgagcagatcgaggagcttccgcagcagctcaaggttttggaagcgaggcgtttgcagttgtccggggaaatcttcgtgtag

SEQ ID NO: 353791 - DNA, 231 bp, Pseudomonas aeruginosa
atggcgcttgtcgaggagccgacgatttccacgcgaagcggtgaactggcctggttggtggactgcctggcgccgattttcgacggcctgcggcaaccggtcacggtggtcgacccctccggtcgcttcgtctactacaaccgtgccagcggcctgctcgatggtctcgacccgcagcgggcgttgggtatgcacctgttgcagagcgctccctggctggcggccgagtaa

SEQ ID NO: 353792 - DNA, 228 bp, Pseudomonas aeruginosa
atgggaaagatcagggtggttgagggaacgatccaggaaattggtcgggagaaggtgacggagggagaggactacgagatctcctttatcaaaattaatggagagcgtattagagatgtcggatgcgaaaaattcctccgcacgtttctaaaacttgacactacagtgaggatctcaattgccaagggttggtttgtagtggtcaacccatcccggacagtgggttga

SEQ ID NO: 353793 - DNA, 1023 bp, Pseudomonas aeruginosa
ttgactgatatattcctcatagaaagaatgctggaaaatgagttcgtaaactccaacaaccatgctaaggctgccgcattaatacgcgctttggacagctcgcagaaagacttgtcatctcaatacaactttctacagagcgtagtaaagagcgacactggaactgcgggaggagagtgcgagcgagtattttccgattttctaaaaaaatatttacccaaagatattgaaattatagtcggcggagtgattatccttgaaaatggagagtactcaccacagatcgatctcattatcacccaagacctgcccgagctactatccaagagctacgtgcctcatgagtatgtaatagcagcatttgaagtaaaacttacgcttgaaaaaagatatctaaaaaagattgctgatacagcattcaagctaaggcctttctcgcgcgaaggaaccccaagggaagttttgtttggcaggataatttatggagtattagctctctcgagcaacttatctggacctaaactgcgaacagaccaaaagacattagaaagcaatgagaaagagtgccaagcactgataaaagccataaagaactttgaaccacctgaacacccaagccaagcgatagatttatttctggttgcagattctttctttttaggctccacgaaaacaataaattattctgaaaaattcccaaacgaattcgaagatattacgctcaattacacttacaacctttcgcgcggcactgatttttccacagcaagtaatctcgccagaataatttctgcaccgcctagagatcaaactttgggagcctttctatatcacttcttcttaatgctacatagagaagatgtcataagttcaagatcgccggaagcattctctctgttcgaatcaagtatctcccaggggtgtcactcttggagcatggattcgttggggagtgattttaagcgagagtggaatgccaggattgaagatcaaagctttgaatggcaatccactcatatttga

SEQ ID NO: 353794 - DNA, 1713 bp, Pseudomonas aeruginosa
atgtcagcatcaccagcatcgcttaaagaaaagacctcttctaacgaagatattggtaataaacgtgacattactgagcgcgtagatggtcgtaggagcgatgaaattatcatcgcattttgcggtcccgtggggtgcaaccttaatgatgtaatacgtaccatccgtgctcaatttgatgaatatggttacaccactgaactcattaagattagtgaaataataaaatcacattttaatgagcacggccttcccgagggtggcgaaggtgaaaatcttgacactctgaaaggcagtaaacgctatctggccttgcaggatttaggtaaccatctccgcaataaatacgatcccaaaatacttgctgcacttgcaatggcaaaagtagcagcgactcgccagatccaccaagataaaaccggcgcgacgaagccgccgaaaacggtttatttcatagatcaactgaagcacccttcagaggttgagctattcaagttggtttatgggaatatattttatcttgtaggggttcttagcccccagtctgtaagattcaattatttgacaagagtcgagcagattcctgggcatgaggcgcagtatttaattgatcgtgatcgaaatgaattgcgcgaaaagtttggacagaaattagagaggactgttcagctggctgatttctttatcaggaacaatcaggacaatatttcgaacttacacaatccatgccaacgatttgtcgctctagtccatggtagaaatggcattacaccgacggcagatgagtctggtatgtatgcagcatattcagcatcattaaagtctgcctgtttgagtcggcaggttggtgctgctatcgcgaataaggatgggaacgtaatttcactaggttggaatgatgttccaaagtttggcggtggcttatacactgctgactcggttaatgatcagcgctgcatatatcacgggagaaagtgctacaacgatatacataagagtcgcctgatccaagatatagttaatattgtaagctcaaaggtctctgtgccccctgaggttcaggatgagctttctgagttaatacagaaagaaactagagcgggttcaattattgagttttccagagctatccatgctgagatggaggcgattttaggcttagctcgatcttccggaagctctactgattcctgtgtgctttataccacaacctttccttgtcataactgcgctagacatattattgctgccggaataagacgggttgtatatattgagccgtatgagaaaagtttagctcttgatctacatgaagatgcaatatcgactgatgagaatgtagctaacaaaacgcttttcgaaacgttctcaggggtatctcctcggaaatacgcagcattcttcttggccaaagggagtaggaaggatgacagcggtgaggctacggatctaataaagacagatgcgcgacatatcggggtcgagtatctggatccttatcagcgcatagaggataaggtggtggaagatataatgttgaagcttactatgctgcctaaagttggtggcggaatgagtgccgcgtcagagtccccagccctctccctaccgcatgcacagccagtaccgccccttccttcagccccgacggctccccccgctccgccgccgtctccagttcctccaacgtctgggcctggttcagcagcttga

SEQ ID NO: 353795 - DNA, 1119 bp, Pseudomonas aeruginosa
atgaatgaccagtatttcccgattgtccgtgccaagcaaggggagattgaagctttcgagaatttaaagcctgttgtacttggtcggtgtactccggtcttcgaggtgacaaagctcgatgggcaagatcttgaacgtgcgcgtaagcgttcagatacgccttatgaagattacctggactcacgcgctgctagcatcgcggggatatttaaaggtaagcatgtaatggtagatatctctcagtggcctaccgggttttcgactgaggggggagagcaagtactaagctatctgtgcaaccgtttaaatgtattgggggtaatttcctgcccggttatcgggtatgatcgctgggattctgttgagtacagggagatggtgaagagtatcagtctccccgcaaaagcgttcttctgcattcgcctcgatagtattgctcttgaggatttgggggaccctgaacactttgatgggattattgaagatatatcggcacaggtaaatattgtcgaaagtgaaacacctgtgcttgtggatattggcgatgtcactcagattccgatgcaggaggtcgttgagtatattgaaagtgcctacgcccatatgatgggtatgggtttcaagtatataattatggccggaagctccattcctgattctatagagaaggccgtaaaaaaagtagactcaaccggtttggttcagaggaaagagatgatcgcctggaagggattcatgtctgccaatcctaaagcctcactttactttggtgattatgggattcggaatcctcgggcctctgatgtaatcgctccagacatgaatgtgaagatcaggtacaccatcaataattcattcttcattgttcgtggacattcggttcgtaaagagggtgggtatgcgcagagccaggacttgtctcgcatactggtgcagtcaccatatttcctagacggttttagttggggtgacgacaagatccttgagtgcagccgaggggaaattgtcggaagctctacaaactggatctcgtttgatacgaaccatcacatttcaacggtggcgtcagaggttcgtgagtttgtttcggagctggaggtttctgtcgctcgcacctga

SEQ ID NO: 353796 - DNA, 1164 bp, Pseudomonas aeruginosa
ttggagtatttcaatgaggttaactctctcattgtccaatctcctaagctgggctcttccgagagcgatagactagagctgctttccgtgcttattgaggattacgaaaagcaaaaatatcctgtagaggctcctgatcctattgatgcgattatgtttaggatgagtgaaaaggggcttaagcaagcagatcttgttccgtattttggaacacgaagccgtgtttcagagattcttgctagaaaacggccattgacagttccaatgatcagggcattggctgtagggcttggcatatcagcagaaactctaatagggcttgatgaaatcggtcctagcagcaaaaagagcgaaatcgattgggggaaatttccaattaaagaaatggtcgcgcgtggttgggtagagagcgttaccaaagctaaaaaatctgtagaggaaattgtccaaggcttcatagctgatatggggctgcaagatggtagttttgcgtttcgaaggacactctcgggtgacgcacctacgccgacaaccaagtatgcactttatgcttggctcgcgagggttattcagaaggctagggatatatctgatcggctacctccatactctaaagagagagttggcgaagagttaataaagaatttggtccaattaagccgctttgaggatggaccgaagagagcagtgagtcttttaaatgagcatggaattgcggttgtttttgagcctcaactgaaaggcactatgctggatggggcggcacttaaagatcttggagatcggccaataattgcgatgactctccgctatgatcgactagataatttctggttcacaatagttcatgagcttgttcatgtatggaagcacatagacgacgtggatgaggcgatcctagatgatctggatcattccgcagatgataagcgagaggtcgaggcaaatagaatagcgagggactctttcattcctcgttctatgtggaaacgaactgacgcatatttaaaacctagcaaagaaagtatagtttccttagctaaagaacttaggattcaccctgcgatagtcgcgggcagggttaggaaggaagttgggaattacaatcaattctccgacttggttggtcaaggacttgtaagaaatcagttttacgatctttag

SEQ ID NO: 353797 - DNA, 177 bp, Pseudomonas aeruginosa
gtggcctccctggaagaggccatcgagtgggtcaagcgatgcccgaacccattcgacggcgaatccgagatcgagatccgccaggtcttcgaggccgaggacttcggcgaggagttcaccccggaactgcgcgagcgcgaggagcgtctgcgcgccgagctggaaaaacgcaactga

SEQ ID NO: 353798 - DNA, 510 bp, Pseudomonas aeruginosa
atgaacatcctctacgacgagcgtctggacggtccgctgccgcaggtggacaaggatggcctgctggccgagttgcgcctccgcctgcccgacctcgaactgctgcacgccgcggaagacctgcgtccctacgagtgcgacggactctcggcgtatcgctgcacgccgttgctggtggcattgccggaacgcatcgaacaggttcagggcctgctcgccctctgccatcggctgaaggtaccggtcgtggcgcgcggtgccggcaccggcctgtccggcggcgcgctgccgctggagaacggcgtgctgctggtgatggcgcgtttccggcggatcctcgagatcgatccgctgggtcgtttcgcccgggtccagcctggcgtgcgcaacctggcgatctcccaggccgctgcccctcatggtctgtactacgcaccggacccgtcctcgcagatcgcctgctccatcgcggcaacgtcgcggagaacgccggcggcgtgcattgcctga

SEQ ID NO: 353799 - DNA, 537 bp, Pseudomonas aeruginosa
atgcccagcaatgcgctctggcttcgcgccgaccaactgtccagcgtctcccccaccgtcctcgactggctgttcgacgaagggtcgctgacccggcgcctgaccgccctggccgacggcgcgttccgcgtcgaacccctgctggaaggctggcagaccctgcgcgacgacgaatgccaggggctcgacgtccctcccggcagtagcggctgggtccgcgaggtctacctgcatggccacgaccgtccctgggtgttcgcccgcagcgtggcggcgcgcagcgccctggaaggctcgggcttcgacctggcgctgctcggcacccgctcgctgggcgagttgctgttcagcgacagcgccttcgagcgcgggcccatcgaagtctgccgctatccggcggccggtctgcccgccgaggtccgcgccgagggtctctggggccgtcgctcacggttttcccgcggcgcgctcggggtgctggtggcggaggtgttcctaccgagcctgtgggaccaggcgggaatcgccgacgtataa

SEQ ID NO: 353800 - DNA, 753 bp, Pseudomonas aeruginosa
atgactacgaccgagcagcctctgccagatgagatccagagcgcattgcaggcacatgaatcagccaaagccgactacctcaacatgcgcgagagactggtcagcctcgccaggcgcatcgaaaagcatcggaagaccgctgatgccgcattagcagaagcgtcttcggcgggaggcatctggcggagtcagttccgcaagacagatggggagttgacgaaagaaatccgtgaccataagcgtaaggaggtagacgcccgcgaactggcagaggaataccgcaacctggccggcgagctgcgacctcagttcgaaatatgccagctcgacacctaccaggtgagagagagttacctgctggccaggcagagcgcttgctcgagctacaacagccactgccttgtagactcggccattgcgcttttcgcacatcaggaggcaagtatctttttcagcgcgctggtccgtaatggtctgatctccgctccctgcctgggcgaaaggcaatcggcctacgacaatgagcagttgctgcgccttggcaagacaatggcagccttgatccatcaggctggtgtttctgaaccaacaccagagagcagcgaccccgtgtggaatgccttgtcgcccatccactccctggcagaagaagatcttcctgaaccgttggccagcagcccaatgtccaggttccgcaggcacaaagagctgactgccttgctcgaagaggatcagtctcgactcgaggtctga

SEQ ID NO: 353801 - DNA, 1800 bp, Pseudomonas aeruginosa
gtgagcaaagccggggacaagaaagcggacttgagccttgtaggagagccgaaaacgcccgagccggataagctcgagcgcccgcgcttcgccgtctacgaccgggacacgctagtcgaagggaagctatatcgcgccgggacttggtatcacgcggtgaagaacagcggccccgacgaaaagccggtacctgtcgatcattggatctgcacaccactgcacgtcgaagccgagactgtgaacagcgaagacggcagtatcggccgccttctcagtttccagtaccgcggtcgccggatcgaatgggtcatgcccatggaactgctggcaggtaaaggtgatgaagtaatgcgtgccctgatgcgtcaggggctgaacatcgagtatcaccagcgccgacacctggcaccgtacctctcaagccaccatgagcccgagcgggtgatcgccacgaccaccaagccgggttggcatgagtccggcgtgttcgtgctgccctctcgtgtgataggcaccggcgatgtgcgttatcaggattccggccgcgctgtgaatctgtacaccaccaagggcacaccagccacctggcagaccgaagtggcggcctactgcctgggcaacccggtgctgatcctttcggtttgctgtgccctggccggcccgctgctggccaaggttggcgtgaacggcggcggtgttcatctggtcggcgactcctcaagcggcaagtcgctagcacaactgatcgcagcgtcggtgtggggcaacccgggcaccttcgcggcgtcctgggatgtgtctaagggcggagtagaaatcgaagcggcatcgcgtaacgacaccgtgctgattctcgacgagatcaagcgtgccgatcccaagcgcgtgcaggagatggcctatgcaatcgccaatggcgtaggcaaaagcaccatgacccgcgagcgggagggacgcgccaagctcacctggcgcgttctggcgctctccagtggtgagcgatcactatcagagcacgcagccatgggtggcaatggagcccatgccggcgccgagctacgccttgtcgacgtgaacgccggcactcgtcctttccgcgccttcgacaacgtgcacggcatgaccggccaggagttccaccgccgtctgaccgatgccgtgacgcagcactatggtcaccttgggccttcgttcgtcgagcacctactcgagccccccgggcaagagggtctgctcgagggcttccgccaggtgcgcgaaacattccgcaccgagagttctcaggccggcagggtcgcagatcgcttcgccatcatggcgctagccggtgaacacgcaatcgcccgcaagctgctgccgtggcctgcaggtacggctgccgatgcgtgccgccagttgttcagcgagtggctagccaggatgggcgatggcaacgccgaagatcgccagattctgcgcggcatcgccgacttcatcgccctgcatgccgatagtcgcttttcggacgtacgtgccgaacacgccaacatcaccgtgcgcgatcgagcgggttactacgaactgaacgacgacaagcgcctgtacctgtttaacgtaccggccctgctcgaggccgcggccgggtttggcaaagagcggatcatccgcgccctagttgctgccaatgcgctagccaagatggacgaggaaaccaagggcagccggcgcaccaagaagtaccgcacgccaggtggcgggagttcccggttttacgtgattgaccccgacctactggaaaacgaagtagaggggcaagcgtga

SEQ ID NO: 353802 - DNA, 1017 bp, Pseudomonas aeruginosa
atgcataaaccaagtatcccggagctaatccgtcaggctgccgtacatgccttgcatgcagtagaaacgctgctacctgagtggctcccggagggcacccgccaaggccgggagtgggtggctcgcaacaccacccgcggtgatcgccgcgccggctcttttggcgtatcactggactccggtcgatggaacgacttcgccgacgatacggcgcatggtggcgacctagtttcccttttgtcctacctacgcggctgccgccaagtggaagcggctcaagaaatagatcaacgcctttccctcggtctgttccgagcgatcttgtgcgatccacagcaagacgcgctacgccggcacgctgccgaaaaagcctgccaggaggtagagcgccgtacgcgcgaagcccgagagcggctacacgctcggcagcaacacgcagcccaacaggctgccgcactctggaggatggccaagcccgcagaccgactacaccaatacctgcaagccaagcaggtcaagccgtacatccttcgtcaattgagccaagggcgcctgctggtaccgctgtgctgcgctgggcaattggtgaacctgcaaatcgtcttgcccagcggtgaaaagcgatacctctccggcgggcaggtccaagggtgttactccccacttggcaagatcaccgagggctgccgcctctacgtatgtgaaggctgggcaaccggtgcaacgctccatgcttacaccggcagccctgtggtttgcgcgatgagcgccggcaacctcaagccggtggccatagcactgcgtgagcgatacggcgaagccctggatctggtcatcgctggtgacgacgaccgaaaaacgcagggcaacccaggccgcaccgcggccaatcgggccgccaatgccgcaaccgcccgcgtggtgtttccagagtggccggccggggcgccaaacaccctttccgacttcaacgatctgcacctgtggcgcagtcagcacagggagatactgccgtga

SEQ ID NO: 353803 - DNA, 279 bp, Pseudomonas aeruginosa
atgactaatctccacccactctccagtaatccggccaaatcagccgtcctgatggtcgacacgcagcagccctatctcgagttgcaggaaagcgcagaacaacgcctgagcgcggcccgcggcctcatgtatagccttacttgcatgaacatcggactggccgatgccaaagacctagccaacatggccgaggcggcatatctgctgctcgaggatgcccgagatctgttcagcgcagcgcgtaccgcagcggtcagggagggacgccaccatgcttga

SEQ ID NO: 353804 - DNA, 264 bp, Pseudomonas aeruginosa
atgtctgatctgcccaaggccatagcgctgctgattgtcgagttcatgaagatcagccaggagaacaaggttcccaaggtggctttgatccaagtccgtgatgcactggaacgcctgagcacggacccaagagaacgcactcatctgcgcaagcagatcgccctagcaaagttggacggaaaggcccatatcgaaaatgtgccgctgttcctgctggaagcccttctgccggaacatagccgtggagggtgccaggatgactaa

SEQ ID NO: 353805 - DNA, 249 bp, Pseudomonas aeruginosa
atgactgccctcaatccgtcgaaagtacgcgtcgccgcccaccgcgcgatggcccttgccgctctccgcagcaatgcctccctctccgttcgactcaatcgctataaccaccaccgtgccattcagcgcgccctcgaagctcggctcgatgccggcgactggctggaaagcctggagggtgatgcctgggcagatgcctgtgaagagatcgcggccgccctgaaagccggggaggtgcgccatggctaa

SEQ ID NO: 353806 - DNA, 243 bp, Pseudomonas aeruginosa
atgacctcagtaactctttcaataggcgaccaatcgatccgcttcgccctggacgaactgtccgacatcgaggcgctcgttcgagcagcagcacgccatcctggccgcgaactgttccgctcgagctccagcggacgcctcgcggcgattctgcaggaaacaccccctgcacaaaacagccgagccacgtcgaacagcttcagcgaaggtaacggtagcttcgtactgctgaccgactgctaa

SEQ ID NO: 353807 - DNA, 240 bp, Pseudomonas aeruginosa
atgacctcgggcaacaagcaggctaccacgcacgtcgtactgctacgcatgccagaagtgcagcaactcaccggcctggctcgccccaccatctacaagatgatccaacgcgacccaagctttcctcggccggtgaaactcaacgacagcggtgcgcgcaacgctcccgtagccttcgtgctgagtgaggttcaagcctggataaacaagcgcatagaagccagggggccgcgcgtatga

SEQ ID NO: 353808 - DNA, 327 bp, Pseudomonas aeruginosa
atgcccaatgtcgacaatcaccatcgcggtccaggaactcggcgacgctgcccggattgcggctcaccactcatcaagcgcagctccgcaagccagcacctgcttatgtcgaggacgtttctggtctgcaagaacgtggtgtgcggcgccaccttcgccggtaccgacgagatcactcatcgactgagcccccctagccggcctaatccagagatatgcctgccgtacgcgccgagtgcgatccgccgtggcgttctgcaggtactgggcttgccagcagaggacgaacagcctgccaccaccttcgacttggagagccggccatga

SEQ ID NO: 353809 - DNA, 222 bp, Pseudomonas aeruginosa
atgcatcccgacagcaccacagcacacactgaaaccctctggacgccagaacgcgcagcgcatgcgttgggcgtgtctatccgtacgctggcgtcgtggcgaagcaccggtcgccatgctctaccctacgtgaagatcggacgcctggtccgctatcgcgagcacgatgtacacgactggctgcaatcccatctccagcacaaagccggaggtgagcggtga

SEQ ID NO: 353810 - DNA, 876 bp, Pseudomonas aeruginosa
atgaccaactacgcattcaaggaatggctgaccttcgaagaagccgcagcttggctctctgacgcagcagggacatcattcaccgaggaagatatttcgagggcggcgaggcaaagccggttgcccgtccattactggccaaccgatgacgcacagttggggctgttccaccttcagctatcgccgggctcaggcgaagtcattgagtcatcggcgcatctggatctggcgggatgcaagttgctcagtctcatcgacggcccgattccgattcccaactatcagctatttcagacgtccgttaaacactgcggaacagggcgatggattgggatttcagccttccctgatgagccggaaccgtatggctgctatgaagtagccgatgacgatcaaccaagaagcttggggcgaggcagccatcaaattttggtgcatctttcggacctggagcgcttgtgcgacagcttgcccatgccgaacatcaccccccctcatgggctagcactgggcatcgctgagtttccatacaccaatcaggtgctctgtctggcgcgcagcacactgcactggagcaactaccctgatctagagttttcatcgcagcacacatcagcgggacaaagcaccacagttcctctgcttcgagctctaggttttgccactcaccttattgcccagcttggccaggaactggacgcactcgaatctctccccagcaagcgaaagagactcacccgcggcaatagtccgaacgtctctgcgatatccaaagcactgagcgaggtagccaaaggcctgcgccatgaagggcatggcatccagggtgacggcttccagaagctgctgagatccgctcttcgagaggtcgaatag

SEQ ID NO: 353811 - DNA, 1239 bp, Pseudomonas aeruginosa
gtgaaacggtcagagatcaagagaaggccgctcagcgacaccgttttggcaagcatcgaacccgaaacccgggaataccgcgagttggacggcagcgggctctacctgcgcgtgaagcctgatgggcaaaaatcctggcaactccgctacaaaaatcaggcggggaggtggagttggctcggcctaggcggctatccccaggtaagcggctcgctggcacgcaagaaagccgcggagctgcgcaaagagattgctcacggcgaagaccctatcgccaacaaaagggcgcgccaagccgcgcagctcgaggcagctacaaataccttcgaagtgctggcacgcgagtggatacagatccgcgcgccagggtgggaagacagcaccgcccgacgcaacatcggagccctcgagctacatgtctttccggtgttcggcaaacgcccctttgccgagatcacacccaagcagtggatggacttttttcaaacgatggagcgcaaaggcatcctcgagcagatgagtcgagtacgtcgcgcttgtaaggaaatctatgatctggcaagagtcaccggaagagctatccacaaccctgtagaagggctcaatcgtttcctgcagacgaagcccgccgagaactacgcccacgtcaccgcagatgaactgccagagctgttgcgggcgatcagcgcttatccccatgcccctgaccttcgactcggcctacggcttctgatgctcactggcgtgcggccgagtgagttacgcgaagccccctggtccgagttcgacctcgacaatgccctatggagcattccagccgagcgcatgaagaagagacgcgatcacctggtgcccctctcacgacaggcgttggaggtactacaagcgctccaggcccacaacggccgctatccgctgctcttccctggccgtagtgatcgcaagaaaccccgcagcaatatggccttcaatatggcactacgccgcatgggctacgacggtcgccaaactgctcatggattccgtcatatcgcatctacgacgctgcgcgaaaacaatttcccccgggagcatgtggaggcccaacttgctcacgtcgaaggcggcgtgtcgggagtctacaacaaggcaatttacctcgagcagcgcaggcagatgatgcagtggtatgcggaccatctggaccggcttgagcacggcaacatcgtagtggttgattttcaggggcagcagcaatga

SEQ ID NO: 353812 - DNA, 3768 bp, Pseudomonas aeruginosa
gtgcccagcaatgccacaccgagcaacagccacaagtatctgatcgagaccaacccggcgctcaccgagctgaagcagttcctcaactcggactacctgctcggtggtctgggtatcaatccggacgatagcaagaagcgcctgggtgacggtctatacgagcagcgcctggtacgcgaagcgatcgtccagcgtacggggcagcgcttcatcgccggattgaacagcgacgaagcgatgttccgctatctgatggacaacgccatcgccagcaaggacgtattgggactgacccctggcgtcaccctcagcgccgcccaggtggcggcgctgacccacgacatcgtttggctggaagaagtcgaggtgaatggcgaaaaggtcctcgcccccgtggtctacctggcccaggccgaggggcggttgggcccgaacggcgcgctgatccaggggcgcgacgtgaacctgatcaccggtggggacctgaggaacgccggtaccctgcgcgcgcagaacgacctcagcgcgacagccggcaacatcgacaacagcggcctgatcgaggccggcaaccgcctcgacctgctggccagcggctccatccgcaatgaccagggcggcatcattgccgggcgcgaggtaagcctctccgcccttaccggagacgtcatcaatgaacggacggtgacccagcaccagtcttcctacaggggaaccggtaccactgaggcatttgccgatagcgccgcgcgtatcgaggctgcgcagaagctgaccgtttcggcaggacgcgatgtagccaatattggcggtgtcatcgacagcaagggtgacctcgctttgcaaggcggcagggatgtcctggtttcggctgcggtagcggagcggggctggacggcaggaagccaggcataccagacccagacgacccagatgggcgccgaggtcgtggcgggacgcgacatcagcgtcagcgccggacgcgatatcagcgtcgtgggcagccgcatcgacgctcgtcgcgacgtgacattcgaggcgggtcgcgatgtgggcctggtcgcggctgccaacgaagagcatgcctatggcaagaccaagaaggtcactttccaggacgacaagatcacccagcaggccactcgcgtggacgctggcggcgacctagcgatcaatgccggacaggacctgcggctggtcgcgagccaggccagcgccggcgacgaagcctacctggtggccggcgacaagctggagctgctggccgcgaacgacagcagttactacctctacgacaagaagagcaaaggcagcttcggtagcaagaagacccggcgcgacgaaatcaccgatgtgacggcagtgggcagccaaatatccagcggcggcgacctcaccctgctcagtggcggcgaccagacctaccagggtgcgaagctggaatcgggcaacgacctggccatcgtcagcggcggcgcggtgaccttcgaggcggtaaaggacctgcaccaggaaagccacgagaagagcaagggcgacctggcgtggcagtcgtcgaagggcaagggccagaccgacgaaaccgtgcgccagagccagatcgtggcccaggggaatctggcgatcaaggccgtggaagggctgaagatcgacctcaagcacatcgaccagaagaccgtgagccagaccatcgacgcgatggtgcaggcggatccgcaactggcctggctgaagcagatggagcagcgcggcgatgtggattggcggcgcgtgcaggaactgcatgacagctggaagtacagcaactccgggctgggcgtcggcgcgcagttggcgatagcgattgtcgtgacttacttcacggcgggtgcggcgagtgcggcattgggatcgatggcgggtgtgggggcgggctcaggaagcatgatggctgctgccggtagcactgcaatggtccaggccggtacagcagtaggaacagctgccgccggctgggcgaatgccgctggaactgccgtggctatgggcatggccagcaatggagcgatcagcaccatcaacaaccggggaaacctgggggatgtcgtcaaggacgtgacctccagcgatgcgctgaggggctatgtagtcgctggcacgactgcggggctgactgccggcgtctacgacaaatggacctcgacccagaccggcacctcgaccgctctaccgaacaccggggccgtggcgcccgccgcagggttgggcacctggcaaggtgtgggccagttcacctcgaaccagttgctgcagaatggcacttcggtgctgttggaccgggcgctgggcggcaagggcagcctgggcgatgcgttgcaaaacagcctggcaaatgccttcgcggcctacggcttcaagctgattggcgacaccacccatggcgtactggacgacggcagcctcggcaagatcggcttgcacgccctgatgggaggtctggccgccgaagcggtcggtggcgatttccgtaccggagccctggctgcgggagtcaacgaggcgctggtggatagcctcgccaagcaatacgccagcctgcccatcgatgacaagaagggcctgctgatcatgagttcgcagttgatcggcgtgctggcggcttcgacgcagggcgatgcggacgccaagagcttgcagacgggagcctgggtggcggggaatgctactcagtacaacttcctcaaccatgtggaaaatgaggagcgttggaagtcccaaaaggcctgccaaggaggagacgaggccgcctgtgggcgtgcggatgcttgggataagttggaccgcgaccgagatctagccttgatgactgcctgctctacgggcggacaggcatcgacttgtagtgcattgcgtcaagaagcctggaaggctgctcaaagcctcaagcaggccagttggagcccggaagcgagggaacaatacgcgcaagtcatgcaaaatccggaattgcgtgcttacacgattgagtcagagcttcgaagcatcaatcaggtaaataatcctattaccgctggagattcaaagcgcctcgctaaagctttggccagttttggatccgacttcgtccccgtctacggtgacacaaaagcattttctgaagctcaagacccctttgactatgcaatggcaggggtgggactggttcctggtgctggagatgcggcacagaaagtattgagcaaggcgaaaaagctcttccaagaagggaaggtggcagagtctgctgatttagtagagggattaacaaaaggggtaaaaaacagtagcgctgcaaaaggatttattcctgcagaaaggactgggcttaattttgaagagaaggtaaaaaataaggccggagggtatgttgatgttgagttgtctgctaggcagaagtttgataagtcaggtgttgtagtagatagtaaattcgcccaaagcgatctagttgctcgttactcgcccgatgggaatctgtatatagattggtatggcactactgtgtctgggaagggagttggtagcgagatgatttctagagcaattgaggcagtaggagcaaataaggttaagacggtttcggcgcagttaggaaaagacaatcttgatgcttttaaagctgggtcttcgagagggctttccaaggagcaggcagtatggaatactccactaggtaagacaatgaactctttaggttttacggaagttgaggttcatggggcaagtgttaaatttcttcatttagagtga

SEQ ID NO: 353813 - DNA, 1071 bp, Pseudomonas aeruginosa
atgctgttctccttcaatatttccgtcagtcccgagtgggttcgccgtgccgctatctgggggctggtcgtgttgggagggttcttctgctaccagttcctgctttcctatctcgcggccttcgtcagcggactccgtgagttgaatcccagggttttgctcagcggcttttccaacgtccggaccatggggcagttccaggccatgctgctgccgctgatggctgcgctggggttgtacctgcgagagaccgggcggttcaggctgtcctggcttgtcatgctgctgctggccatccagtggtgcatctccttcgccttggctgggcgcgggctctggttgggtttcgccgtcgcgcatctcgcgctttgctgggtcggccccgtggggcgccgattcttgatcgtccagttgtccgcggtattcgtcggactggcgctctatttcctgctaatggttgccttgccgacctggctcggtatcgacatgaccctcatgtccggtatgcgcagtggtctgtctctgcgcgacgtgttgtggcgagatgcctggggcatgttcgtagcccatcctttgcttggggtcgggcccatgcatttttcggcggtgccgaatagcgtcggtgcccacccgcaccagatgctgctgcaatggttcgccgaatggggtggggtcgctggccttctggtggttgggctgatgatccttggtctgcttcgcggcgcgcgttacctgcgtgaacagggcgatccgatggatgccggactgtggctggccctcgtttcggtcctggtcctggcccaggtggacggcgtgttcgtcatgcccttcacccagaccgtattggccttgctggtaggcatcgccatggcacgctggtcgaagccggtcgcgccgtcccccgcacagcgctggctctgtcggggcctggctgtcgttgtcattgtcgtgctggggcgcgtgctgctgctcgaggtgccggggctgaccgcggccgaggagcgctacctggaaatccacggcggcggtgaggcgccacgtttctggattcagggttggattcccatgtga

SEQ ID NO: 353814 - DNA, 627 bp, Pseudomonas aeruginosa
  misc_feature (161)..(161): n is a, c, g, or t
  misc_feature (345)..(345): n is a, c, g, or t
atggacagagtgttcgctttctttaggcgtagtcgttgcctaatcgcgttggttgtcatcgtgctattagtttttttcggatggccgtggttcaagaccttcaacccgacaccgtctgacgaagagttgattgattttttctatgaaaacaggccagcaanagaggctcttgtcgatttctatagaaaaggcggtgagattcccagaaaagaatggaacgtactacggcgtaagtcaggggtagggcatgtgggtactacaggcctttggatcggagacgatccctatgtcgatggcaagccagcatttgataaatacctgaagcttcctgcgtcggaaaggatnaagaaaagtagagcattaagtgggctcagtgtgatcccagcagataagcgatatatgaatattctattctccgtaagtaaagagctgtttcatattccaaagccggtcaagatagaaggtggaaggctagtatttcctgagcatactgggcgagggggggaggatacttacagattactaccttcgctcaataaatttcctgatccgtggaaggatggagactgtgtttttcgacaaatagagagcgaatggtttatctccatgtgtcatctttctatttaa

SEQ ID NO: 353815 - DNA, 627 bp, Pseudomonas aeruginosa
atggacagagtgttcgctttctttaggcgtagtcgttgcctaatcgcgttggttgtcatcgtgctattagtttttttcggatggccgtggttcaagaccttcaacccgacaccgtctgacgaagagttgattgattttttctatgaaaacaggccagcaatagaggctcttgtcgatttctatagaaaaggcggtgagattcccagcaaagaatggaacgtactacggcgtaagtcaggggtagggcatgtgggtactacaggcctttggatcggagacgatccctatgtcgatggcaagccagcatttgataaatacctgaagcttcctgcgtcggaaaggataaagaaaagtagagcattaagtgggctcagtgtgatcccagcagataagcgatatatgaatattctattctccgtaagtaaagagctgtttcatattccaaagccggtcaagatagaaggtggaaggctagtatttcctgagcatactgggcgagggggggaggatacttacagattactaccttcgctcaataaatttcctgatccgtggaaggatggagactgtgtttttcgacaaatagagagcgaatggtttatctccatgtgtcatctttctatttaa

SEQ ID NO: 353816 - DNA, 1836 bp, Pseudomonas aeruginosa
gtgaccttcgaggcggtgaaggacctgcaccaggagagccatgagaagagcaagggcgacctggcgtggaacagcgccaaggggaaggggcagaccgatgaaacgcttcggcagacccagatcgtcgctcagggaaatctggcgatcaaagcagcggacgggctgaagatcgatgtgaagcatatcgaccagaagaccgtttccgagaccatcgatgtcatggtcaaggccgatccgagcctcgcctggttgcgggaggccgaaaaacagggtgacgtcgattggcgcaaagtccgggaagtacatgacagcttcaagtacagccattcggggttgggcgctggcgcggcattggccatcgccattgtggttacctacctgacctggggtgcgggtagttcgatggcaggcgtcgcggccaaaagcgcaacaggtgtcgctgccaactccgtcgccagtgccgtagccaccaacgcggcgatcagcacggtgaataaccgcggcaaccttggcgcggtggcgaaagacgtgacctccagcgacagcctgaagggctacgcggtcgccggtatcagcggcggcttcatgcccagcagtctgggtgcccagcttgccgttcgctccgcgctgaacaccgtggtgaacggtggcaagttcagggacaacgtcgcgcaagctgccatcagtatggcggcggacgcgttaagcggcgcgatcttcgacaaggtcggagatgcgttggtcggcagcggccttcccaagaaggtagcggtccatgcgattgtcggcgggttgatcggcgaggctgccggcggcgatttccgtaccgcagccctggctgctggcgccaacgaggcattggtaagcctcgtcggtgaaaagatcttccctggcgaggctcatgagcgcgtgctggcgatgacctcgcagttgatagggatgacagtggctgcggcggccggaggcgataccaaggcccaagagaaagccgcctgggtggctcagcaggccacggtgtacaacaacctgaatcacgcggcggcggagagcctgctcaaggagatcaaggattgtcgcgcggcaggcggctgtggcgaggagaagttgcaaggcatcctcggcaagtacgaaaagctgtcggccgagcgttcaaacgctatcggccagtgtgcttcgcgccagtgtgtggacgacatcgtcgacagttcgatccggatggacgatccggtttccaaagagctgctcagcctactgcggcaaaccacctacgatacacccggcttgttgcagggcaatcctgatgcgatcgtgtcgcagacgccgaatccaagtggctggggagatctctttgccctggacaagcaactggcgttcgccaagaacctcaaggaaggctggctgacaccggaggaaacggctgatctggatcgctggaatgcgtccacttcctggctggatcgcactgctggccgacaactggatcccaaggagaaggcttacctgctctcggagctggggggcgcggcggctatggcgcttcttggggggagggggagtgttgggagtggagcaggtggaataaggaacacatattcttcaataaaagaggctcctaaatacccccagggatttaaagatattaagaatggtacgcagaaatataagattaacaatcaagatgttttggaaagtttgagaggtgtagagccaggtaagtgggttaaggtgtatagggatggtttcgattctgctgggaataaaatttctgtacactactttcaaagtcaaagtggcaaagtttttgatgtgaaggttaaatcgggttggagtaactga

SEQ ID NO: 353817 - DNA, 954 bp, Pseudomonas aeruginosa
atgaccgatgacgggcagcgccatgccggcgacgtcggtcacgcggggaatggcgctgccgttatccagggtggacagcaggcgctgatagctcgacgtcaggtcttcgctttcgtcggggcgctgttccaggacaggacgcccccggtacatcgtcgccggcatcacctcgggccaactgctgggttccatcacaaggaacgacacccgcgcagactgcgcggtatcggtcagccgggtcagcgtgggctgttcggtcagctgcgcggtgcgcactgggtacagtcgcgagccagttccccacgcggcctggacgggccgcaccaggtccaggccgctggcggtcaccgtcttgacctcgacgacctcgtaagtaaaagcgtcctcgccgcgcagcatcgccagaccgccgtcgcggaagtcgaggccggccgtgtcgcacggaatgctcagcgacccggccgccagcggctggtggagcagctggatatcaggccagatcggcagcgcccaaatgcgcgcaccccagccgaacagcgtcatgtccagcaactgccgctcgcgatccaccgcgtacatgttcgcttcgaactctcggcgcggcgccaggcgcatggctcggcgctgggtcacggccgattcgctttgcaggatatttgtcgatgcgctcaggcgttcgacgatgctgtcgccccagtccggcgcgaacgtccaggcgatgatgcgattgccagtgatgaccagggccaggtccggctcgccctggagcctccagatgatccgggcattgactacgggcgggccgtcggtgccaatgctgaccgtccaggtgcgttcctccagggcggcaaaacccagcggcggcgaagcctggccggacagcgtaatgccgtctgcggcttcgcggtcgatagcggtcagcatgcgcgggctgaaataagcgttccagactga

SEQ ID NO: 353818 - DNA, 561 bp, Pseudomonas aeruginosa; identical to SEQ ID NO: 164717

SEQ ID NO: 353819 - DNA, 285 bp, Pseudomonas aeruginosa
atgatcggtggcttgctccagatcgctccatcgaacttatatcaaattctttacttcttctggattatctcgcgcaatccaatcaccaactccaagagacaatacgaggaaatgcacctaactgatcggtcaaacaagcgcccacaccagccatggcctcgccagttcagacacctgtcgaaaatttgtcgaaatcaatggcacgaagagctacggagtgaaacatctaaacagcgagaacagtggcattggaacgtatcggaacgcttcaaaaccctgttttag

SEQ ID NO: 353820 - DNA, 345 bp, Pseudomonas aeruginosa; identical to SEQ ID NO: 340096

SEQ ID NO: 353821 - DNA, 573 bp, Pseudomonas aeruginosa
gtgggcttcttcgagctgaaccgcaacccggacaactacttcgccgaggtcgagcaggctgccttcagcccggccaacgtagtgcctggtatcggtttctctccggacaagatgctccaggggcgcctgttctcctacggcgatgcccatcgctatcgtctgggcgtcaaccaccaccagatcccggtgaatgcggcacgttgcccgcaccaggtctatcaccgcgatggaggtatgcgagtggatggtaataacgctctattacgtgtcacctacgagccgaacagcttcaaccagtggcaggagcaacctgacttctccgagccgccgctgagcttggagggcgcggcggaccactggaaccatcgagtggacgacgactactacagccagccggcggcactgttccgtctgttcaccgacgaacagaagctgcgcttgttcaacaacattgccgaagacatccgtaacgtaccagaacagattaagctccgacaattatctctattttctaaggttgacttggagtatgggatgggtgttgctgatgcacttaatgtcaaagttagatag

SEQ ID NO: 353822 - DNA, 1119 bp, Pseudomonas aeruginosa; identical to SEQ ID NO: 327829

SEQ ID NO: 353823 - DNA, 150 bp, Pseudomonas aeruginosa
atgtccgcacgcgactataccaccgcggcaagcctgccgctgcacctggcgcgagatccgcgctatcgcgacctagtgcgccaatttgccgagcagcaatgcttgacggcctggcacggcatcctgcgcatgatcggggaggcagcctga

SEQ ID NO: 353824 - DNA, 291 bp, Pseudomonas aeruginosa; identical to SEQ ID NO: 352824

SEQ ID NO: 353825 - DNA, 165 bp, Pseudomonas aeruginosa
atgagtcgccatacgtccagcccagccgagcagctgctgggcctgctgttcggtgctggcgccgccctggtggcaggcctggccctcctctaccgcctcgccgccacttggctgcaggagatccacaacgcgcaggagggcgccgacgatgacgaccgccgttga

SEQ ID NO: 353826 - DNA, 924 bp, Pseudomonas aeruginosa; identical to SEQ ID NO: 352828

SEQ ID NO: 353827 - DNA, 603 bp, Pseudomonas aeruginosa; identical to SEQ ID NO: 352823

SEQ ID NO: 353828 - DNA, 147 bp, Pseudomonas aeruginosa; identical to SEQ ID NO: 352822

SEQ ID NO: 353829 - DNA, 366 bp, Pseudomonas aeruginosa
atgaagaaaagcaccaagattgtgctcggccttggcgccgtggcgatcgctatcggcgcatacaaagacctctcgggccgagagaccaacgggctggccaacgcccacaaggcggccggctacgaccccgcgtgcgaaaccctgcagaccgacggcgagacctgggcgctgtgctcgatcggccgcagcgcaccggccgtatggctgcagcgcggcgaggcctgggcgaccggcaacggcgtggctcaggttgtggccaagcgcctcgaagagcgcggccctggcccctaccagcacctgccgcgcctgtacgtcgaccgcgaacagcccgtcatcatgccggcgctggtgcgcgccaagctgtag

SEQ ID NO: 353830 - DNA, 288 bp, Pseudomonas aeruginosa; identical to SEQ ID NO: 352831

SEQ ID NO: 353831 - DNA, 279 bp, Pseudomonas aeruginosa
atgattaagagcttccagcacaagggccttcgggtcttctacgaaaccgggtcgaccaaaggcatccgggccgaccatgccaagcgcctggcccgcgtgctgccctttctggatcgcgccgccgctccggcagacgtggatttcccgggctggcggcttcatcagctgaaaggtgacatggccggctattggtcgatcaccatcagcggtaattggcgggttgtcttccgcttcgtcggcaccgacgtagagctggtcgattacctggactatcactga

SEQ ID NO: 353832 - DNA, 1020 bp, Pseudomonas aeruginosa
atggccatcggatacaccccggcggtggagatctacggcgccaacgcggcgctgattaacgcgcgcctggtcgattgggagcacgtcgacgccgccggcatcgagtcggacaccctcaagctgacggtgaacatcgagggcctcgaggggctgcccagcgtcgacggcaagatcggcctgcgcgtgggctacaaggaaacgggcttggtcgacaagggcgagttcgtcgtcacgcgcaccacgccccagctgttcccggccctgctgctgatcgtggccaccgcggcgccgttcaaggtgaaggacgagaccggcttcaaggccaggcgctcggccagctacgccatgaccacgctcggccagatcttccgccagctgaccaccaagcacggcttctcgccgcgcgtggcggccgagctggacgcgatcccgatcgttcacgtcgaccagtcgaacgaaacggacatgggctttctgacgcgcctcgcgcggcgttacgacgccgtgacgaagccggtcaacgacctgtatgtgctggcccgtcgcggccaggtcaagtcgctgagcggcaagccgctgcccccggtcaccctctcggtgacgaaggacaaccggccgggcgatcgcgcgttcatcgcggcgagcatcgaccaggacagccgggttcgcttcaagggctgcaagaccacctggtgggacggcagcgccggcaaggaatgcgtggtggaggtgggcgaggcgcccttcaagacggtgcgccagcgctaccaggacgaagccgaggcgaaggccgcggccgagggtgagcaccgcaagacgaagcgcgaggcggcgaagctgcgggtcgactgcccgggcaatccggctttcggtgctgaggggctgctcgagctcgacgacagctggcccagcttcatgcgcggcacctggtcgatcgacaaggtgactgccagcggatcccgccagcagagctaccgctgcacccttgaggcgtcctaccccgacgggcggcaagagtga

SEQ ID NO: 353833 - DNA, 213 bp, Pseudomonas aeruginosa; identical to SEQ ID NO: 352832

SEQ ID NO: 353834 - DNA, 390 bp, Pseudomonas aeruginosa
atgcgacagcagatggcgctgggcgagttcgttttcgggctcgcgaccggcttcccgtatgagcgcctctcgcgcaagaccacgggcggctgggtagatctggacatcatcagcagcaagccgatgtcgcacaacaccggccagggcctggagtccctgcgcctgagcggcaaggcccagctgggcgccggcatggccaagctcgacgagctgcgcgccatggccgacgcgcgccagccctacaccctggtcgacggaatcggccgggtgtggggccgctggcgaatcgacgccgtcaacgaagaccaggagcgggtgatcgacgacggcaccgccacgctgctgtcgtggacgctcgagctgcaggagttcgtcaatgcgacgggttag

SEQ ID NO: 353835 - DNA, 2559 bp, Pseudomonas aeruginosa
atggctgacaccaagtcgaagtactcgctgcggctggctgccgtggacgcctactcgaagacgttcggcgacttctcgaagaaagccgagcagctgcaggacgagatcaaggggcagcgcgccgaactcgacaagctgaaccgcgccgcccggtctgccgacggctacaccaagctgaccgagaagctcgacaagaccaaggcctccctgcaggcggccagggtcgagcaggccagcctggccaagacgcaccaggccgccaccgccacggtggcgcgcctcgagcaggagtatggccaggcggcggccacgctcaaggcgctggaaggcgccgaagcggccagcaccgcccaggtcaaggcggcccgcgtcgagcagaaccggctcggccgcgagctggccagcgccacggccgaggtcaagcgcctggacaacgcccaggacaagaacaccgccagcctgcgcaccctggaagcggcgcagcgggccgagcggaatcagctcaagggcctgcaggccgagctgaccaaggccggagtagacaccagtcagctggccgccgagcagaagcgcctcgagacggccacggaacaggccaacgcggccctgcaggcgcagcgcgcacggctcgaagccgtgagcagcgcccaggggcgtatcgacgcgaatcggggcgctcgtgcggatctgcgcgggcagatgctcgagaccgccgccatcggctacctggccgccaagccggtagaccaggcgatgaacctcgaagtggccatggccgacgtggccaaggtcatcaacttcgaggagggccagcgcgaagcgatggcgcaggagaacctgcgcatggccagcgatcggctgatctcctcggccggcatcaccgcggtggatctcgccaagatccagtacgccgcgggccagtccaacatcggcggcgacgagaagaccagcgagggcaagcagcgcgcggtgatggagttcacccgcgatgcggcgatcatgggcgcggcgttcgacatcgacgcccagacggccggcgagaccatggccggctggcgggcctcgatgaagctcgaccgggccggcacgctcgacctggccaacgccaccaaccacctggggaaccagttcaacgccaccccggccgacattgcggcggtggtgaagcgctacggcgcgatcggtagcgcctcggggctgagccccgagcagagcgcggccctgtcgacggcgtttctcaacccgggcaccgagaaggaaatcgccggtaccggctttaagaacttcctcggcgccctgaccaagggcggcgccgccaccaagggccagcgcgagacctgggacgccctgggcttcgatcccgaggagctggccaggggcatgcagcagaacgcgccggagacgatccggtcggtgctgcaggcgctcaagcaacagcccgaggaggagcagaacgcgcttgccacccaactgttcggctccgaatctatcggcgccatcatgccgctgctgggcaacctcgaggaggtcgaccgggccttcgcggcggtggccaacggcgccgaccgcgccggctcgatgatgaaagaggccgagggcgtggccagcacctcgcgcgccggctggaacggattcgtggccaagctgacgcgactctcgaccctggtcggtaccgccatgctgccggccctggaagccgttctggtgcccctgggcgccctggtcgacggcctgagctgggcggccgagaccttccccagcgtgacggcggccattgcggtggccggcggcgcgctggcggcgatgaaggtcggcgcgctcggcctcaagttcgccggcctgctggtcggccaggccttcaacaaggccgggctggctcgggccaagctcgacgccaccaccgcccgcacggcggtgaccgccgacggcgcggtcatgcgcctgaacgcggccatggcccgcctgggcgctggcggcggggtcggcgacctgggcgggcgcggtggtcgcggagggcgaggcggccggggcggtcgcctcggtcgcggcctgggcatgaaaggcggcggcgcgctgatgctggcggccggcgctgtggatctcgcccaggtggtgatggatgacgaatcgaccggcgaggactacggcgagtcgatcggctcgaccgcgggcggcatgggcggcatgtgggccggtgctgctgcaggcgctgcgctgggctctgtggtgcccgtcatcggtaccgctatcggcgggatcctcggcggcgccctgggcgcctggctgggcagcgaggccggcggcgccctgggcggcgtggctggatccgcggtcgatcgcctgcgcagccccgacgaggttgccgcggcggtgaccaacgccgacaaccggcagatcaccttcgcgccccagatccaagtcaacggcgccgaccaggcgaccagcgaggcgctggccaaccaggtgatggcgagaatgcgcggcgagttcgtgccgctgatgatggccgacccgctcgccgtgcggcgcggggcggcgctgacagatgggagtgactga

SEQ ID NO: 353836 - DNA, 129 bp, Pseudomonas aeruginosa; identical to SEQ ID NO: 352833

SEQ ID NO: 353837 - DNA, 507 bp, Pseudomonas aeruginosa; identical to SEQ ID NO: 352834

SEQ ID NO: 353838 - DNA, 1167 bp, Pseudomonas aeruginosa
atggccgaggtaaccaatttcgagcacaacggcgtctccgtcgagacgaccgaatccccggaggccatgggcggcctgggcgacaacgtcgtgggcctggtcggtaccgcgcccaaggctgacgccagcgtgccgcgcaacgcccctttccgcatcaacagcttctccctggccgcgctgctggatccgaccggcaccgaggccggctcgctgtatcacaccgtccaccagatcctgaaagtggtgaaggtgccggtctatgtgatcgtggtcgaggagggcgcaaccccggccgacaccctcaacaacgtgatcggcggcgtcgacgcgacgtcgggccaggtgaccggcctcggcgccctggcgctgtgcgctgaggtgccgaccatcatcggcgccccgggcttctccgacgcccaggcggtgcatagcgagctggccagcctgggcaagcggatccgcgcgcgggtggtcttcgacggcctggacaccgacgtggccggccaggtggtcaacagccaggcaatcggcggcgccgcgctgggctacgaccgctgctacatggttcaccagatgccggcggtctactccaaggcggccaaggccaacgtgttcctgccgccctcgagcctggccattgccgccatggccgcggtcaagcagtgggagagcccgggcaaccaggtgacctacgcggccgacgtctcgcgctctgtcgagtacaacatcctcgacaagtcgaccgagggcgacctgctcaaccgctacggcgtcagctactacgcccgcaccaccctgggcggcttctcgctgctgggcaaccgctcgatcaccggcaagttcatctcctacgtgggcctcgaggacgcgatcacccgcaagctggtgaaggcggcccagaaggtcatggccaagaacctgaccaagaccttcatggagcaggaggtcaagcggatcaacgactggattcagaccctggtggccgacgagaccatcccgggcggcaaggtgtatctgcaccccgagctgaacagcgtcgagaagtacaagaacggcacctggtacctgtgcatcgactacggccgctacgcgccaaacgagcacatgatttaccagctcaatgcgtctgacgcgatcatcgaagagtttctggaggacgttctctga

SEQ ID NO: 353839 - DNA, 201 bp, Pseudomonas aeruginosa
atggcagaccgcaagaactacaccgtgctcgtgccctaccccaagggcggcggccactggacgcgcaagggcgacaaggtcgacctgctcgaggtcgaggccctggccctgcgccaggccggccgcatcaagctgacagccgagctcgaggccgaacaggccgcgccggctaccaccaagaaaaccaccgctaaggactga

SEQ ID NO: 353840 - DNA, 267 bp, Pseudomonas aeruginosa
gtgtataagagacagtggtggggtcgcgaggaggtggaagatgacccgggcaagggtggcgtgcgcttcctgatggcccgcgctggcctgctgtggcgcttctacggcctgtattgggtctggcagtggagtgccagccgcgccctggtggtgcagctgggcttcaagcctgagccgtccgactggcttgaggactaccaggccgacccgactcgcgagtggaagggcttcacgttcgagatcaaccccatcaaggcgatcggctga

SEQ ID NO: 353841 - DNA, 339 bp, Pseudomonas aeruginosa
atgcagtattacagcaccgggggacagtggggcgcactgaacaagccgctgaactgcatcacgaccaaggatcgcttggccctggtcactgtcgttctgcagggaacgccttatgtcatcgtggatatcagcctgcggatgttgcagccgcatgagctgtacgccgcccagggcttcccggccaactacatcatcgatcggggccacgatggcaagccgttgaccaagacgcagcaagtcagaatggttgggaattcggtctgcccgccagtgctggcggccctggcaagggctaacgatccttggaagtatcaagagccggagaggctggccgcctag

SEQ ID NO: 353842 - DNA, 264 bp, Pseudomonas aeruginosa
atgaccaccaccgaacgcttggcccgcctggaaaccgctcaagaagtgctcggcttcctgatggcggctcgctctgagctgatccacaacgagggcaagaaagcccagcccgatgcgacgaagatcgagcagtgggaagctgaacgaaatgagctgttcgaccttgaggacggcctgcgcctggatgacccggccggcatcgaacgcatcattgcgacctatgggccacaggcccgccagatgttcagcgcccgcgcgcactga

SEQ ID NO: 353843 - DNA, 1245 bp, Pseudomonas aeruginosa
atgtccaacccgtttcagctcagccaggaagaacacgacgccatctatcgcctcatcgaagcgcggtatctacccaagagccagccccaggagcagcccacggcgatcatcaccggggggcaaccaggctccggcaagtctggcatcaccacccaggccaagagcgaattagccgagcgcggtggctatgttctgatcgatgccgacaagctgcgcaccttctcaccgttgtaccgggccgccctggaggcggacgaccgcgaagcggccaacctgacccaccccgacgccggccgctggtcgcagcgcctgacagttgccggcgcccaggggcgccgcaatctcatcatcgaccaaacgtccaaggacgccgcatctgttgagaacttggcaggtcagctcaaggacgccggataccgcgtcgagctgcgcgtcatggcagtcaacgagcgcatcagcgagcagcgcattcatacccgctacgagcagcagaaggccatccaggggcacggccgtttttccacgaagaacaatcacgacctcgcctatgccggcgtggccaaggccgtggagacggtagagcagaaccgcagcgtggacgcgctctacctctacgacaagaaccaccagcgcatcagcgagaacaccctgcaagatggcgagtggacgcggccgatgacggccgcgcctaccatgcaggccgagcggcaccgcccgctcaccctggacgaacgccaggaactggccgagcaatacgaccgcctggcggccatgctcgaaacgccggagcgggccgccacggcggccgagcgcgaaacgctgtcagcgctgcgcgcttccgctcaccatgacctagaagccgtcgcatcgaaggtcgccgagttcaagcaggcggccaactacagcaacgaccgcgacccgatggattcgattatccgcagggggaccatgatcgaggtcggactacgacaccaggacctgcagaaggctcccaccaccgagcgcctgcaacaggtcgcccgggccgacctgcaggacttcaactacctggccggcaagccggagcagttggacgtcgccctggccatgcggcccttgatgggcgatcccgactatcgcgcggcagtcctgcaagatgcccccgagggattcacctcgaccctcgacgccgcccagctcgccgccgaagagctgcagggcctgaaaggccccgagctggagcaggaccccggtttcgagccctag

SEQ ID NO: 353844 - DNA, 219 bp, Pseudomonas aeruginosa
atggccgcttacactgtgacttggactattgacgtagaggtcgaaggggaccacaaggacgccgcgcagcacgtcgccgaccactacttccacgcccgcatcgcggcaggcgagcagggcagcgcctgcgcgttcgtcgtgaccggcccggacaacgccccggccgatatcgacctagctgatagcctgtcggacttggagggcgacgataccctctga

SEQ ID NO: 353845 - DNA, 450 bp, Pseudomonas aeruginosa
atgactatcagcatcggtgaaaagctcgaaaccgtcatcgtcagccgtgcaaccggcgcgcacggtgagtacctcggcagcagcgcgggggtgtggggcatggccaaggtcgagggcatgaccttcaaggtcgacagcttctccgagttcggcgccttcaatgtcacccatgtcgaaagcggcaacgtcgaaaccatcgaggaccgctacgaaatcccgctggccgtggatcgcttggcgatgcgcgcgaaagccgccgatcaggcgcacgccctggatgcgttgcaacgtgccggctacaaagccaagggcttcggcgaggccatccgcgttatcgacccgaactacaccatgaacggcggcagccgccgcccgggcgcggacattgtgacgctgcgcggtaatgacttggccggtcaggttcgccgcttcctcgacgtgcgttcgtag

SEQ ID NO: 353846 - DNA, 231 bp, Pseudomonas aeruginosa
atgactgccacggcctggcgggctctgctcgccctggttctgctctgcaccggcctggccggttgcagctcgcaggcctctaacccgtacctcaatgcaagccagactttccgcaccaacggcgaggccttcggcgtgccggtgtccggttccgtgcgcgtcggcctgagcaatggcgcgctctacattcaacctggcgtcaacatgcgccaaatccgtttcgggaggtag

SEQ ID NO: 353847 - DNA, 225 bp, Pseudomonas aeruginosa
atgaatcgactgttacagacccgccaggagctgcggaatcagctcagaacgtccgttgcgtactcccacgggcgacgtgtgtttgatgcggtggttttcgagctggtcggcgccgatggcttaaaggtcaagcgaaccatcgcggtgctcaccggcctggatcaggaaggggtgcccgctgaattcggaaaaaatcgtacgctaaggttttccgggcaatcgtag

SEQ ID NO: 353848 - DNA, 786 bp, Pseudomonas aeruginosa
atgaaaaaactcgctgttgtgaaccagaagggcggcgtcggcaaaagcaccgtctgcgaccagaccagccgcgcagcggtagaagccggcaagcgcgtcctgctggtggacctcgacccgcaaggaagcctgagcatcgcattcccgccgaccggcgagcaccagggcgaggcttcgaccgcctccgcgctgttcgccgaaggctcgaccatcatccccgaagtcctcaagcccgggctggccatcatccgcaaggacgagctgctgcggaagctgagcgcggacaaccgcgacggcctcaagcgtccggcgcgctatctgcgcgagctggcagccgattatgacctttgcatcatcgacacccccggcgccctcggcgacaacgtaccgaccacgaccgccgcgctgatcgctgccgacgccgtggtctgccccttcgccgtaggtctgttcgaggccgagccgctgtcgcagttgtggatgcacctgcagcagatcatttcgggcggcacgaatccgcggctgcgcgtgctgggcttgattccgtcgaaggtgaacatcaagagcgccgaagagctgggcgccctggacaacctgcgggctcacccgcatgtggggaaattcattctccccgtcatcctcggcgagcgcgctgccgtgaaacagtcgattgcgaaacgtaagccggtatggcgtggagtcaggggcgaaggccacaagagcgcggccgccgagtggaaaaccgcgacccacaccatcctgtccaacctgggagtagtgaaatga

SEQ ID NO: 353849 - DNA, 1350 bp, Pseudomonas aeruginosa
atgagcaaagccaacgccgccaagaaagagaaaggcgccgccttcggcaacctgggcgacatgatgggcatggacggcatgagcagcgtcctgtccgccgtcagcgatgcaggccgcccctccttcgccatcgtccaccggagcgatatcaaggtctacgcgcagcagcgcaacaaggacgaactggaaaccgaagaacagaccttggacgagctgggcgcagatatgcgccagaagggcatcctgcagccgctcatcctctgcgaaaacgaggatggcccggagccgtggcgtctggttgccggcgaacgtcgctaccacggatcggacattgccgatattcacgacctgccatccatgtgctacggcaagctcaccgaacagcagatcaaggatatccagctcgcggagaacatccaccggctgaacctgtcgcagctcaacgaggccaaggtgctgaaaaaccgcctcgatgacgagttcggcggcgacgttgaagccctctgcacggcgatcagcaaaagcaggtcctgggtgtccaagcgcttggccctgctggaaatgcccgagcagacccagcgcctggtgcgcgaaggcatcaccgccgatatcgaggttatcaaccaggtcaggaccatcgagaagatcaacccggaagcagccgaggagacggtcaataccctcaagaatgagaaaggccagaagggcgcgaacgcccgcgaaaccgtcaaggccgccaaggacaaggtgaagccgccgaaggcgccgaggaaggacaagaacgctccgaccaacccggagaacgtcgccaccccgcgcgacgagtcgcacaaagaaaacgggccggtcaatgacgtacccccggcgaccctggcaaacgacccggccctgcaggcgctgcaggaacagttcgcccagggcgcagcccaggaagagcaggccgagcaggacagcgaccgcctgccgtgggaagagcccgaagcgaccggcaccgagtccacccaggaacccgagcgcgagccgctggacaccagcaaggttcctgccctgcccccggtccagtcgctggccaacgcctacgctgcgatctacgagaaaggcgcagacgttaaaggggttctgtcggccatgccggaggaagagcgcgatggcgtcgagaactggctgaacagcttctatgatgcgggcgtagactgcgaaaacctggcccttgcagtggtccagggcctgcgcaatggttcgttcgccaccgagggccacggcgcctttgccctggtcgcgttcctcagcggcggcgaggaaggcgtcaagttcaacctactcaacatcatgggcaccgtgaaagcgtga

SEQ ID NO: 353850 - DNA, 369 bp, Pseudomonas aeruginosa
atgccgaaagcacccaccccggccgacctcggccagggcataaagactactacccccgtagaagccgaacgccggcagaagggccaacgtggcaaggacaaggtgaagcgtgccaagagccggacgatgaccgccgtgcagtttgaagcagtgcggccgttcctcagaatctcggaagagcggatcgaggcggccaggcaggcgatggttgaagagaagaagttcactgagatagccgaggcgttcggctggaagagcaggcagagcgttgaccgcgctgtcggcatcgtgtgggaagagttccagaagtacgaggaatcgcaggccgccgtggcgtccgcgaagaagaagcccaaggcagggcaataa

SEQ ID NO: 353851 - DNA, 1149 bp, Pseudomonas aeruginosa
atgacagatcagaccgcagagcaggggcagctagacctcaacgcgcagcgccgcgaagtcatcagcgactacacccgtgcccggaccccggcatgggttaaagaggtgatcgaggcccaccttgccattgaagccgaggacgcgaagagtgccggcgccttgggcttcatgacccgcgccctggtcattgcgaccatgccctacaaagacccgaaaacggacgttttcacgcgcaagaacggcgatatctcgctgcgcatcatcgctggctattcgggcggtatcccctacggcgtttatccccggctgctgatggcatggataacgaccgaggccgttcgcacgcgctcgcgcgtggtcgagctgggcgactcgctgtcctacttcctgcgcgaggtgctggaagttcagcgcggcggtggccagcgcggtagcagcacgcgcgtggccgagcagatgaaaaggctgtttggctcaatggtcaacgtctcgtcctcggccgagagcactggccgccgtttcaagctgaaaaacgtcaccatcgccgacgatgcggagttcgacgccgccgacttcgattttgagcgaccacggcccaaccccctcgggctggtcgggccagatggccagccgctgcgcgacccggccatgcccctggaccttggcgacactgccctgcagctcccgcccgatccgcctgccggcgagagcgacaccatgctatggacgccgcaggccacggacacggccggggcctggcgcagctatgtgaagctgacgcagaacttctacgacgagtgcattgaccggcccgtgcccattgacatgcgggcatacagagcgctgcgccgggcacccctggccatggatatctacacctggctcacgtatcggatgttctacgtgaacaaaaagacgcgcccgatcccgtgggaggccctgatgggccagttcggcagcaactactccagcccgcgcgcggtgctggacttcaagaaaggattcctgaaagccctcaagctggtactggtgacgtaccccaatgcgcgaatcgaggtcacggacaagggcctggtcttgttgccctcccccacccatgtacctcgccagtatttcgcccagggcgaactgaccttcgggggccagtga

SEQ ID NO: 353852 - DNA, 213 bp, Pseudomonas aeruginosa
atggagcatcaggaaacgtcgctgcgcgtggcctacgcgctgcattccagctcaccaggcgcatggggctgggaagtcaccagccgcgagggctacggctggggaaccgcaccaactgaggccgaggcgatccttgacgggctcgcctacctgcagcgcgttgcgcagctcattcgcctggaggcctccccccgcgaccaggcgctgcgatag

SEQ ID NO: 353853 - DNA, 1968 bp, Pseudomonas aeruginosa
atgacctacatgaccgcgacctattcgccggaagacaacaagctgcgcctgtatgcctcggcgcgcctggatgaagaaacctacgcccgcgtcagtgcggccggcttcaagttcgccccaaagcaagacctgttcgttgcccccatgtggacgccctcgcgtgctgacctgctggtcgagctgtgcggcgaaatcggcgacgaggaaaccagcctggccgagcgtgccgaggaacgcgccgaccgtttcggcgactaccaggacaagcgcctggctgatgctcaccgcgcccgcgaaggcgtggcggccattgccgacaatatcccattcggccagccgatccttgttggccaccacagcgagcgccgtgcccggaaggacgccgagcgcatcgagaacggcatgcgccgtgccgtgcaaatgtgggataccgctgaatactggcagcgccgcgctgccggcgcgctgcgtaatgccatgtacaaggagcgccccgacgttcggcaccgccgaatcaagcgcctggaggccgacaagcgcaagagtgagcgcagcaagcaagaagcggaaatgtggctgaaactctggcttgagtgtgaggccgagaaggacaccgagctgcagaaaggcgtcgccctgcgcatcgctggcatgtgctggcttcgcctgccgcgcaaggaaggcgaccgcgaggattttgcccacagcccgagcgcatatgacgccctgaataacacccatccgagcctgtacgcgccgcgttccctggccgaggtgatcgagcacgccaagcgcgtctatccccgccagatcgcctatgcagagcgctggattgcccactatgacctccgcattggctacgagcgcgccatgctcggcgaagttggcggcctggccgccgagcaattcaacatcgagccgggcggccgtgtgctgattggcggcgagtggctggttgtggtgcgcctcaacaagcgcgacggccaggctgtcagcgtgaccaccaacgcccgctatgtccgggttcgtggcatcgaagaggtgaaggactaccgcgcgccaagtgccgaggatgccgccaagattgccaaggcgaagaagctgccgccgctgtgcaactaccccggcgacggctttattgagctgaccgccgagcagtggaagcgtaaggccgcggactacaagtccacccgcgtagtcgaggccagcgagaagcacggcgcccaccgttgccgtatggccgtggtgcccggcacgggctggaagctcgcccaggtctacatcaccgaccagaagcgcaccgacccgcctgcaccggcagcagccaccgaggcggccgcgcctgtcaccttcgcccgcgaactggctgcgccggcgccgacagcgccgcgcaaggctgaggcgaaccccgagcgcgagcagttccaggccatgcgcgaccaactgaaaaccggcgtgcgtgtcgtcagcgcgcctcagcttttcccaacgccggcacccctggcccgtcgcatggtcgagctggccgagctggaggaagggcaggacgtgctagagccgagtttcggcactcagagtctgttgcgtgccatccgcacccacggccctgtctgcaacgtcacaggcgtggaaatcaaccgcgcgcttgccctggagcagccgattgtctgcgcggatcgcgttatctgcggcgacttccttgcgtgcgacgagctgggccagttcgaccggattctgatgaatcccccattcgccaatgcccaggacgttgcgcacatcactcgcgccctgtccttgctcaagccgggcggccgcctggtggccatctgcgcgaacggcccccgccaagctgaggcccttcgaccgctggtcgaagcccacggcggcgaatgggagtcgctacccccggaaaccttcaccgactccggcacccaggttcacacagccctcatcaccctgaccgtgtga

SEQ ID NO: 353854 - DNA, 651 bp, Pseudomonas aeruginosa
atgggtgagcggtgcaaagaccggcgaggccacggcgaaggaaccgcccttcggccaggccgtcacggtgcgcaacggattgcggacgctctgcacgctgtccgagctggaccaattggcgattggcacaatgaagggatcggcattgttgagcacgtacttgacgcagcccttggcgatccggcgcagggtcgcctctgccagcggtttcgcgcgcgcgaaaatggattggctggggatgctccagtcaatgcactcggcggctccgcgccagggcgattgccacggcttcgggttctccgcgtgggtcggctcgggccagacgatggggcgcccgtcgcaacgggcaatcatgaacaggcgtttacgggtggtcgggacgccgtagtcacatgcgcgcaggacacgccattcaacgacatagccgaggccccgcaactgctcgacaaagcggcgccaagtctcgcccttcctcgccggatcggggatcagatattgctggctgactggcacctgctcgccaggtgcggcgacgtgctgtttcaacttccctttcgcattgggaaccagcttgatgacgcggccggtagccttgtcccgcttggcgatgagcggcgcccagtccaatatttgggacacattctcaagtga

SEQ ID NO: 353855 - DNA, 1203 bp, Pseudomonas aeruginosa
atggagcagtcccccgtcaattccgtgaatcccgacgttcgcgcgcggatcatcagtgccatcgaagagctgtacgaccagctcggccgtggcgaccagttcccgaccgtgagtgacgttagggcgcgggccagggccgacatgaatacctgttccacggtgttccgggagtggaagcgtcagcagacggccaagccggcgccggtcgccgttgacgtgcccgaaccagtgaaggcggcccacatcgaggcagtcggcatcgtctggaatgccgcccaggaacaagcgaacgcgagcctccgtgaggccgaagccaaatgggagttggagcgtggcgacaacgagacgatgcggcgcgagctggccgacgcctacgaaggggctgtgtccgaggccgaccaagcgcgcagcgccctcggcgaggcgctgcgggccaaagactcgctcacccagcagaaccagcagctcgcccagcagctcgccgaggcgcgcgagggcctggcccagcaaacgaccagggcggacgagaacgaacgccgcgcggacgacctgaaagacgagctgcgtgttgcacatgacgagactgccgctgtgcggcaggagctgtcacaggcacgcctcacccatctggccgagctggaccagcagaaaggcgtcgccgccgaacagatcgagaggctgaacgagagcctggccacgaccagggcacgcctggaagcggccaatgagcagtccgaagggcgccaaacggccctgtcggatgcgctggccaagctcgcgcaggcacaggcgcaggccgatgcggcgaacgacgagctgcagcgcgtgcgcacggccctggatagcaagcagcaacaggccgagggcctgttgcagcaactggcccaggccgaagcgcaagccggcacagctaccgccgagttggagcgcgttcgcgcttcgctcgccgagacgaagctgcaggccgaaggcctgcagcaacaggctgccaccatcggtgcccagctcaccgagctgcagcgctcgcataccgccctgcaggcggatgccgagaagtcgcgccaggttgccgacgagagttcccgcgagctggccaggaccgcgggcgtcctgcaggaggtgcaacggcagaacaacgagctgatggcgcgcctgagccccgcgaagggccgtcagcagaagtccggtgacgacaaggcctga

SEQ ID NO: 353856 - DNA, 258 bp, Pseudomonas aeruginosa
atggcagagcccgcgcaaaccagcgacaagattttcatcggcctacgcctcacccgcgagcgggagaggctgggcctcggcgtgtcggaggtcgcgcggatcgcgcagtgcagccgccgaatctggcaatactacgagcaagggcgctgcgcgcccggctccatcgttctcggcctgctggacgcggccgggttcgatgttgtctacatcgtcgccggccgtgtcggccggccccttgtgaaggagcgcaactcatga

SEQ ID NO: 353857 - DNA, 300 bp, Pseudomonas aeruginosa
atgactgcaatctgcgtaattcaggttgacggcgtggagatagcccgtggccccgtaagctggacttttggcttgttcgagcacatcacagaccagcctggccacgctgggtatgacctgaatggcatcgagaagctgctaggccgaccgtatgtgccgactccagggcaagaggtagagtttgtaagtgacgaaggcgtggcgctcgccagcggctcggtgcctgaaccaaaccaccaccagaacgcaaccccttggcctttggccgaagcgattgcagcgaaggccgccagtgcctga

SEQ ID NO: 353858 - DNA, 822 bp, Pseudomonas aeruginosa
atggcggtctcgcgtccgcgtccccgaatacgcaaccacgccatcgttcagaatctgcgaagtggagtaggtgtaaaccgggtcctgaggcatgtcggcgttgacagtgatctggctaccatcccagaacgccaacccatgaaagattgcggcgaggtcctgaagaacggcatacgcctcctcttgcttctgaagatagaggttgcaagtgaaccgaggctcttgaccgcctttcccgtctggcaccaactggtcgcagtactgggaaatccggtacatctcccaacggtctaccatccaggccttgatgcgcttacccacaccgaagcgatcgttggtcacgatgtcgtaggtgtgccagaccgggttgtcggtccaggcctgtttcatcgtgccgtcccagatgccgaggtaggcccgggtctccggatcgtagttgctcggcacttggaccttccgcccgcggcagtcgactgtgacagccggaatgttgctgaactgctctgcgctgaactcgacgtacagcagcgccgtgttcgggtagcgcagcttcgcgtcgatcacctcggtgtagccggcgatcagcatggtgtcggcgatacggttgttgttctggttcggcgtcaggcgccgcacgcgcaactgccagccactggtggccgccggcaggtcgatccggcgggagcgctcgtaacgggtggtggtcttgccatcgacggcctcgcgcagcacctcctgataggcgccgccgtcggtggacagatctacggcgtattcgatccggtacccgccgatgttgccgttggtgtcctgctgttgtag

SEQ ID NO: 353859 - DNA, 963 bp, Pseudomonas aeruginosa
ttggttgccggcgccggccagttgcgtcagcgcactggcagcttgggctaccgttgcattccctgctccgacctgctgcgcgtagaccgagagttggccggcagtggttccggcggcgttgccgttcttgaccaaggcgttggtgaggcgcgacgactccaccgagccttggtagaacgccagcgccagcgcaccggcggcggcggcggcgatggtgtaggggtttaccagtccagcgatgtagcccccgacggcgcgcgcagccggcccgattccaccgaacatgtccttgagttggccgccctgctggagcagcaccgtcaagggagcctggccagacgacaggccgacaacgatgtccgtgatctgagcgggcagcatccgcatgttcgccgacagcgctttggccgacatcccagtgcggttcatgctgccctcggcgtcgccgagggcattgcgcattgccttcagccgctcggtgtactccgccaccgtctcagcatcgaccaggcgcaggtttttgtagcgggtgagccgttgctgcatgtcgtcgaggcggtcgagcgccgcgacagtgggattgatctgccccagcaggcgcgccaggccggcgcgttctgcgtcgaggtcactcgcggcttcgcgcgcgccgcgtcccgcacggctggtggactggtccagattctgggtctcgtccgctgcccgcgacatgttcgccgcgatgcgcgacaactgcgcgtttatcgcgctctggccctgggaaaacgtgctgaacgtcgacaccaggtgcgacatctgggtgttcaactgtccaagttgcgcgttcgactgggtgatgccggtgtcgagccgaccgataccctggcccaccgacgacatggcgttttccagggcgacagcgcgggagacaagcgccgtcatctgcgaactggtcgactccgtcgcacgctcgatgcgcgatag

SEQ ID NO: 353860 - DNA, 198 bp, Pseudomonas aeruginosa
  misc_feature (183)..(192): n is a, c, g, or t
gtgagtgttctggaacttacgccgccgcactccgtcgaggcggagcaaggggtactcggcggtctgatgctggacaacgcggcatgggacattgtcggcgatcaactgcagaaggaggacttcttccggcatgagcatcggctgatattcaccgccatcagcgagttggccgcgaaggacgcnnnnnnnnnntcgtga

SEQ ID NO: 353861 - DNA, 621 bp, Pseudomonas aeruginosa
  misc_feature (509)..(518): n is a, c, g, or t
atgagccgtccacgcctggtcaaccgtacctccgcgactccctcgacgcttctgcagcgggctatcttcgacggctacgacttcggcttgaagatcccctacatcgcaggcagcaaccgcgcgctgctcgaactgtccggcttcttcatcagcgcccgggagcatccgttgcaccgctactggcgggtccccaagggcaagttgctgcccgaactggactcgctgtacaaccgactcgccgagctcgttggaggcctccactcacagtcctggcgggacttcagcggcatggtcgaatctgcacaggcctcgcttgaccgacaggccttcacctggggtttgctgctgcgcatcgcgccgctggccgagggcggcgtcttgctgtcaggcgagttccatcccggtgtggtggcggtggctcggcggatgcgcggggtgttcctgcgcccatcgagctcctggcgcatcgacgccacacctgagctgctccgcagcaacctgatcctggnnnnnnnnnnctggagcttggcctcgccgaagaacaattcgagatactggataccgtccaggagctgctcagcgacggtagcttcgcgccggcaaccgagctgcccagcatga

SEQ ID NO: 353862 - DNA, 186 bp, Pseudomonas aeruginosa
atgtctttccagatcctcctccaactcgcgcgccttgcgtacgaacgccaacggcgccgcaccactgtcgtccgccaacagcgcatcggttacgcgctccaactggcgctcgatctcggcaacgcctttttgcgcctcgaccaggcgcggccgcagatcctcgccggccgacgtcggctcaagtag

SEQ ID NO: 353863 - DNA, 297 bp, Pseudomonas aeruginosa
atgagcaagcgattttccgccccgctgccggcgggctacgtctgcccgagcaccggccgcgttgccgtgctggtgtcggcctacgaggccagcgacctgaacggggatgcgtgggcgtatgacttcaatcaggaggcggaggcccacggcctggagccgtggcgcctggtcgaggccgtggagcgtgacggggcgagttacgtcctgatctacgataccggccgagcccgcacggtcggcccgctgatgaccttcttcctcactgcggcagacgcccagcacctggccgaggcctag

SEQ ID NO: 353864 - DNA, 417 bp, Pseudomonas aeruginosa
atggcacttaaccgtaacaaggtcgaactggctggcttcctgggcgatgcgcccgatgttcgctacctgcccgatggcactgcgaccgcaaccgtccgcctggcgactaccaaacgctggaaggacaagcagaccggcgagccgaaggaacgcaccgaatggcaccgcgtcgtcttcttcaagcgcagcgccgaggtggcgggcgagtacctgggcaagggctcgcacatctttgtcgatggcgagctgcgtacccgtagctacgagaaagacggcgaaactcgctacatcaccgaagtcgtgggcaccttccagatgatcgaccgcaagccggtcgagggtgacaaggttccgaccccgccgaaggacgatgcgccgctgccggatgttgatgacgaagacccgatcccgttctag

SEQ ID NO: 353865 - DNA, 252 bp, Pseudomonas aeruginosa
atgaccgacaagaaatacggcttcaattgggttctacgcctgcccgatctggacgccgccaccaaggccaagtatgaagccgtgcgcgagctggccgacgaagccgacgagctggaagcccaagcccagcgcctgaaggatcaagccgcagaagtccgtggcaaggcctaccgcgagtgcctgaatctggaaagccacgtccgtggcgtctggagtgcggacaccgtagacagcctgaaaaacgacttctaa

SEQ ID NO: 353866 - DNA, 1071 bp, Pseudomonas aeruginosa
ttgctgatcaattggcagcgggagatccaggaggtctatccctcggccaccgtggccatccagcaggacaacccagaggcgcagtggatcctggtcaactacgagcagttgagccccttcgtcgccaacgcttcgcgcttcgccgtgatggtcatcgacgaggcgcagcggatgaaggaaccgacggcgcaatgcacgcggcacggtttcgacattgccgcccaagtgccgaaccgctacctgcttaccggcacgccggtgctcaaccgcgagaccgagctgcacaccctgctgcgcctctcaggccaccccatcggccaactgccgctgaaagagttctgcgaccgtttcgccggcaacccggagttccgccagagtctgcgggcggagctgggtgactggatgctgcgcaggcgcaaagatgtgctgcccagcctcaagggaaagcagcggcagttgctgaaggtggccctctccaccgaggaacgccagcaatacgacgtgctgcgcctcgaggaccgaccggtcttcgcgcgactcggcgcgctgcggcgttacctggaaacggtgaaggttcgcgtggcgatggacctgttgagcgagctcgacgccgaggacaaggtgatcctgttctgcgagttcaagccgaccgtggctgcgctgaaggaactctgcgagcaggccgggctcggctgcgtcacgctggtgggcaatgactcgcttaccaagcggcagaaggcgatcgatcgcttccagcaggatcccgactgccgggtgttcatctgcaccacggcggccgccgggacgggcaacaacctcactgcggcgaactacgtgtttttcctcggcctgccctggactcccggtcagcaggaacaagccgaggaccgcgcgtaccgcaacggccagctccgcatggtggtggtgaagatcccactggtcgagggcacgatcgacgagcagttgtggcaactgatcaacgcgaaacgccaggtagcccaggacctcatcgagccagagcaggttgacggaaaccgtgcgcttttggccgcaagccttgccgaacgctga

SEQ ID NO: 353867 - DNA, 672 bp, Pseudomonas aeruginosa
atgatggtgttcctgctgtgcatcgtggcctatcgcatggtccccagcctggccaggctctccgacccagtcacgtggaccggcccgctcgccacgctcaacgccattgccagcttcgtcacaggacctggtatctacgttctggtcgccgtcatcaccctcacggtggtggtcatcgtcacgttgccgacctaccgctggaaaggccgggtctggctggaccggatgctgccgccctggtccatctaccgcatgctccagggcaccaccttcctgctgaacatggcggtcatgctcaacgccggcatacgcccctacgacagcctggccagcatgatcaagatctccccgccctggctgaagcagcgcttggaagctgcccgctacggcgtgggcctgggccagaacctgggagtcgcccttcgcagcgccggtcacgatttccccgaccgacaggccatccagtacctgtgcatcctcgccaaccggggaggcttctccgaagctctggtcaagttcagccgccgctggcaggagaccagcctcaagcagatcgagctggccgccgggctggtgaagaacttcgccctgatcttcatcggcgcgctgatgatcctggtcctgctcggcgcctaccaggcacagcagctcatccaatccatgaaccactga

SEQ ID NO: 353868 - DNA, 834 bp, Pseudomonas aeruginosa
atgaacctcggccttgggtatgaatccctcgtaaatcggcgtttcgacaaccgccggagaaacggcattgaccctgatttgtttggatgccagctccatcgcaaggtgctgggtcagcgaatgcaaacctgcttttgccatcgaatacgcggacgacggcgtagccgcaatcgcctgcttgccccacatcgagccgatgttcacaatggcgccgggacgctcgctggccacgagattggccacgactttttgtgtgatgaagaagaacgctttattcaacgtcaaatattgttcgtaatcactttccgtgtgctcaagaaacgccttcgggaagaacaccccagccgcgttgaccagaagattgatgtccttgtggtgttcatcgatggtatgcaggagtcgcttcacatcttcggctcgcgagagatcggcagtcagggcggtcacggtgcccaacgacgacagcgccttgcgggcctcttcggccttgtcttcacggtgaccgacgatgacgacgcttccgccttgctcaagaaccatgcgggcagtttgcagtcccatcccgctagtgccgccgatgaccaacaacttcttgccattaaattcagtactcataataatctccttaactaccaactaaatggtagggttgtgttgcaaaaaaagtgccgacctcaggtcaacacggtggaaagaaaagtgtttccaacttcggccggtccgcgtgacgaccgcatgccacggcccaccatcatcgagccttccaacgcgcacaagaatgcctctgcgagagcctctggggtggaattcgaggtgatcagcgcggcacgctga

SEQ ID NO: 353869 - DNA, 585 bp, Pseudomonas aeruginosa; identical to SEQ ID NO: 324382

SEQ ID NO: 353870 - DNA, 1050 bp, Pseudomonas aeruginosa
atgcaggagcgcgtgctggatcatcccttgctgaggccgcactttatatacctgctcggcgccagtgaggtcgccccatggggaattaagaagctcctcgagctcgcgcgaggcggagagttcgagccttggcggttccagcaactcgcttatggccgcatgcacgaatccattcccgacggcgaactgtcggaactgctcgccgttctgaacgggtgggataatggcatctacaccacgctcgatatactggagatgcggttcttcgttgagaaaaaccgcaattacgtgccgagcgaagagcttctttcggtcggacgcagggccattcgcaatctgctgtctagtgagcgggagcagatcgacctgagccgcatccgcaggactaagcatctcgtccgtcagtgcttgtctgcgtccgctccggaacaggaaatcaaggtgatcatgaagttactttgcgacggagtggatgctttccgtttttacagctttgatcttgatgtcatcatcacaacgctaaccaacaattatccggagatcgtcctcggtgaggttttcacgggtgacgatagggaacgccgactgatccatcaccttttcaaggatcgcctgagccgtagttcaccgtctctcaatagcgccccggtggatcgactagtcgcatggtgtcaaggtgatcaagatcggatcgcgcgcgtggccacggcggtgtgcgcatactcagctaccgaggcaaccgatgttccgctggaatatccaaaacgcgttgttctcagcgagcccatcaaggccttgttggaagccgcagtggataagcagagcatcgtaaatacgatattttcgggaatccagcctatgagttggtccggttcgcgggccgacatcatggagattcgggccagagccttcgccgagttgctggagcaccccttacccgaagtgcgagatctcgcagccaggaagcttgagcgtgtcggacaagtcgtgcgacaagagcgggaacgagaagcagcagaacacagccggcacgagcagcgtttcgaataa

SEQ ID NO: 353871 - DNA, 1095 bp, Pseudomonas aeruginosa
  misc_feature (1088)..(1088): n is a, c, g, or t
ttgttcgaggcggagatcggcgaagaggcgttgtctcctgccagcgcaatctacgctgacctaggcgagaacttgtcgccgaccgcatccgaactggtttcatacctcatttccaacgatcacgccgttcatctggtactcgacaactgtccgccggacgtgcatcggcagttgcagaagcagatctccgagagcagcgccaggctcagcctgctgaccatcgagtacgacatttccgacgatcgtcctgaagaaaccgaggtaatccatcttgagccatgcagcgagaaaacggtctcaatgctggcccaaaagcgctacccgaacctaggacagttgaacgcgaacaagatcgctgagttttccggcggcaatgcacgtattgcaatagcgctagcaagccgggtagaggcggatgagacgctgacaaatttctccgacgaagacctgtttcaacggctgttcagtcagcgaaagggcgcctccgatcagctattgggaagcgctgaagcgctctcgctcgtctattcgttcaatgtgtctgcgtccgaattcaatgacgaacttggcatcctgagcaccatcgccggtctcgatcgccgcgtgctgcatcggggccaggccgagttgctgcgtcgtcatctggcgcagcaacgcggcgaatggagggcggttcttccgcacgcacttgccaaccgtttggcgaaacgggcgctggagaatattcctcccgacgagattaatgccgagctcctgaaatcagagaaccggcgtctgttcctctcatgcgcacatcgattgggatacctgcacgatttcgagcctgcgcttcgcttggcgaatagttgggtagtccctggcgggccgctgcatgacatcggctcgtgtagagaagaaagtttgtcagcgttgcagtacatcgcgccggtcttcccgcagaccgtgctgcggttgatcgaagacgccgcagccggacccggttttgcctcttgcgagaatccgaacttcagcttcttcgtgcgcttgctgggccagcttgcttacgacgatgacaagttcgatgtagtggtcaacccatcccggacagngggttga

SEQ ID NO: 353872 - DNA, 243 bp, Pseudomonas aeruginosa
  misc_feature (17)..(26): n is a, c, g, or t
atggcagccagttgccnnnnnnnnnngatcgatgctccgttcaacgacaccacccggctacaggtctatgccgccaccgccatggccctcatgcgttgggagccgcgcatccgcctgagccgtgtccagatcaacgggcagaacctggccggccaggtgctcatggagattgacgccatcctggtggacagcaacgagccacacaacctgagcatccccctgcagatgggtgccagcgcatga

SEQ ID NO: 353873 - DNA, 351 bp, Pseudomonas aeruginosa
atgaacagcaccaacgactaccgcagcaccatgcagaaagccgccgcagcgtacctgcaggccaacgccaaccagtatctttcctccggctccgaccggttgttcgatgcctgtgtcaaccatctggccaaaggcctcgaggtcccccaattcatggccgaacaactcgcccagcgcgcgtggaatgaagtcttcgcgggggcagagccgatctggctgggcatcgactggggccagggagacgacgaggtggtctacctgatcgacacccgcagtcactgccgcttcccgatcccggcccgctatctgcccgcgcacctgctcaaacagcgcccccagcacacccagtaa

SEQ ID NO: 353874 - DNA, 447 bp, Pseudomonas aeruginosa
atggcaacagttgatcagcccctccacgttgatcgcgacgatgcgcccgtgctcctcggcggtgatctcggcgaaggcgccgaaacgcagaatcccggcgcagttgaacaacatgcgcaggtggccgccacaggcttcggcgaacgcgtccagcgccgcgttcaccgccggccggtccagcacatccagttcggcgtgccatgcgtcctccagctccccggccagagcggccagcgccgcgccatcgcgatcgagcaagccgacgcgccagccgcgggcgtggaacagtcgcgccgtggcggcgccgataccggaggcggcgccggtaatgaggatactgttcgcccctggcgcgacgaaacgcgccacctcgtccagcgcccggtcggccaccgccagcacgtcggcatgcgcctggaaggggtcgtctcagaaaacggaaaataa

SEQ ID NO: 353875 - DNA, 753 bp, Pseudomonas aeruginosa
atggctatcgagaaagagacgtatgtgatcggcggacccttcaagatccgcgagtccggcgctaccacccccttccagttcgctggcctggtgtccactatccagcagaccatcgagaccaacgagatcactttgccggataccaccaccccgcagggcggtgagtacgatgccgtttcgcgcatcacttcggtcggtttgtcgatcaacttccgcgagctcaagaccagcatcctggctgccttggtgtggggggacgccaccaatgttccttctgccacccacaccgacgaagcgcacaccgccgttccaggaggcacgatcgcgctcgacttcatgccgctggagatcaccagcgtgaagagtgatgacggcaccacgacctacgaagagttcgacgactggaacatgaccggcgccggtatcgaaatcgttgaagggggtgcgatctctgcggccacgccgatcaaggtgacttacaagtccgccaccgttgatgtgatcgaagcgctgaccaacagcggcaagacgttcgaatgcctcttcgagggtgagaacgcagccggtacccagcgccgtatccaggcgcgctatttccggtgccgcctgaacccgtcgagccaacaggactggctcaataccgaagacttcctcgctgccgaggccactgccaaggtgctgatggacccaaccaaggtcggtgctggaaagtcgaagtacttcaacatcaagaaggaactggcgacggtgtga

SEQ ID NO: 353876 - DNA, 723 bp, Pseudomonas aeruginosa
atgagcgcgcacgtgcttgatgttcagggtgccaccgatcagcgggcgcagcgtcgggtaggcctgcacgccctgcggcacgtacagtttggtttcgccgaggtcgcggatgcgtggcgcgaagcggaagcccagcaggtgcatcagggcgaagacgtgatcggtgaaaccggccgtgtcggtgtagtgctcctcgatccgcaggtcggactcgtgatacagcaggccgtcgagcacataggtggaatctcggacgccgacattcaccacgcgtgtgctgaacggcgcgtattggtcggagatgtgggtgtagaacagccgtcctggctcgctgccgtacttcgggttgacgtgcccggtgctttcgccccggccgcccgcgcggaagcgctggccatcggaggacgaggtggtgccatcgccccagtgggcggcaaaggcatggcggtactggtggttgaccaactcagccagggccgccgagtaggtttcgtcgcggatgtgccacgcttgcagccaggacagcttggcgtaggtcagtccggggctcgactcggccatcttggtcagcccgaggttgattgcatcaccgagaatcgcggacagcagcaacgtccggtctttggcctcggccccgtccttcaagtgggtgaagtggcggctgaagcccgtccagtcgtccacgtccatcagcagttcggtgatcttgatgcgcggcagtaa

SEQ ID NO: 353877 - DNA, 186 bp, Pseudomonas aeruginosa
atgcagattcgtgaagccggcgcgtcctgggattacgaggagtaccagccgcacgtgaccatcacctatgccgctggcgacatggacctgagcaaggttgagccgtaccgcggcaagattgaattcgggccagagatcttccaggcgctagataccgattggaaatcaaaattgcaggaggagtga

SEQ ID NO: 353878 - DNA, 228 bp, Pseudomonas aeruginosa
atggaaaccttcgtacagcccaagatcaccggataccgccagcttagcgaagaggatgccgctctgatgaatgagatcaagcagcacggcgtcgagctaggcgccctgatcgacaagctgcgatcgctcgatcacctcgacccgcgctggttggccatcggcactactgatcttcagaccgggcttatggcgctgacgagagcagtggcgcggccgtcgagtttctga

SEQ ID NO: 353879 - DNA, 123 bp, Pseudomonas aeruginosa
atgccgcgcagccgtttgaggaatgccgccaactccttgtgctggttgtcgtccagttcgtaccggtacgacttgccggtggcgttgtggcgcaccttcgtgctgcgggtcgagtggacatag

SEQ ID NO: 353880 - DNA, 471 bp, Pseudomonas aeruginosa; identical to SEQ ID NO: 331056

SEQ ID NO: 353881 - DNA, 723 bp, Pseudomonas aeruginosa
ttgcgcggcttcgcctacgtctccgcaaacggcagcaagaccaaggaagaggccaccgcctaccgcgagaacttcgccgcgcgcgaagccatggtgatctggccggacttcctgacttggagcaccgtggtcaaccagaccgtgcctgcgccagctgttgcccaggccctgggcttgcgcgcccggatcgatcaggaggtcggttggcacaagaccctgtcgaacgtcgccgtcaacggcgtgaccggcatcagcgccgacgtgttctgggacctgcagagccccagcaccgacgccaactacctcaacgagaacgaggtcaccaccctggtgcaggaaggcggattccgtttctggggttcgcgcacctgcagcgatgatccgctgttcgccttcgagaactacacccgcaccgcccaagtgctggccgacaccatcgccgaggcgcacatgtgggcggtcgacaagcccatgcatccgtcactggtgcgcgacatccttgagggcgtgaacgccaagttccgcgagctcaagggactcggcctgatcatcgacgcccaagcctggtacgaccccaacgtgaacgacaaggacacgctcaaggccggcaagctgcgcatcacctacgactacaccccggtgccgccgctcgaggacctgaccttcttccagaagatcaccgacagctacctcgtcgacttcgccagccgcgtcaacgcctga

SEQ ID NO: 353882 - DNA, 549 bp, Pseudomonas aeruginosa
atgcggcagctcgataaggaccagcaaggcgctctgcaacaaagtgccttccgcccactgcaacaaactgccttccaggcgctgcaacacagtgcctcactaaaaggccttttaaagccttttaaaggtaagggggagctggcccagttggcggagcaatgcgaagtcctggagcagggattgcttgagcttgcccagggactgctggcccaggttcgtcgaccgcccttcactcttctgcccgcccgactcatcgagcagcgcacatccgcccgcaccacctttcttcgctggcagcaccttgcaacccggcggatgggcgtcggggtgtgggctgaaatgctgcgccaggacaagaccccggaatacctgctgcaagacctctacgagatggagctgcagcgcatcaccctcaacatgcagatcagcctgatccactccatcggcaagcaggccgccgagtgcgcggaaaagatgggccaggccgaggccgagttcatgggccgactgcagcagcgtcagacccgccctggttccgtgggcatgtag

SEQ ID NO: 353883 - DNA, 165 bp, Pseudomonas aeruginosa
atgctctgcgccttgagtcggtcgatggagacccgcagttgcggcgcgtcgtcctgcccggagaagctcacgtcggccagtgccggggtctgggcggccaacgccagcgaccagtcgatcagcgtcggccagatcatcccggcgttctgcccgccgccgaaatag

SEQ ID NO: 353884 - DNA, 345 bp, Pseudomonas aeruginosa
atggccctggagcgccaggacgccgtcaacgccgacgcgcccgaggtggccgagttctgggaggtctacgactacctcgaaaacctcagcgaagagccggtgctcaaccacagcaagaaccccggaaccatcgccatcaacctcaacgagttcgtgaagctggcagccgaccaccgccagaaggtggccgacgcggcaaccctgcgcgacctgctgaaagagtcccgccggcacaaattcatcgaatacaaggccgtcgacagcgcagtacgggcggcacacgcccgccagaaccctttcaccaaccgacccagcaccgtcaagtgctggattttccaagcctga

SEQ ID NO: 353885 - DNA, 180 bp, Pseudomonas aeruginosa
atggcgtattccgggctgtacacctccgcttcgccgaccccggggatccgcagtaacgccggacgcacctgggtggtggcgaagtccccgagctggacgtcgtccaccgtcgggttgtcggcgtcgagggtgatgaacatcagctcgctctcgtcgctctgctccaccgagatgccctga

SEQ ID NO: 353886 - DNA, 129 bp, Pseudomonas aeruginosa
atgatctgcaccaacctgcaaaccatcgcggccaaccaggattatctgcgactgaaacgggacgggtcacacgggaagcccggccgattgcatcttctcccgaagctcagccgctcgtgccggatctaa

SEQ ID NO: 353887 - DNA, 171 bp, Pseudomonas aeruginosa
atgcgctggaggaacgcctcggcattccaggtcggcccggcgagcatcgacttgaccgcccggccggacgcgtcgaacaggctccagtcgaaattgcagctgctcgccgcatgccagccgaaggccccgcaggaattgctgaatccgcggaacagcgggccattggcgtag

SEQ ID NO: 353888 - DNA, 705 bp, Pseudomonas aeruginosa; identical to SEQ ID NO: 8686

SEQ ID NO: 353889 - DNA, 705 bp, Pseudomonas aeruginosa; identical to SEQ ID NO: 8686

SEQ ID NO: 353890 - DNA, 519 bp, Pseudomonas aeruginosa
atgtccgacttgatgatggacctcaaggccttctatgccggcatggaacgcaagtggttcgtggtcgagatcgaggccgggccgcgtcggcgcccaaccttcaaaagcaagcattgcatccgagccaccaccggagccaaggccctggagggcgtgcagagcctgatgcgttccaaggttcgtggtgccaggttcaacgtgcgctatgcccatccggtcattgacctgcggatgaagcgggccgagagcttcacccccgtggaccccggcgcgcccctccccgccgccctactgagtacccgaggcatgtaccgaatcacttgccgctgcggccattcggccgattacgacgatttcagcacgacgcccagcggcgccgagttgccgcgcaatgagtaccaatgcccccgctgttacaaggcctggcgggttcaggcagtaggcgaaggctggaccacccccgaagggctgtatattccgcccgaccggaagtgcgttgcgatcccgccacggccatag

SEQ ID NO: 353891 - DNA, 1011 bp, Pseudomonas aeruginosa
atgtacgatcttcccgttttcatcattgacaaccctcccgcccgtcaccgtcacctcatccagggcctggccgaaggactcggccaggacaagttccacctcatcagcctgcagaatttcgggctgtatgacttcaaataccctcacgggcttaccttcgcttccctgccctttgtcggcgaaccggaatggaaggcgcgtgaatgggcgcaccctgtcgtccacctggctgcgcgtggccagcacgcagcgcttgaggcagtcacgccgagagacgtgctggccgatgcgtccgaagtcatctgcgcgtgcagccccgatccgaccggggcgcacgctttccacgtcctgctttcgcaggcgctcggcgcgcaggcggcacaagctccgcatcgctggctgccgctgacaatcatgagcccgagcgggatcgcggaagtctttgccaccaacacgaccacccacgacccagcctggcaggcgttgctacgccgcgccgaggcgaagcgttttttcgagtacaacttcaacgtcaattcgctgatgttgttcgggaaggccttgcgcgctttgggcgtcgatgcacccggcttcctcatgagcaaatggatgctccaggtcctgtactggtttgaatgcgaccagaagaaggggcctttcacggcgatccaggcgctgcagcacatggaggattggtcgggttgggttccccatgccccgaaaccgttccagggtgtgcttggctcgccggcaagccgctatcagatcctcgaaaatctgttggcggtcgggctgctgcagtgtgatgacaagaggctgtacagcatctcgaaactcggcagcgactttatcgtgagcattcatacgggctgtcaggacatggacctgccgtggcggctgccaacgtgggaaaacacctggccagagtcacggccgaagatcgagcgctacctgcgtactgtctttgggcggcagaaacgattccgaagcccattgaggccgaagcggtag

SEQ ID NO: 353892 - DNA, 1383 bp, Pseudomonas aeruginosa
  misc_feature (1116)..(1116): n is a, c, g, or t
atgcgaatgaacatcacctcggtcgcgctgatgtggctgctcgcagcgcaacttgcccaggccgacgacccgatcaacgtgtccaagaccggcacggtgctcagcgacgaggtcctctacagcattggcggcggcagtgcggtgagcatgggcagcgccggccagatggactcgatcggcgtcggcttcggctggaacaacgacatgatgtgcggaaacatgaacctgagcaccaccctggagaaccagctcaacggtgccacacagggtttccagaacatcatgggctcagtcatccagaacgcgaccggcgcggtcatgtcgctgccggcgttgatcatccagcgcgcgaaccctcagctctacaacctgatcaccaatggcatcctgcaggcgcggatcgactacgaccgctcgaaagggacttgcagagcgatcgccgagaagatggctgacatcgctggcgagcagaccggctgggggaaaatcgccgaaggccaggccctgggagccacgctggcctctggcgggaaagacgccgtatccgccctcgaagcagtggagaagaagggcggcaacgatggcgtaacctgggtcggtggagacaaggccggcggctccggccagaagcccattcgcatcgtcaacgacgtgacccgggcgggctacaacctgttgaccagccgctcggtgaatgattcgtcgagcgtgccttccgccacttgcaacaacggcctggtctgcaacacttggtcctccccccaggaggccgccgcattcgccacccgggtactgggggagcaacagcaacagacctgcgaaggctgccagaagacggtgacggctgctggcgtcggcctcaccccgctgatccaggagacctacgacaagaagctccagtcgctgcaggagctgctgtcgaagagcaaaccactgactgcagagaacctggctgcggccggcaccgatgctctgccaattacccgcggcgtcatcgaggcgctgcgcgacgagcgtgaccaggacgtcctggcgcgccgcctggcgtccgatgtctccctgatggacgtgctcagcaaggcactgctactgcagcgcctgatgttcgccggcgcnaaggagcccaacgtcgccgccaacggcctggccacccaagccgtcgatcagcagaccagcctcctgcagcaggaaatctccaatctcaagaccgaactggaactccgtcgcgagctggccagcaattcgcctatgcgcgtcatcgagcgcgggcaacaacgcgcctcagggtccagtggcgtgttcgagtcggcgcccgatgccgatcgcctcgatcgcctgcaggccccctctgccgccggcggcaagtcgggagggagaccgtga

SEQ ID NO: 353893 - DNA, 444 bp, Pseudomonas aeruginosa
atgcaacagcagacctggactaacccccttcttcacttctgcgccggcctggcctgcgcgctgaccctctcagcgtgctccaccagcacggtggagatgctgccccacggcgaggccaacatgctcgatgtctgggaacaaggtgcaaccagctcgataggcaacagccgtggccggctactcctcgatgccaggcaaacgctgcggcgcccgatcgatccgcagcaggttgcctccgcgaacgaccaggccgactacacccgcacggccagcaacgagatccacagccagttcaaacgactgcccaatcccgacctggtcatgtatgtgttcccgcacctggccggcagcgatcccgccccggtaccgggctataccaccgtgttccccttctaccagcgagtccagtacgccatgccgggcgagcgcacggaggactactga

SEQ ID NO: 353894 - DNA, 2994 bp, Pseudomonas aeruginosa; identical to SEQ ID NO: 328328

SEQ ID NO: 353895 - DNA, 582 bp, Pseudomonas aeruginosa
atggcaacgtctgtaatccgcaccctccaactggccgccctgctggtcctggccaacatcgctcaggccgccgtggatccaccgccggcgtacaagcagatcgccctgcccaaaggggttccggccgaggtgctctactcggtcgcgctgaccgagagcaaggtcctgctgcgcggcgaatacgttccctggccctggacattgaacgtcgccgggaaatcctactactacgcgacccgcgctgccgcctgcaccgcgctactcgcggcgatcaacctctacggggccaagagcgtcgactccggcctcggccaggtcaatatcggctggaacggacatcgtttctccagcccctgcgagtccctggatccgtacaagaacctggacgccacctccgacatcctgatcgagcagcgggacgccttgtacgcctctgcccccgggaaaccggtggactggatccaggtcgccggccgctaccaccgtcccgccggcggcgcgcctgccgccaaataccgtaggacggtatcccgccaccttagccaagtcctcggcgtcaacctactggtgaccaatccatga

SEQ ID NO: 353896 - DNA, 501 bp, Pseudomonas aeruginosa
atgaagaagatccttgccacgctggcattttgcacggcgttcgcgactcaagcctgggccgccgggctgatcgttgtcgaagacctcggcggcgcctcggcgctcccctactaccagggcctggatccgcagccatccgctgccgcaccaggacctggcgacctgggcgtccgtggctcaggtgcgtttccagttcgctccgcccgtctttcgccaggacaggtccaggggcgcgccatcaacgctccaggcctgcaaccgctgttcctggtcggcgacgacacgctgtctcaaacctggctgaaagagcgaggcgacgagctccgagacctccaagccgtgggcctggcagtgaacgtggccagcgaagcgcgcctgacggaaatccgtgcctgggggaaaggacttcagatattgccggcgccggcggacgacctggtcgaccggctcggactgcggcactaccccgccctcatcacatccaccgccatccagcagtag

SEQ ID NO: 353897 - DNA, 384 bp, Pseudomonas aeruginosa
atgctgaaatcacttctagtcatcgctgtaggcgcatcattgggtgcttggttgcgttggcttttgggcatgaagttaaacgccctgttcccctcgattccgccaggcactgtggtcgccaacatgttcgggggctacatcatcggcctagccatcgcgtttttggccgcgtctcctacccttagccctgaatggcgcctcctgatcatcaccggcttctgtggtgggcttacgaccttttctacattttcagccgaaacggttgccttgattcaggaaggcagactgctctgggcgctcggctcaatttcgatgcatgtcgtaggctcgttagcgatgaccgctgccgggctactgtcctaccaaatgattggtactcgctga

SEQ ID NO: 353898 - DNA, 1779 bp, Pseudomonas aeruginosa
atgatccgcatcaatggagatcaggtcgtccagatcgagtttacccggtcgggagacgatctcctattagcatctcacatcactacactaccggcgtatgagtttgatcaggactcggtgatatcaatgccgaccgggtcttctgagcacctgttctatgatcttggttctgacgccaagccctgctacacctacgactggacacctgaaagtggatacattgaacgtgtcatccgtcgcctcgcaggtttccaatcaccacagttggcagagattatttcctggcttcagcagcacgctgatgagcgcactggccgaattaccgttaaccctgatgacgtgcttgccgcccatgaggcgcttcgttcaggtgagctagccaaacgcctaaacgccgaacagacgcttttacgttcattggtggacgcgctgacaggtgatgcccgcatggcaggtctccttgagcgtgaacgcaatgctctaatcgagcaggaacgcaacaccatacataccaatctcgagatgcagttggctgtggaaatggagttgcagcgtgatcttcgcacttctcagctcgaagtccagctaaaagagcatgaagcggccagtcgtgctcaaataaaagaacagctggatcatgatcggcaggaagcggagtccgccatagcggcgtatcaagccgcacaaaaagtcgagatcgataaagttatctgctctcggctagccgcgctggagcaagaaaaggcggagcttacggagtattgcgccaacctatcgcaatctagggacgagctcatcttgacgctacatgaactcgagataaaagccgaagatttaaacgccttggtcggagatctgagtgcagctgttacaattctgaaagaacaaagagagcatggtacagctgaagtcgaacgcctaaaagaaattagccgagtagcatcagaggggcgcggttatgctccggtgactgtcgtcccattttaccgtcccaaacactcgacggcctggtgttgctctgaagctggagaggtattaaagaactgtgcgttgctgacaagtaacgggaaaaaattgatggagcagtttatcgcgctatctctggccggtgagataccgctgctagtaggtcccgatgttgcagactttttgttggtcgctgagtcactagtagcctcaggacggtcagcgcgcttggaagcagatccgacaatcctgacatttgaagatttgtgggtgcgagcaggaacggggttgccaacatctttggctcaaggattaacactagccagcagccaggagccatgctccgttttgggggtaatcgatcgagctgagcgctctgccgcgaggttctggctgcctgcgttgacggaccgagcccgtcgtggagacctccccagacggctcttgctatgtgccactgttgaagacgatagctgcgaagaggctgaagctctgcggggcagccagatttggctgccagtcaaggaagccatcgctaaggatgcagccactgttgccccactgtggctctctccgagccagtatcgagaattagatcccggcgattgcccggttgaaagcatcgagggtggcctcaatgttgcccaaaagctcgcaaaccgccttgggctcgttaacacgctaagagcggttcgatcagcagcagaggtagctactttctataaggggaaggaagctatagatgctattgcgcgaatgaatacattgtttcttaattccgtaggttcggagcaacctgcggtagcatattaa

SEQ ID NO: 353899 - DNA, 1281 bp, Pseudomonas aeruginosa
atgacgccgcagcagctcaccgaggagtacatcttcgcgcacgatctccgagaagccagcgcgaagatctaccgcgccgcgaccaaggcgctgctcaagcacttcggccctacggcaaccgtacaggaggtggaccacaggtctgtgctgggatggcggcgcaaggtcctggaacaaggcctgtcgaagcggagctggaacacgtattcgaatcatctgcgaacgatctgggggtatgccatcgagcacgagctggtgacgcactcccaagtcaacccgttcagaaagaccaccgtcatcccccccaggcgagcaagcaaaaccgtcgcagccgaagccatcctgcgcgcccgcaattggctcaacatgcaggtcggcgccgagcgctgcaccggcgatcgcgcacgcatcactcccgcctggttctggctttgcacgtttgaggtcttctactacaccggcatccggttgaacgcgctgctgtgcatccgcaagcgcgacatcgactgggataatcaactgatcctcatccgcggcgagacagagaaaactcataaagagttcgtagtgccaataacggaggggcttgtgcctcacctatcgcggctcctgcaggaggccgatagagccggattcgccgatgacgaccagttgttcaacgtcaaccggttctcaccgcactacaagagcaaggtgatgaactccgaccaggtcgaagccatgtaccggaagttgaccgagaaggttggggtgcgaatgaccccgcaccgtttccggcacaccctggccaccgacttgatgaaggcacccgagcggaacatccacctcacgaagtgcctgctcaaccactcgaatatccagaccaccatgagctacatcgaggccgactacgaccacatgcgtgccgtgctgcatgccagaagcctggcccaaggcgcgctagagaacgtcaggaaggtggattacagcggctccccgcaagcctctgccaaaccgaagccatgcgggcaacctctcgctcgaatgggtgaagtaccgccgccggaggccaggacagaacctgcagaaccaagggagcacataccagggacaggcattcagggaggtccaaccgtgcgggaagaagcgctaccacagccacctgacaccttcgaccaaagcgtgctgttcactctgatggctcaacacttatcgaaccgtgccgcctcggcatccgcggctcccgctgcaacaagcggatctggtggatggggatctactgcccgaagcagtctcgcctag

SEQ ID NO: 353900 - DNA, 555 bp, Pseudomonas aeruginosa
atgtctgacgccctcctccaccccagccgtttcacccaccaccatcgggtcctgcacgccgtgctgctggatgaggaaggctggttcgtgctctccgacctggtacggctgctgggccgttacctgggcggtcgggcgccggcggcgttgtgtgacgaggcgccgtggccgctggcgacggcggaacagcgcgagcgcttgttcaccctctgccatacgctggaacggcacctggatgccgaccagtggcggctcgcctggctccatgacgaacgccacgggccacgccaggactgcctggtcagcgagtccgggctctacgctctgctctggctcgcagtgcctggcgcggcacggggtttgcgccgttgggtcagcggctcggtgctgccacgcctgcgcagccagtcccaccccaacgccacgccccagcgcgccgtgctgcactggaaaaccgccgagatcgacaccctgcactggcaaggcaagacctggatccccctctccgactgcccccacctcctcgacagtccacgcccgctgatccgggcctga

SEQ ID NO: 353901 - DNA, 357 bp, Pseudomonas aeruginosa
atgctgaaattcaccttccagaaactgtccaacctctgccggcgcctggcaaccatctctttgggactccccggtgtcgctttggctgcactccccaaacccgaggcacctagccgtggggagggatcgggcatcatgcaaaccatccagaacttcggctatgacggagcgatgctcctcgcgctgctcatctgcgcggctgtctttctgggggtcgcttggcatacctacggcacctatcacgccatccatgacgggaagaagaagtggtcggatctcggagcgggcgtagccgtaggtgtcggcctgctgatcttgatcatttatctcgtcaccaaagccaccgccatcatgtaa

SEQ ID NO: 353902 - DNA, 387 bp, Pseudomonas aeruginosa
atgcccgaagaacatctgtttcaggatgggaccctcagcttcctgccgacccgtttgaaccggcaaccggtggtcatcggcggtctgactgcggacgaaatgtggatcacggtcttcaccagcggagcagccgggttcgttcttggcatcccggctgccttggtcgcaggtaacgcggcctgcattccactgggcgcgctgctggtcggcgccctcggcctgggtatcggcagccgcgtcctgcggcggatgaagcgggggcggcccgatacctggttctaccgccaggtggagctggccctctcgctgcgctttcccgtcttcggcaaccgtcgcctggtgacgcgctccggcgcctggaccagtcgacgcacggagtccccatga

SEQ ID NO: 353903 - DNA, 702 bp, Pseudomonas aeruginosa
atgttcaatcgcgaaggcacgccctggcctgaagccgaccttaccgtggtggatttcgcgacctacgcgcgcgaaggctacgccgcccagctcgggatcgcctacatctcgctgctgaacaccgtgaacaacatcgccgaacgcgaccagttcaagggccggcccatcgtcaagatcaccgatgaggggcacatcatcaccaagcacccgctgctgctgccctacgccatgaagatcaccaagatgtggcggaaactgggcgcctggttctggctcgccacccagaacatcgacgacatcccggcctccggggcaccgatgctgaacatgatcgagtggtggttatgcctgaacatgccccccgacgaggtagagaagatctccaggttccgcgagctgtcgccggcgcagaagtcgatgatgctctcggcccgcaaggaaagcggcaaattcaccgagggcgtgctcctggccaagggcaaggagtacctcttccgtgtggttcccccgagtctctacctggccctggccatgaccgaaaacgaagaaaagaaccagcgctacaacatcatgcaagccaccggctgcgacgagctcgaggcggccttgcaggtcgcagcggatctcgacaaggcgcgcggcctgccgcccttcccaattaatttcccagaccaaccggcagtggagtgccaggacgaatga

SEQ ID NO: 353904 - DNA, 234 bp, Pseudomonas aeruginosa
atgactaggcgcattggagcgaaagcactcggtgaccagctctacagctatatcggcgccatccaggacttggctaccgcagttcgcgaagacttggctttcgaaggttgcgagccgggcccgcgcctgaccgccgagcaggtggatgcgatccatctgtcgattatcaccatcgccaggttggctggcgaagacttgatccaactgctgaccgagatggaggtgccggcatga

SEQ ID NO: 353905 - DNA, 1071 bp, Pseudomonas aeruginosa
atgaatagtaggctaatcagaccaaagaaaagaagtgcagctgctaaagtaacatttatcgagcaaaatcatcctattgatgagtatggtcgcgcactgtttgctgtggctcgctccgtactccgagccttcatagactcaatgtcagaggaagacttggctgatataaacacgcctcagaaggaagtccgactccgtcaattggccaagatagcacggattgatcgtgataaagggatgcgtggcgatggcttcgagtgggcgatccatgaagctattcttgggaaagagcctaaagttatcaatcctatttcagaagctctgaataaagcttctacgaagattctaagagactcttctcctagctcattgctttttggtcaagagagagcgaagtatctgggctttctagaagcggtagtagatgaggcggggacagattcctacttgttaccgcaaggtagtggccgacccttcaggtttgggccctgggtttcagttgctgcggaaggctacagagctgaggagcggcttaacgaacgcataaaaaaaatatggaaaacggacctgttcctctcggttgaggatgacccaagatacttcgctgcgacggttaaatcaaatcacgcattgctagagggtgggcaggggctgcgaataggtgtggttccagcttctcgtgataatccttatgctaaagaggtccaatatgatcactctaagaagctgtgggttgttgcgttagcagatccgaacggttttatggggttgttcaacgacgggtatagcgctattgcgagagctttcctgaagatgggcaagcatgatcctgccaattattgggcggtacctagtgcgaaggctcttaagcttatggatcagttagttaagtatcaagatgcaacggctctggaagttgaagaggctttaaatgacgctgcacagaaagacttgatcaaaacagttgctccccagttagttccagtaaatgcgcccgactggctatatgtaaaggaactgatgcctaccgtcatttcaccaaaaccccgctttgacttgctggatgactaa

SEQ ID NO: 353906 - DNA, 369 bp, Pseudomonas aeruginosa
atgaaagcactgagcattcgccagccctgggcctggctggtcgccaacggccacaaggacatcgagaaccgcgactgggcgaccaacttccgcggtcgcttcctggtccacgcatcgaagggcatgacgcgcgaggagtacgaagaagcccgcgactatgccgcgcgcaacggtgtgaccatcccagcgccgcacgaactggagcgcggcgggatcgtcggcgaggccagcatcatcggctgcgtctacgacagcgactcgccctggttcttcggcaagtacgggttcgagttatccgacggcaggccgctaccgtttcagcccatgaagggtcaactggggttcttcgaagtcgaggcggcaccatga

SEQ ID NO: 353907 - DNA, 930 bp, Pseudomonas aeruginosa
atgaatctgttactcaaggtgctcagctggatcgggggcgttttcctggtgcttttcggcttgctgctggtgatcgagatgccagttgcaacccttctattcgtggctgctggactgttcttgctgccacctattcgcagctatgccttcaaactcaccaacaaagcactgagcactaaggtcagggccatcgctgtgagcgccctggtctttgctgcttttgtggcaatcgggatcagtgcacagaacgatgtagaagcccaaaaggcagaagaggccaagctcgctgcagcagccaaggttgaggctgagcagaagaaggcggcagagtttgctgccaaccgtgaggtaattctcagcaaggccaaagccagcctgtctgcgggtagcttccaggatgtgctcagccagctcgagaaatacgcgaccattcaagatgcagatatccagcagctccagtcatcggccaaggctgggcttgagctgcagaagaagaaggcgcaagaaaccacactgcttgatgagataaccaagaccactaaccaaggtgaactggccaacctctacggcaagctctccgcactattgccggacaatccggactatgccgagaagcgcaagttctacgctgatgcagtcaaggaggagaaagagaaagctgcagcagctgaggcgcgcaaaaaactcatcgagaaacagttcagcgcttgggatggttcgcacatgaatctggagcgtttgatcaagaagtcgatgaacgaccctgacagctatgagcatgacgaaacccgctattgggaccgcggtgaccacttggtagtgatgacgcagttccgaggccgcaacgccttcgggggcatggtgaggaactccgtcaaggccaaggtcgacctcaatggcaacattctagaagtgatcgatcagaactga

SEQ ID NO: 353908 - DNA, 1059 bp, Pseudomonas aeruginosa
atgagcaaacgtcgcaaccgccaccagcaggtggccaccactgaccaggtgcgcgagggtgaggtgctggtcaagggcgagggcgggcagtcgatggccttcacgttcggcgaccccatgccggtgctcgatggccgcgagatcctggactacctggagtgctgggcaaacggccgctggtacgagccgccggtctcgctggacgggctggctaagtcgtcgaaggcgagcgtctacctccagtcggggctgatcttcaagcgcaacgccctggcccgcactttcatcccgcaccggctgctcagccgtgcggccttcgagcagatcgtcatggactggggctggtcgggcaacctgtacctggagaagcgcgacaacatgctgcgccaggcgatcggcctgcagccctgcctggcgaagtacatgcggcgcggtaccgaccttgcgacctactaccaggtgcgcggttggaaggacgagcacgagttcaaggccggcagcatctgccacctgcgcgtggcggatatcaaccaggaggtctacgggctgccggaatggctgcccgccctgcagagcgcgctgctgaacgagagcgccacgctgttccgccgcaagtattaccagaacggcagccatgccggcttcatcctgtacatgaccgacgccgcgcagaacgaggacttcgtcaccgatctgcgcaacgcgatgaagaacagcaaagggccgggcaatttccgcaacctgttcatgtacgcgccgaacggcaagaaggacggcctgcagctgatcccgatcagtgaggtggcggcgaaggacgacttcggcgcgatcaagaacatcagccgcgacgaccagctggcgatgttgcgcatcccgccccagttgatgggcgtggtaccgcagaacgccgggggcttcggttcgatccgcgaggcggcccaggtgtgggcggtcaacgagctggagcctgagcaggcccggctgcggcagatcaacgactggctgggggaggaggtggtgcgcttccagccgtatgagatgccggccgccagcagctag

SEQ ID NO: 353909 - DNA, 858 bp, Pseudomonas aeruginosa
atggccgcaaacgccaccgccaagaagtaccgcagcaagttcttccgcgtcgccgtcgaaggcgccaccaccgacggccgcaccattgagcgtcaatggctggtggatgctgccgaaacctacaaccccaacacctacggcgcccgcgtctggctggagcacttccgcagcctgctgccggatggtccgttcaaggcctacggcgacgtcgtcgcgctgaaaaccgaagaagtcgagatcgccggcaagaagaagctggccctgttcgcccagatcgagccgaccgccgacctgatcgccctgaacaaggcccgccagaagattttcaccagcatcgagatccgcccgaagttcgccgacaccggccgcgcgtacctggacggcatcgccgtcactgataccccggccagcctgggcaccgagatgctcaccttcagcgcccagcatcccgacgccaaccctctcaaggcgcgcaagaacgacccggagaacctgttctctgaggccgtcgaagtcgccctcgaattcgaggaagtcaccgagcccgagaacaaggccgacggcctgttcaagcgcgtgctcgatgccctcggcaagagcaaggacaaagccgtcaaggacgacgcccagttctccgagctgaccgaagcggtcgaggcgctggcctcgcacgcccaggagcagggcgaagccttcgccgaagaaaggaaggcccgccaggagctgagcaccaaagtcgacaagctcgaaactgagctggccgacctggtcaagcgcctcagcgaaaccgaggaccacagccagcagcagcgcccccccgccaccggcggcgaaggcaaaaccctggccaagttctga

SEQ ID NO: 353910 - DNA, 1008 bp, Pseudomonas aeruginosa
atgcgtaacgaaacccgaatcgcctacaacggctacctggcacaggtggccaagctgaacggcgtcgacaatgccgccgtcaagttcaacgtcgaacccagcgtgcagcagaacctggaaaccgccatccaggaatccacggcactgctcggccgcatcaacgtcatcggcgtgatggagcagtcgggcgaggccctgctgctgggcgtcaatggccccatcgccagccgcaccgacaccgcaggcggcaaccgccgcaacccggccgaccgccacaacctggccaaggacgactacacctgcaagcagaccaacttcgacagcgccttccgttacgcgctgctcgatgcctgggccaagttcccggacttccagacccgcctcaccgcggccatcgcccaacgccaggccctcgaccgcctgatgatcggctggaacggcgtctccgccgccgcagccaccaacgcggccacctacccgctgcgccaggacgtgaacatcggctggctgcagaagatccgcaccaaggccccggatcgcgtgctcgatgaaggcgccaccgctggcaaggtcaccgtcggcgccaacggcgactacaagaccctcgacggcctggtcttcgacgccgtccagatgctggacccgtggcaccgcagccacccggacctggtcgtcatcgtctcgcgcaacctgatgcacgagaagctgctggccgcagtcgagaagggcgccacctccaaccaggaagaaaacgccgcccaggagatcgtcacccgcgcccgtctgggcggcctgccgatcctcgacgcgccctacttcccggacggcaccgtgctggtcaccaccctgagcaacctgtcgatctactggcaggaaggagcccgtcgccgtcacctcaaggacgagccggagtacgaccgcatcgctgactaccagtcctccaacgacgcctacgtcgtggaagacctcggcctggtcgccctggtcgagaaaatcgagaaggtctaa

SEQ ID NO: 353911 - DNA, 714 bp, Pseudomonas aeruginosa
atgagcctttcccttgcccaacgtaaccagctgcgcaagcgcgcagcccaggaggcggcagccgccgcccccgccgcactcatggaaggcgccaccaactacgaggtgatgctggccaagctgcagcaggaccagttccgcctcaagcaggtgcagtccacggaaggcaaggcgaagctcaaggccgagctgctgccggagtacgtcccctacatcgagggcgtgctctcggcaggccagggcgcccaggacgacgtgctggtcaccgtcatggtctggcgcttcgacgccagcgacttcgagggcggcctgcagatcgccgagtacgtcctgcgccaccagctggtcatgccggatcgcttcaaccgcaccaccggctgcctggtagccgaggaagtcgccaccgcggcgctcaatgcacagaaggccggcaaacctttcccgctggtgaccctcaaccgcaccgccgaactcaccgccgaccaggacatgcccgacgaagcccgcgccaagctggttctcgcccaaggccgcgcccagttggcccagctcaactacgaggccgaaacgctcaccacggacgaactcgcctggctgcaattcggcatcgacctgctcaagcgcgccatcgagctgcacaacagctgcggcggcaagaaagacctggagcgcgccgagcgcctcctcaagaaacacgctgcccccagcagctaa

SEQ ID NO: 353912 - DNA, 465 bp, Pseudomonas aeruginosa
atgagcggatttatcgccaacggcaccaccgccgccgagcacaagatcgagaacgacgccttctggccggacatcgactgcctcgacctgcgcgccgccatgcgcctggacgccagcgtcacccccgagcgcatcgaggccgccgcgatcaatgccatgatcgaggccaaccgcgagctcgacctctaccgccgcgcccgtcaggaggaaggccacgccagcctggccgacgtgccggcatcgcagatcaaaggcgagagccagctgctgcacctctaccgccgcaccatctactgccgcgccaccgccgagctggtcgagcgctaccgcagctacgacgccaccaacagcggcgagcagaaggccaccgaagaaagcaccaacatcgacgagctgcgccgcgacgcgcgccacgccctgcgcagcatcctcggcatcagtcacaccacagtggagctgctctga

SEQ ID NO: 353913 - DNA, 210 bp, Pseudomonas aeruginosa
atggccgccgtgatcgccagccagggcgacaccgtcgacgccatctgctggcggtactacggccgcaccgccggcgtcaccgagctggtgctggaggccaaccccggcctggccgacctcggccccatcatcccccacggcaccccagtcaccctgccggatgccgccccccaagccgaacaacgccaggtgctgaacctatgggactga

SEQ ID NO: 353914 - DNA, 531 bp, Pseudomonas aeruginosa
atgggactgatctacctcgccgcctacaaaggcaagggcaagctgttcaaccgcctgatccgcctctggacgcgctcgcgctacagccactgcgagctggtcatgccagacggccgctggctgtccgcctcggccatggatggcggtgtgcgcgagaagcacatcgaactcaacctggagcactgggacctgttccccctgccctgggcatccgaggcgcgcatcgtggacgtcttcgctcgccactgtggcaagggctacgactggctcggcattttcctcagccaactgctgcccgtggccatcgacgaccgcctgcgcatgttctgcagcgagttctgcgccgctgccctcggctttcaggatggccagcgctactcgccggccctgctggtcgacgtggccacccgcatcaaccgcctgcccttcgtccagctcggccacagcctcaaggaacccacctggctcggcatcgatctggccagcggccacgactccaccgtcatcaccgaaaggactcaccatggctga

SEQ ID NO: 353915 - DNA, 387 bp, Pseudomonas aeruginosa
atggctgaaccaaccaccagcaccgtcgtggtcgctgccactgccggcgtaggcctcgccaccttcctgcccaacatggacggcaatgccctgttcggcgccatcatcggtgccgcgttgatcgccctgaatcagaaagacctcaaggcctggcagcgcctgttcggcctgatcgtctcggtcggtgccggctacgtcagcgccggcgagatcgtggcgcaaacccccatcacccaaaccggccccggcggcttcgtcggcgccattctcgtcgtgcccatcgccctcaaggtgctggccgtggtcgagcgcatggaactgtccgatgtgcaggcattcctccaggggctaatcccggcctggctcaagaagggcaaaggagagtga

SEQ ID NO: 353916 - DNA, 282 bp, Pseudomonas aeruginosa
atggccaccgccctgctccacctgatccccctcgccgccgcactggcctacctcgcctcggcactgcgcctgctgtgcttccagcgcaatggcgcccgcatccgccgtggcatctcgctgctggcctgcctgctgatcggcgccctgatctgcgccgggctggaaatcctcctctaccagcgccccgtcagcctctggcaagccgccatcgccgtgctgctgtgcatcctcgtttaccgctcacgcggcaacctcgccgccctgctgaggccatctgtatga

SEQ ID NO: 353917 - DNA, 840 bp, Pseudomonas aeruginosa
atgaccaagctccaacacggtgatcgcggccaggccgtgctccagttgcagaagcaactcaacgcccagggcaccaagctgttcgccgacggcgacttcggcgacaagaccgaggccgccgtgcgcgcctaccagctcagggtcggcctggtggccgatggcatagccggccccaagaccatggccgccctggccggcgcggactgccggcagctactgcgcaacgccaccatggtggctgccgctgagcgcctcggcgtcgagctggccgtggtctacgccgtcaacgaggtggaaagcagcggcgccggcttcctggccaacggcaagccgaagatcctgttcgagcgtcacgtcatgcacgcgcgcttgtccctggtccgcaacgagggcgacgacagcgccgcgctgatcgcccacgccgaccacctcgctgctctccacccgcacctggtcaaccgtcgcccgggcggctacgccggcggcaccgccgagcaccagcggctggcccaggcgcgcatgctcgacgccctctgcgcggacgaatcagcaagctggggtgccttccagatcatgggctaccacgccgcacgcctcggctacgccagcgtcgccgacttcgtcagccgcatggcccacgacgagaacgagcagttcgaggccttcgttcgcttcatcgaggccgacgcggcgctgcacaaggccctaaagggcaagaagtgggcgcagttcgccaaggcctacaacggcccggcctacgccaggaacctgtacgacgtgaagctcgagcgcgcctacgagcggcacgccagctgcggctgcagcaaagaggccgcatga

SEQ ID NO: 353918 - DNA, 444 bp, Pseudomonas aeruginosa
atgaccaccctgcgccaggccctctacggcatcgcactgctcggtgccctgggactgctgctgtggggccagttccagcgcatccaggccgagcaggcccgcgccgacctggccgccgagaaggtgcagcagctggagcaacgcaacgcccgacaggccgccaccatcacccgcctcgacggcgccctgcaggccgagcgcaccgcccaggcctcactgcgcaccacacaggatctgctgcgccagagactggccgccagcctcaaccagatccaggagctagaacgtgaaaatgccgaccttcgccaatggtccgctcagcctctgcctgctgctgctcgccggctgcgcgagcgccccgccctcaccggagccgctggttatcgccactggctgcccggccgtggtgccgtgccgcctaccgccggcacgcccaaccagtaa

SEQ ID NO: 353919 - DNA, 525 bp, Pseudomonas aeruginosa
atgaacaagccaaactccctgcgcgaccacctgctggccgccgtgcccgagctgcacaagaacccagaccgcctcctggtgttcatcgacaacggcagcatccgcagcaccgtagcccacggcctgtcgtttgagtacagctacaccctcaacgtcatcctcaccgacttcgccggccatccggacgctgtggccatcccgctgctcgcctgggtactggtcaaccagcacgaactgctggccaaccaggaaaagggaaaaactgccatccagttcgaggccgacgtcttggacaacagcaaggtcgacctctccatcaagctgccgctcaccgagcgcgtgatcgtcaaaaaacaggaaggtggcgccctggtcgtcacccatcctgacgaaccccagctggagcccttcctggaagccggcaactggcagctctacgccgaaggcatgctgctggccgagtggcagagcaccgtacaggacggcggcgacctagccagcccgcacccggtgcgtcatggctga

SEQ ID NO: 353920 - DNA, 453 bp, Pseudomonas aeruginosa
atggctgacaacctgcgcgccctggaagactgggctggtgccctgctcgccaagctagagccaggcgcgcgccgccagctcaaccaacagatcggccgcgagctgcgccgcagccagcagcaacgcatcgccgcccagctcaacccggacggcagcgcctttgccccgcgcaagccccgccagctgcgcgccaagaagggccgcatcaagcggcagatgttcgctaagctgcgccatgccaagcacctcaaggtgcagagcagcgcggatgccatcgccatcggcttcatgggccgcgtggcccgcatcgcccgcgtccaccagtacggcctgcgcgaccgtccggagcgtggccaggccgatgtgcagtacgaccgccgcgagctgctcggcttcaccgatgccgacctcgatctgatccgcgaaagcctgctcgaacacctcacccgctga

SEQ ID NO: 353921 - DNA, 537 bp, Pseudomonas aeruginosa
atgaacatcgccgacctgatccgccgcctcgaaaacctcgtccgccccggcaccatcgccgaggtggatctggctgccgcccgttgccgggtgaaaaccggcggcctcaccaccggctggctgccctggttcgccgcgcgcgccggcaccactcgggactgggacccgcctaccgtcgccgagcagtgcctggtcatcagccccagcggcgcccccgagcacggcttcgtgctgctcggcctgttttccgatgccaacccagccccgtccagcagcggaaccctgtgccggcgcacctatccggacggcgcggtgatcgactacgaccacgccaaccaccgcctcagcgccatcctgcccgccggtggccaggccgagctgcaggccaccggcggcatcaccatccttggcgacgtggccatcaccggcctggtgaccgtgagcgaagacgtgatcgccgccggcatcagcctggtcaaccatcgccacggtggagtccagtcgggcagcgccaagacgggagtgcccacaccatga

SEQ ID NO: 353922 - DNA, 354 bp, Pseudomonas aeruginosa
atgatcggcatgagcaacagcaccggccgcgccatttcaaaccgccagcatctggctcaatccgtggcggacatcctcaccacccccatcggcagccgcgtcatgcgccgcgagtacggcagccagctacctgacctgatcgactggccactcaacagcgccacccgcgtgcaggcctatgccgccacagccatggcactgatgcgctgggaaccgcgcatccagctcagccgcgtgcagctgttcctgggcgaacagcccggccaggccatcctcgaactggagggcagtgaagtcgacagcaatgaggcactgagcctgcgcgtgccgttgaaacttggagccgtcgcatga

SEQ ID NO: 353923 - DNA, 897 bp, Pseudomonas aeruginosa
atgagccagttcaccgccatcaacctcgcgctggtcgccgcccccaaggtgatcgaagagctggacttcgagcagatctactcggccatgctggccgacctggtgcagcgcattcccgagttcgacgcactgatcgagtccgagccagtgatcaaggtgctgcaggtggcggcctaccgcgagatgctgctgcgccagcgcatcaatgatgccgcccacgccgtcatgctcccctactcgaaaggcaccgacctggagaacctcggcgcgctgttcggtgtcacccgcctgctcatcagcccagccgataatgcggctgtgccgccagtagcagcggtttacgagaacgacgacgactaccgttatcgcatccagttgtctctggaaggcctgagcaccgcaggtccggagggtgcctatatcttccacgccctgagcgccgatggcctggtgctcgatgccagcgccatcagcccgacccctggcgaagtggtcatcacggtgctttccaggactgggagcggggtgccaagcagcgagctgctcgccactgtcgaggcggccctcagtgcggaaggcgttcgaccgctgaccgactacgtccaggtacaggccgccagcatcatcaactaccaggtcgaggccaccctgcacttcttcgcgggcccggacagggccgtgatcatggccaacgcccaggctgccatcgaggcctacgtcgccggccagcaccgcctgggcatggacgtcaccctttcaggcatctacgccgctctgcaccagccaggtgtgcagcgggtggatctggtcagcccggtggccaacctggtggtcgatcgccagagcgccacctactgcacaggcatcaccctgaccgatggtggcctcgatgagtaa

SEQ ID NO: 353924 - DNA, 549 bp, Pseudomonas aeruginosa
atgagtaaccagcccagcctgctcccgccgaacgccagcacgctggagctcgaggtcgagcaggtcaccgcacgcctgggcaatctgccagtgcccctgcgcgagctatggaatcccgacacctgccccgagcacctgcttccatggctcgcctggtcgttgtcactggacaactggcagccctactggccgttggcggtgaagcgggcacgcatcaaggccgccgtggagatccagcgccgcaagggcaccgccaagtccgtgcgcgacgtggtcggctccttcgggagtgccctggccttgcgcgagtggtggcagaagacgccgatgggggcgccccacaccttcgaggtggtcctcaccctgggcgctggcgtgccgaataccgccgcctaccagcaagacatcatcaaggagatcgagcggaccaagccggtgcgctcgcacttcacgctcactctcggcctatcggctacagccgggctcggcctgcagggcgcggccaggcctgtgacctatcgccgacttcaactgactgaggccccctaa

SEQ ID NO: 353925 - DNA, 1773 bp, Pseudomonas aeruginosa
atgccactacagatcaccatcactgacgccggccgcgccgagataatcaacgccgagaacaccggtaccggccccgtcgtcatcaccgagattggcttcgggactgggcagtacgcgccgagcaagacccaaccggccctgcaggccgaggtcaagcgcctgggcagcatcgccggccaggctgtggcggctgacacgattcacgtcatggccaaggacgaggggccggacgcctacaacgtgggcgagttcggcctgttcagctcagccggcacactgatcgccgtctattcacagcctgcggcctccggctggatcatccagaagtccggcgcatccaccctgctgctggccaccgacatcatcctcgaaagcctcgacgccaccagtctcaccttcggcgacatcctgttcatcaacccgcctgccaccaccgaggtgcagggcgtggtcgaactggccaccgaggtggaaactcaggatggactggacggaacccgcgccgtcaccccgctcggcctgaaatcgctcaccgccagcctcgtccgcgccggcctggtccagctggtcaacaccctgaccagttccagccagtcgatggccctgacagccgccatgggcaagaaactgcaggacgagaagcaaccactcgacgccaccctcacggccctggctggcttggtgaccgcggccaataagctgatctacgccaccggcgccgacacattcgccaccacagacctgaccgccttcgctcgcaccctgctggacgacgccgatgccgccaccgctcgcgccaccttgggcgctcagccgctcgacagtacactgacggcgctggccggcctggtgaccgcagccgaccagctgatctacagcactggcgccgataccttcgcgatgaccgcgctgagcgccttcgctcgtaccctgctggacgacgccgatgcggcgacggcccgagccaccctgggtgcgcaaccactcgacgccaccctcacggctctggcggggcttgtcactgcggccaaccagatgatctacagcaccggcgcagacaccttcgcgatgactgcgctgagcgccttcgctcgcaccctgctggacgacgccgatgccgccaccgctcgcgccaccctgggcgctcagccactcgatgcaacgctgaccgccctggctggggtggtcacagctgccaacaaactgatctacgccaccggcgccgatacattcgccaccactgacctgacggctttcgcccgaggtctgctgggcgatgcctctgctgccgatgcacgcaccacgctaggtgcccagcctctggacgccacgctaaccgccctggctggagtggtcacggctgccaacaaactgatctacgccaccggcgccgatactttcgccaccactgacctgacggctttcgcccgaggcctgctgggcgatgccaccgctgccgaagcgcgcaccacgctcggaatggccgatgtggtgacctccaagggcagcaacgcgaacggctcttaccgggtctgggccagcgggagaaaggacatgatcatcggtgcggtcgccctcaccgcgcccagtttgaccctgaccttaccgattgccctgaatacgaccacgggggccaatgcgcgagccaccattctggggggggccggatacaccagcaccctagccattgaggttctgagcacgactcaaatccgggtctactgcgcgcagaactgcaacgtcatgatcgaactgaacggagacattgcctga

SEQ ID NO: 353926 - DNA, 573 bp, Pseudomonas aeruginosa
atgcgccttttcgacacggcaacccgcactgaggtgctccctggtattcacgccatcaccgcaacagtggtcgaacttccggacgatcacccgttctttctgcccttgccgcctggcatgcgcctggacttcggtgctgacggccttccggtactggttcaacaggaagcgcctgtggtaacggtggcagcgctgtgcagcgccatcgacgtggccgccgatgccgctcggcgcgccgtcgccggcgacccgctgcgcgccgtggaatacgagaagtcagccgccgaggcgcaggccttcaaggatgccggctatccagccggcgcagtgccgcgcacagtcgccgcctgggccatcgagggccgcacggcgcagcaggcagcggacagcatcctggccgaggctgccgcctacaacgaggcgctctaccagattcgcgaggcgcgcctgcaggccaaggcaatggtcagagcggccatggatgccgggcagatcgagcaggcgcaggacatcgccgccgaaaccatcgctgccatcgaggccgccgtggccggcattggcaacaacgcctga

SEQ ID NO: 353927 - DNA, 1188 bp, Pseudomonas aeruginosa
atgccagccgattaccatcacggcgtccgcgtcgtcgaaatcaacgagggcacccgccccattcgcaccatctccaccgctgtgatcggcatggtctgcactgctgacgatgccgatgtcgccgccttccccctcaacacaccggtgctgatcaccaacgcgctcaccgccatcggcaaggccggcacgtctggcaccctggccaagagcctggacgccatcgccgaccaggccagccccatcgtggtggtggtgcgcgtggctgagggtgttggcgcggatgccgccgccaaggaagccgaccagaccaccaagatcatcggcggcgtcgtggatggccagtacaccggcctcaaggccctgctggcggcagaggcccagctgggcgtgcgtccgcgcatcctgggcgtcccggacctggacaacctggccgtcaccaccgagctggtcgccatcgccgagaagctgcgcgccttcgcctacgccagctgctgggactgcgcgaccgtctccgaggccctggcctaccgcgccggcttcggtgcccgcgagctgatgctgatctggccggacttcgtcaacttcgacaccgccaccagcagcaccaagcccgccagcgccgtggcccgcgccctgggcctgcgcgccaagctggacgagcaggtcggctggcacaagaccctgtccaacatcccggtcaacggcgtgtcggggctgtccaaggacatctacttcgacctgcagaaccccaacaccgacgccggcctgctcaacgccgacgaggtcaccaccctgatccgccgcgacggcttccgcttctggggctcgcgcacctgctcagctgacccgttgttcgccttcgagaactacacccgcaccgcccaggtgctggcggacaccatggccgaggcgcacttctgggccgtggacaagcccatgcacccgtccctggtgcgcgacatcgtcgagggaatcaacgccaagttccgcgagctgagccgactgggctacatcatcggcggcgagtgctggtacgacgagacgctcaacgacaaggacaccctcaaggccggcaagctgtacatcgactacgagtacacccccgtgccgccgctggagaacctgaccctacagcagcgcatcaccgaccgcttcctggtcgacttcgccgcccgcgtcaacgcctaa

SEQ ID NO: 353928 - DNA, 516 bp, Pseudomonas aeruginosa
atggccctgcccaagaagctcaagcacctcaacctgttcaacgacggcaacagctacctcggcgtcgccaagtccgtcaccctgcccaagctcgggcgcaagctggaggcctatcgcggcggtggcatggacggcccggtcaaggtcgacctcggccacagcgacgacggcctggcgctggagtggacgcttggcggctgggacctgatcgctgtgcgccagttcggcgccaccaaggtcgacggcgtgcagctgcgctttgcaggctccgtgcaacgcgacgacaccggcgaagtcagcgccgtggaaatcgtcgcgcgcggccggcatgaagagatcgacttcggtgatgccgccccaggcgaagacaccgagcacaagatcaacaccgccctcagctactacaagctcagcgtcgacggcgaggttctggtcgagatcgacctgctcaacttcgtctacatcgtcgacggcgaagaccgcctggccgagcaccgcaaggcgctgggcatctaa

SEQ ID NO: 353929 - DNA, 327 bp, Pseudomonas aeruginosa
atggcaacccccgagaccaccgacaaggcccagaaccccaacgaggctgtcatcaagctcgacacccccatcaagcgcggcgaaaccacccacgacaccgtcaccctgcgcaaacccatgagcggcgagctgcgcggcgtaaccctggtcgacctggtgcagatggacgtgctggccctgcgcaaggtgctgccgcgcatcagcacccccagcctcaccgaccacgagatcggcaccatggacccggccgacctgatggcctgcggcgtcgcggtgtccggttttttgctgcagaagtcggcgaaggaagctgccctcgttgcgtag

SEQ ID NO: 353930 - DNA, 2595 bp, Pseudomonas aeruginosa
atggccaatgacttgaagatggaggtcatcctccaggccattgaccgagccacccgccccatccgcgccatcacccaggggagcgtcggcctcggccgcgccctcaaggaatcccgcgaccagctcaagacgctgcaggaacagcagcgcgacgtcagtagctggcgcaccctgcgcgccgccagcgagcagaccgaaaccgccctgcaggctgcccgcgatcgcgtgaaggccctcggcaaggatctggccgccaccggcgtgcccacccggcagatgacgcgcgacctcaagagcgccatccgcgaggccacggccctcaagaagcagcaccaggagcagcaggtacagctccagggccttcgcagcaagctcggcgctgccggcatcagcacacgcaacctcagccagcacgagcgcgacctgcgccaacgcatcgagcagaccaaccagaccatcaccgagcagggccggcgcatgcaggccctgagccgccagacgcgccaggctgcaatcgccaaggcgcagttcgacaaggcccagcaggtggccggaggcatggcggctggtggtgccgcgggcctcgccaccggctatgccttggccaagcccctgcagggcatggtggatgccttcgcccccgccgagaacgccgccacccagctcaaggtggcgatgatggacaagaacggccaagtcgccgccgacttccagcgcatcaccgatctggccacaggccttggcgaccgcctgcccggtaccacggccgacttccaggagatgatgacgatgctgcgccgccagggcatgagcgcgcagtcgatcctgggcggtaccggcgaggctgccgcctacctgggcgtgcagctgcagaaacccgcggccgaggccgccgagttcgcggccaagatgcaggacgcaacccgcactgccgagaaggacatgatgggcctgatggacaccatccagcgggcctactacctgggcgtcgatgacaacaacatgctccagggcttcaccaagctcagccccgtgatgggcatcatcaagaaggaaggcctcgaggccgccagcacgctggcaccgctgctggtgatgatggatcagaccggcatggccggagagtcagccggtaacgctatccgcaaggtgttccagtctggcgtggacgagaagcgcttcaccaaggccaacgccgccctggccgagatgaaggccggcttcaatctggacttcaccaacggcaagggcgagttcggcgggcttgataacctgttcgcccaactggagaagctcaaaaagctcaccagcgtgcagcgcaccagcgtgatgaaggagctgttcggcgacgactccgagaccctgcaggtggtcaataccctgatgaacaagggtttggccggctaccaggaagtcgccgacaagatgcaggcccaggctgacctgcaaacccgcgtcaaggagcagctcggcaccctgagcaacaccatcgaggccgcccagggcagctggagcaacgcgatggccgagatcggcgccaccgttgcgcctgaactcaaggacctgatcaacgacctcggcaacgtcgccgtgcgcgtcaaggactgggtcaaggccaaccctggcctcactgctgccatcttcaagaccgccgccgggctggccctgctgctcaccgtagggggcggcatcaccgtgatgctggccagcatgcttggcccgttcgccctggcccgctacgccctgaccctgttcggcctcaagggtgctggcttgggtagcgtccttttcaacctgggcaaggtggcactgccccttgtctggaaaggcatcctgctgatcggccgcgcgctgctgatgaaccccatcggtctggccgtgacggccatcgccggcgccgcctacctgatctacaagaactgggagccgatcaaggccttcttcctcggcctgtgggaggagatcaaggccggcttcaacggcggcttcgccggcatcgccgcgctgatcctcaacttctccccgctgggcctgttctaccgcgccttcgccgcggtgatgaactacttcggcgtcgatatgccggccaagttctccgacttcggcggcatgctcctggacggcctggtcaacggcatcaagaacaagctcggcgccgtgaaggacgccatcagcagcgtcggcgacagcaccgtcggctggttcaaggagaagctgggcatccactccccgtcgcgcgtgttcgccgagctgggcggcttcaccatgcagggccttgagcaggggctggtgggcggccagggcggcccgctgggcgctgtcacggccatggccaagcagctggccgcggcgggcgccgtcaccttcggactgtctggcccggcgatcgcaatggacaaccgcccgccactctcgccggtaccggtcgcgggcgcgcgcgccgctgcggcgccgctgcccccggtgaccgtcaacgtctacccatccgccggcatgaacgagcagcaactggcgcagctggtcggccagaaagtggccgaggccatgcgtgccagccagatccgcaaccgcagctcgctgagcgaccaggagtaa

SEQ ID NO: 353931 - DNA, 441 bp, Pseudomonas aeruginosa
atgatgatggccctcggcatgttcgtattcagcctggagaccctggcctaccaggagttccagcgccagaccgactggcgccacggctccaccagccgcatcggcaccaacccggcgcgccagtacatgggccgcggcgaagacagcattaccctgccgggcgtgctgctgccaggcctggccggtagcccgctcagcctcgacacgctgcgcatgatggccgacaccggaaaggcttggcccctggtgcagggcgacggacgtatcttcggcctgtgggtgatcgagtcgctcagcgagacgcgcaccctgttcttccgtgacggcgcggcccgccgcatcgagttcaacctcaagctggcccgcatcgacgacggccgcgtcgatctgctcggcagcctcaccggcagcgtcggcggcgtcctgcgggggctgctgtga

SEQ ID NO: 353932 - DNA, 1260 bp, Pseudomonas aeruginosa
gtgaacgtgctcgagcaagccggcgcactgctcggcgaagcggcaaaccgctaccgcgaggccaccagctaccccaagccgatctgccgcgtgatggtcaacggccgcgacatcaccctcgacatcgagcagcgcctggtcagcatcgagctgaccgacaaccgaggcatggaggcggaccagctcgacatcaccctcagcgaccatgacggcctgctggccatcccgccccggggcgccaccgtgcgcctgtggctgggctggagcgacaccgggctggtcgacaagggcagctacaccgtggacgaaaccgagcacagcggcgcgccagacacgctcaacatccgcgcccgcagcgccgacctgcgcgggggcctcaaggccaaacgcgagcgcagctgggacggcgccaccctcggcgcggtgatagcctcgatcgcggcagcccacggcttggcgccagtggtcagccctctgctcgccggcatcgaactgctgcacctggaccaagccaacgagagcgacgccaacctgctcacccgcctcggccagcagcacgacgccatcagcaccatcaaggctgggcgcctggtgttcatgccagccggcaaaagcaccaccgccagcgggctggctttgccccacgtcaccctctcccgggaagacggcgaccagcaccgcttcctgcaggcagaccgcgacagctacaccggcgtcaaggcgtactactacgagatcaacagcgccgagaaaaaggaggccatcgccggcggcggcgacaacctcaaggagctgcgccacagctacaccgatcaggccagcgccctgcgcgccgcccgggctgagtggaaccggttgcagcgcggcactgccacgctcagttacaccctggccaagggccgcccggaactgacaccagatcagacctacagcctgctcggcatcaaggccgagatcggcgccatcgtctggctgggcggcaacctgcgccacagcttcacgccggagagctacaccaccagcctggagctggagtccaagctgcccgacggcgacgacgtggatctgctggccgacaacgacggcgactacaccggcgtcgtcgcctggtaccgcgacgagaagacaggggagcagaagcagatcaccgcgggcgaccagaccaagcccaagcgcctgacgcacctctacgccagcaaggccaacgcgcagcgggctgtggatcgggagtggaagcggctgcaagaatcgcagacataa

SEQ ID NO: 353933 - DNA, 741 bp, Pseudomonas aeruginosa
ttgattcagcagaacttggtcaaactgaatgttgttgaggtctacccgcagcgcaccggaacggcgcacgcggggggcttttgccagtgtgacaatggcatggactatgcctttaaagccgcgcgtccgaattcgttgttcgtgcctgcaacggaatggctttgcagccatctgtcgaacgcctgtcggatccagacgccgccgatggacatcctgcatacgccagacgggcaagtgtggtttgggtcaaggattgaaggcggcaagctcgacgaagatgactgcctgctggagctgcaggccggcgagatggccttgaaggtacctaacctgcaagagcgactctcaatgatctacgccctggacctgttcacaaacaatacggatcggcatggtaagaactacctgttccgcaccagcttgcagcggacggtgatcatggccttcgatttcagtttcgcctggctggcccatggccctcagctgcggggctatcctgatgggagcactaacaccaggcagtggcaggcggttctggctagaatgtacggctttgatgtgaaaagcgcgcatggcgtgcttaaggcgatccaggcgctgccagacgattggatcgacggcccggtgaagtccatgccggacgaatggaaggatggagtggatattggcgctgcagtggcctggtggaaaagcgatgagcgtccacagcgctgtgcgttccttacgggggcgataaagtga

SEQ ID NO: 353934 - DNA, 555 bp, Pseudomonas aeruginosa
atggctttcgactacaagaacgcaacgcctgaagcattgaaggctgaatacaaccggattgccgccgagatcggcgacgaccagttcttcaccaagaaagagctgaaccacctccccgaggtacttgccaccggcgagcaggtactggcgttcacttccggtttcatggacggcaacacctggctgatcacactgactgaccgccgggtgattttcctcgacaagggtatgctctatggcctcaaacaggcctctatcgagctggacaagatcaacgcggtatctggtaagaccggacttatgttcggcgagatcctgatccaggacggcggcaacgagaggaaaatcagtaacgtctggaagaagactgtcacggcgttcaccaacaaggtgcgcgacgccatgcacgccaagaagcagccagcggcgcgggcgccagctggtgaagacgacatgatcagcaagcttgagcgtctggccacgctgcgggacaaaggggtactcaccccggaagagttcgcggagcagaaggcgaagatcctgagcgccgtttga

SEQ ID NO: 353935 - DNA, 495 bp, Pseudomonas aeruginosa
atgaacgcaactgcctcacgcctcctgtacatcgccttggcgctatgccagccactggcacccacggccgttctggccgacgaatctgccatccaggcccattgccaagatgaatggccggctgatgccgatatgcgcgcctattgcgtaggcgagcaacgccaggccgccaaggcgctgggcgggtatagcggctctgttcgtgaacgctgcgaggccgagtggctccctgatttcgaaatggcgctgcattgcaccaaggaacagcgtgccgcagaggctgccgtggccagcgccccccaagacgagataaccagccgctgcgcccgtgaatggcccggcgagtacgacatgcaagagcactgcgccaaagagcgcagggcctccaaggacaacattgagcgcaattattcaggcgccacccgccaagcctgcgagcgagagtggggcacggaatacgagatggttgagcactgcattgaggaaggggagtaa

SEQ ID NO: 353936 - DNA, 339 bp, Pseudomonas aeruginosa
gtgggaatcggggagcgcctgaaagaagagcgagagcggcttggccttagccagaccgacttcgccgcattggctggggcatcgaaaaacacccagtacaactacgagaaaggcgaacgcagcccggatgccaactacctgtcggctgctgcagagcagggtgtcgacgtgctctacgttctgaccggcgagcggcggctatcggcatcagagggtattagtgccgaagaggccgccctggttaccgcgtttcgcagcatgagcgacgccgagcgctcagtgttgcgtcgcatctccggttccctcaccagctcacacaagctcagcgacacgctttga

SEQ ID NO: 353937 - DNA, 468 bp, Pseudomonas aeruginosa
atgaaacgcccaatcctcgacagccgccgcaaggtcgccatggccatcgtcggcgccttcccgggaggccgtgagtgcgccgccaccttcctggggctggacctcaagcgcttcgacaaccagctctacgagagcaccgggcaccgcccgctcagtgatgaacagctgcagcagctggagcaggtcagcggcacccattacctgccggactacatcgccggcctgtacaacggcctgttcaccgcgctgccggatgcctccgagctggacaacgtggagctctaccacctggccctggcggctgacgtgaaggaaggccagctcaaccagaccatcgctgacgcgatcggcgacggcatcgacaaccaggagctggcccagatcctccaggtgcatcgccagcacctggccgcgctgcacaccgaggtgctcgccgtcatcgccctgcacaggaaggccaagccatga

SEQ ID NO: 353938 - DNA, 309 bp, Pseudomonas aeruginosa
atgagcacgatgaacaacggcggttacaagtgcctgtgcccggcctgcggcagccgcatgcgcatccgcaacagcgagtcgcagacgcccatcttcaagaccatgtacgcccagtgcaccaacttcgcctgcggcgcgacattctccggctcgctcacctgggattacgcgctcagccccagcggcctggacaagccgcgcgtggcgctgccgctcgcgccttcggtgcagcggatgcaggccctgcgcgacagccagccgaaaaccaaccaactcgatctgctcgaccacgtgggggccaccgcatga

SEQ ID NO: 353939 - DNA, 378 bp, Pseudomonas aeruginosa
atgaacaccgccaaccagcagcacccggaagccggccaggactaccgcagcgccatgcaggccgcagcctatgccttcctcgagcgccaccaggccgaacacctggcagacgagcaaaccctgttcacccgcgcagtgcagcacctgcagctggtcctggacgtgccccagtacctggccgagaacctggtcgccctggcctatggcgagctgcgctcagccggccagcgcatgcagctggacgtcgccaacagcagcgggtcaaccgccatgatcaccgacccggccagcggcctgacctttgccgtgccggtggctctgattgtccgccacctgatcgccaaccccgcccggcgcaccctgcgcaaggtcggttaa

SEQ ID NO: 353940 - DNA, 234 bp, Pseudomonas aeruginosa
atgccagaagccgtcgccatccagttggacatgccgaagcccgtagccgaggccctgctcagcagcctgcgctgcgagctacgccgcggcctgaccgagcactggtacgacgaccgctaccgggccgtgccggagttccagcgcagccgccgcatcctcgacgactacccggccctcgccggccacaaacgcaccattggcgcgctgaaagccgccctcggcgccaacgagtaa

SEQ ID NO: 353941 - DNA, 2718 bp, Pseudomonas aeruginosa
atgcagatgaaagaatcactacgggccgaggtgctccggcgcattgagcgagacttcgagctcaagcacatgaccggcaccaactacatgcgcaagggcaagtgcccggcgcacagctgcggcaagaagaccctgtacaccttccacgactcgccttggatgctgatctgcgggcgcccggagaagtgtggccaccgtgtccacgtcaaggagctgtatgacgacctgttcaacgactggagcaagaccgcaccggccacagctgaaaaccccaccgcgacggcccgcgcctacctggagtttgcccggggcttccgccttgacctgatcgagggctggtttacccaggagaactactggagccgcgacatcaacgccggcagcgcgaccgtgcgcttcccgctggagaagggcggctactgggagcgactgatcgaccgccccgagcgcttcggcaagcagaaggcccgcttcaagccgggcgagagctacaagggcgtctggtggtgcccgccgagcgtggatctgctggaggtcgacgagctgtgggtggtggagggcatcttcgacgcgatcgccctgctgcaccacgacaccgctgccgtgtcgatgatgtccagcgcgcccttcccggccgagtccctgcaggcgctgatcaagctgcgcaccgaggccggcaagcgcctgccgcgcctggtctgggcgttggataacgagccagtagcccgggccaatatgcgccgctgggcaaaggaggcgcgcgagctgggcttcacctgcaaggcggcggtcatcccgcagcgcggcggcaagaagaccgactggaacgacctgcaccagcgctgggccttcatcgaggacgccgacgaccgggcgaagcgcatcgaactcgacctcaaggaggcccgccacgagggcgacctgctgctggcggaaagcgccgaggagaagggcctgctcatgtacgactgggcgcccaaggccgagttttccttctcgttcaagagccgcctgtactggttcaaattcgacatggagaagtacgaccgcaccctgcgcgagctggaggaatccgagcgcatcgaggacaagcagctcaacgaaaagcagcgccgcgagaaggccctgcgccagtgtggctctgtggtgcgcatcgccaactgctatttccaggcgctgtactacatgcgcaacgagctgaccgacgaggcctggtattacttccgcgtcgagcgcccggacggcccggccatcaagagcacattcagcgccgcgcagctgtcctcggcgccggagttcaagaagcgcctgctcaacgtggccaacggcgccatgtacaccggcaccccgctgcagctggagcgcatgctcgagccgcagctcgatcggctgaaaaccgtcaacaccatcgactggatcggctacagccgcgagcacggcgcctacgtcttcaacgacctggccatcgccggcggcaaggtctacaagctcaacgaggaggacttcttcgacgtcggcgcgctgagcatcaagtcgcagagccagtcgccggtgctgcagatcaacaccgacctcagcgcctacgacgagagctggttcgacgtgttctggcgctgcttcggcgtccgcggcgtggtggtgctggcctggtggctgggcgccctgaccgtggagcagatccgccaggtgcagaagtctttccccttcctggaactggtcggcgagcccggcgcgggcaagtccaccatcgtggagctgttctggaagctggtcggccggatggagtacgagggcttcgacccgtccaaggccaccccggccagccgggcgcgcaacttcgcccaggtgggcaacctgccggtggtgctgatcgagtccgagcgcgagcagcaggacggcgcgccggtgaagcactacgactgggacgagctcaagaccgcctacaacggccgcagcgtccgctccaccggcgtgaagaacaacggcaacgacacccgcgagccgccattccgcggcgccctgctgatcgcccagaacaacccggtcaaggcgtccgagccgatcctgcagcggatctgccacgtccacctcaccagcgagaaccacacgccgcagaccaagcagctggccgagcagctggagcgctggccgatcgagagcgtgagcggcttcctggtcaaggccctgcagcgcgaacaggagattgtgcagaccgtcaccgagcgcacctccggctacgagcaggagctgctggcccgcccgggcatccgcacggtgcggatcgccaagaaccacgcccagctgctcagcctggtggacgcgctggccctggtcgtgccgctcggcgaggagcgtgtcgccctcgtgcagcaggaagtcgcccgcatggccgaggaacgccagcaggccatcaacgccgaccacccgaccgtgcgcgagttctgggacctgtacgagttcctcaacggcatggacgacgacggcggcgcgctgaaccactcgcgcaagcagggctacatcgccgtcaacctcaacgagttcgtcgagatggcggccaacaagcggcagcaggtgccgccgctgggcgaactcaagcgcctgctcaagaccagcaagtccccgaagttcgtggaatccaacaaggccatcaattccgcgcggcagaccgacgcgttcaaccgcgccaagaccgtccgctgctggctgttccagcagtga

SEQ ID NO: 353942 - DNA, 144 bp, Pseudomonas aeruginosa
atgcacaacgacgacaacgacgacatctaccaggccagccggcgcgaaaccctgctcacgctggtcatcagcggcctgaccctggcaacgctgatcgccgccggctacctgaccccctcactgctggccatcgcggcccgttaa

SEQ ID NO: 353943 - DNA, 273 bp, Pseudomonas aeruginosa
atgcaactgaacgtagaacgcggcgcaccgatgaccggcaagaccatccgactgcggcagaaagcccgcgaggccgggcaggacgagcaccagatcatccacggcaacgcctacaagcctgccgacctggagctgctagtgcgccaccgcatcagccgcggcgccaaggtcatctgcctcgacgaatgcagcgaagagcagatcgaacgcctgcagggcctcaagggcgacctgccggccgatctgaccatccacgccgtcgtggcgaactga

SEQ ID NO: 353944 - DNA, 213 bp, Pseudomonas aeruginosa
atgcagcagctctacgccgagatcaagaaaaccagcaagtacgcccaccaggccgactggtgccgcacccagggctatggctacccgttcaaggtgcgcatcgctttcgacaaggacggctactcggtgaaaggaggcgtcggcggccagtaccgcctggaagacgtgaacctgtacgtcctcgaggacggcaagaagatccgcgtgcggtaa

SEQ ID NO: 353945 - DNA, 174 bp, Pseudomonas aeruginosa
atgaagccctgcaccctcggcaaacgccacagctggaccttcgtccgcaacgtcgtcaccagccacctgagcggtcgtgtcggccgcatcaccaagcgcgggctctaccgctgcgaatgcggcgccgccaagtacggcaaccctggtcaccaggacgttggaggtgcccaatga

SEQ ID NO: 353946 - DNA, 276 bp, Pseudomonas aeruginosa
atgacctgcgcaggagccaagttgcggcagcggtaccaggagcgcatgcagcgggtcgccatcggcgcgcagctagagcggaagggccgcgtgtggctggtcatgaagcaacagcgcaccgaaaccggcgtcgtgctccagctgcgccatgggcgtcacgacttccgcctttatgtcccggtgaccctggacggcccggagctgtggcacgccgagttccgctcggcagcactgcctccagctcagcgcgagatgttcgccggaggtgcccaatga

SEQ ID NO: 353947 - DNA, 204 bp, Pseudomonas aeruginosa
atgaacaaccgcatccgcccgaccatggccagccatcgcctggacctgcccagcatctgcgacatctgcggaaaggcccgatccacccgcaagcacgccgcctgcagccgcacccgccagcagctcaagcaggacgagtgggccagctacatggccaacgtcgccgctaagaaagcccagggaggccgccgccatgcccgttga

SEQ ID NO: 353948 - DNA, 231 bp, Pseudomonas aeruginosa
atgcccgttgaaatccgctgccggtacaccaccggcacctacgtggccaccgtcaagggccagaagatgaccgccagcaacaccatcagcgcgcgccacgccgccgaggccatggccaccaagctgggcctcgatccggcccgcctggtggagcaacagcgcgacctgatcgaccagaaagaccgggttaccttcattcatccaggagagcaggagaagccccatgcctga

SEQ ID NO: 353949 - DNA, 261 bp, Pseudomonas aeruginosa
atgcctgagtgccgtttctgcgctggatcaggctgtaccgcctgccgcaacagcgggcgggagggcatcacctaccaggtgggcgcgctgctggacttccgcggtaccgacatcgaggtcaccggcttgctggaggcgcacctcgaagccgatcggctgatgggcctcgactgggagcgcccggtcgggatctggaccgggcagcagcatggctccgagctggtcgagatctggtaccagggagggcagttccgtggctga

SEQ ID NO: 353950 - DNA, 207 bp, Pseudomonas aeruginosa
gtggctgaccaggacgtccgccagcagatgctggaatgcgaggcgcgttactggctccggcgtgggaaaaccacgccggagaaggtcgaggacttgaaggaggtgctgatcaagaagcgcggcgaggcggcggccacccgcctggtcgaggagatgcgccggcaatggggccggcgtcgtgactggctggaggtgggcgatgcgtag

SEQ ID NO: 353951 - DNA, 213 bp, Pseudomonas aeruginosa
atgatcgggtcacctgcaggtgtgttgaccttcgaagacctcaagcgcatcaccggctacgcccgccgggctgacgtggagcggaccctgcacgaccagggcatccgcctgtttcgtggccgcactgggccatggaccaccgtggagctgatcaaccaggccggcgggctgaaagccggcaaccaggagcagtacggcgtcgagatcctatga

SEQ ID NO: 353952 - DNA, 141 bp, Pseudomonas aeruginosa; identical to SEQ ID NO: 339930

SEQ ID NO: 353953 - DNA, 1458 bp, Pseudomonas aeruginosa
atgaaacggtccttcctttccctggcggtagccgctgtcgttctgtccggctgctcgctgatccccgactaccagcgccccgaggcgccggtagccgcggcctacccgcaagggcaggcctacgggcagaacaccggcgcggcggccgttccggccgccgacatcggctggcgcgagttcttccgcgacccgcagttgcagcaactgatcggcttggcgctggaaaacaaccgcgacctgcgggtcgccgcgctgaacgtcgaggccttccgggcgcagtaccgcatccagcgggccgacctgttcccgcggatcggcgtggacggtagcggcacccgccagcgtttgccgggcgacctgtcgaccaccggcagtccggcgatttccagccagtacggggtgaccctgggcactaccgcctgggaactcgatctcttcggccgcctgcgcagcctgcgcgaccaggccctggagcagtacctggcgaccgaacaggcgcagcgcagcgcgcagaccaccctggtggccagcgtggcgaccgcctacctgacgctgaaggccgaccaggcgcagttgcagctgaccaaggacaccctgggcacctaccagaagagtttcgacctgacccagcgcagctacgacgtcggcgtcgcctccgcgctcgacctgcgccaggcgcagaccgccgtggaaggcgcccgcgcgaccctggcgcagtacacccgcctggtagcccaggaccagaatgcgctggtcctgctgctgggctccgggatcccggcgaacctgccgcaaggcctgggcctggaccagaccctgctgaccgaagtgccggcgggtctgccgtcggacctgctgcaacggcgcccggacatcctcgaggccgagcaccagctcatggctgccaacgccagcatcggcgccgcgcgcgcggcgttcttcccgagcatcagcctgaccgccaacgccggcaccatgagccgccaactgtccggcctgttcgacgccggttcgggttcctggttgttccagccgtcgatcaacctgccgatcttcaccgccggcagcctgcgtgccagcctggactacgcgaagatccagaaggacatcaacgtcgcgcagtacgagaaggcgatccagacggcgttccaggaagtcgccgacggcctggccgcgcgcggtaccttcaccgagcagttgcaggcgcagcgcgatctggtcaaggccagcgacgagtactaccagctcgccgacaagcgctatcgcacgggggtggacaactacctgaccctgctcgacgcgcaacgctcgctgttcaccgcgcagcagcaactgatcaccgaccgcctcaatcagctgaccagcgaggtcaacctgtacaaggccctcggcggcggctggaaccagcagaccgtgacccagcagcagaccgcgaagaaggaagatccccaggcttga

SEQ ID NO: 353954 - DNA, 1347 bp, Pseudomonas aeruginosa; identical to SEQ ID NO: 350690

SEQ ID NO: 353955 - DNA, 2043 bp, Pseudomonas aeruginosa
atgttcgcagcagccaaccagacccatttcagcctcgccatcgacggcctcgccctcgacctgcaggtgctctccttcagcggccgcgaagccatcagccagccgttcgccttcgacctggagctggtcggcgaacgccccgtgccggacctcgaaagcctgctgcacaaacccgccttccttaccctcgggcccgccggcaacggtatccacggcctggtgcgcagcgccggacagggcgactcgggcaagcgcctgacccgctaccgcatcaccctcgtcccgcaactggcctacctcgcccaacgcaccaaccagcgcatcttccagcatctcacggtgccgcagatcgtcggccgggtgctggaggaacacggcatcctcgccgacgcctaccgcttccagctcggcacccgctaccccgagcgcgaatactgcgtgcagtacgacgagagcgacctgcagttcgtccagcgcctgtgctgcgaggagggcatccactttcatttccagcacagcgccacggcgcacctgctggtgttcggcgacgaccagacggtgttcccgcggctcgcgccggtggcctaccagcaggactccggcctggtcgccgaccggccggcggtcaagcgcttcggcgtacgcctggaaacccgcaccagccgcgtcacccgccgcgactacgacttcgagaaaccgcgcctgacgctggaaagcgccgcccgcggcgaagcccggccggacctcgaggactacgactatcccggtcgcttcgtcgaccgcgagcgcggcaagcacctggccaggcgtgccctcgaacggcagcgcagcgactaccgcctggccgagggccgcagcgaccaaccgttgctgctcagcggccacttcctgccgctggccgcccatccccaggcgggctggaacgacctctggctgctcaccgaggtgattcacgaggggcggcagccgcaggtgctggaagaaagcatcgtctccgacacctcggcgagcccggacgacttccggcagggttaccgcaaccgcttccaggccacgccctgggaggcgttcttccgtcccccgccgacgccgccaaagtcgcgcatcctcggcacgcagagcgcggtggtgaccggcccgaagggcgaggaaatccactgcgaccgctacggtcgggtgaaggtgcaattccactgggatcgcgagggccaggccgacgacagcagcagttgctggttacgcgttgcctccggctgggcgggaaagaactacggcgccatcgccatcccgcgggtcggcatggaggtgctggtgaccttcctcgaaggcgcccccgaccagccgctggtcaccggctgcctgttccacagggaacatccggtgccctacgaactgccggcgcacaagacccgcagcgtcttcaagagcctcagcagtcctggcggcggtggctacaacgagctgcgcatcgaggaccgcaagggccaggagcagatcttcgtccatgcccagcgcgactgggacgaaaacatcgagcacgaccagaagatccgcgtcggtcaccaacgccacgacaccgtggaggcgaacagctacagcgagttcaaggccgaggaacaccgcaccacccacgccgagcgcaaggtggaggtccgcgccagcgaccacctcaccgtagccaacgaccagcacctgaagatcgccagcggccagttcgtcgaggccgggcaggagatccacctgagcagcggcctgaaggtggtgctggaggccggcgccgaactgaccctcaagggcggcggcagcttcctcaagctcgacgccagcggcgtgaccctctccggggccaacgtccgggtcaactccggcggcagcccgggcagcggcagcggcgcggcgccgctgttgccggggccgctgcggcaggccgacagcgacaaggccggcgccctcctcaccccggcccagatcaataccctgaagcgcaacgcgcccttctgcgaagagtgcgagaagtgcaaggacggtgcctgtgacctctga

SEQ ID NO: 353956 - DNA, 684 bp, Pseudomonas aeruginosa
gtggtgttccgcgtactgatcttctacgtgctggccatcgtcgtgctttccgccatcattccctggcaacaggccgggctgatggaaagcccgttcgtgcaggtgttcgacatggtcgggattccctacgcggcggacctgatgaacttcgtcatcctcaccgccatcctctcggtaggcaactcgggcctgtacgcctcgacgcggatcctctgggcgatgtccaggaccggcatggccccgcgcggcctgtcgaagctcagcgcgcgcggcgtgccgctctacgcgttgctgatcaccctgtgcttcgccctgctctcgttgctgaccagcgtggtcgcagccgacaccctgttcatggtgctgatggcggtgagcgggatgtccggcaccgtcacctggatcgtcatcgcctacgcccaataccgcttccgccgcgagcacatggccagcggcggcacggtcgccgagctgaaatatgccgcgccgctgttcccgctggtgccgctggcctgcatcgccgtgtgctgctcgctgttcgtcttcctcgccctcgatcccacccagcggccgtccttgtactggggcttcggcttcatcgccgcctgctacctggcctattacgtggttcgtcgccggcagccgcagggactgggcgaccccgccctgggacgggccggctga

SEQ ID NO: 353957 - DNA, 1329 bp, Pseudomonas aeruginosa
atgagtcccttcgcgccattcgatgcccagacccaggtcctgctgatcgacgacgatccgcacctgcgccaggccctgcgccagacgctcgacctcgccgggctcaaggtcgcgaccctggacgacgcgcgccagctggataccgcgcagtgcaaggactggcccggggtggtggtcagcgacatccgcatgcccggcatcgatggcatggaactgctccgccaattgcacgaacaggacgccgacctgccggtgatcctgatcaccggccacggcgacgtgccgctggcggtccaggccatgcgcggcggcgcctatgacttcctggaaaagcccttccccagcgacgccctgctcgacagcgtgcgccgcgccctggaggtgcgccggctggtcctggagaaccgcaccctgcgcctggccctggccgaacgccacgaactgcatgggcgcctgatcggacgctcggccggcatgcagcgcctgcgcgagcaggtcggctcgctggcggcgatccaggccgacgtgctggtccttggcgaaaccggcgccggcaaggaggtggtcgcgcgggccctgcatgacctgtcgagccggcgcgacggaccgttcgtcgcgatcaacgccggcgctctcgccgaatcggtggtggagagcgaactgttcggccacgaggccggcgccttcaccggcgcgcagaagcgccgcatcggcaagttcgagtacgccaatggcggcaccctgttcctcgacgagatcgagagcatgagcctggacgtgcaggtcaagctgttgcgcctgctgcaggaacgggtagtcgagcggctcggctccaaccagctgatcccgctggatatccgcatcatcgcggcaaccaaggaagacctgcgccaggccgccgaccagggccgcttccgcgccgacctctattaccgcctcaacgtcgccagcttgcgcatcccaccgctgcgcgagcgcggcgaggacatcccgctgctgttccgccatttcgccgaagccggcgccatgcgccatggcctgacgccacgcgaactggacgccggccagtcggcgcggctgctggcctacgactggccgggcaacgtgcgcgaattgcagaacgccgccgacgagccgcacaacctcagcgccaaggtcgaggccttcgaacgctcgctgatcgccgccgagctggaacgcccgcacaattcgctgcgcagcgtcgccgaggccctcggtatcccgcgcaagaccctgcacgacaagctgcgcaagcacggcctgccgttcaacacgcctggcgagaatccgccagatgatggcgaatga

SEQ ID NO: 353958 - DNA, 492 bp, Pseudomonas aeruginosa
atgccgcaatcggctccgcaggccgttcccgcggctgatgtagcgccggtgctgaccgctcaggagtatcttgagctgcgcacgcctcgggtgcctgacgtgccaagctccgcgccgatctacgacgagttgacgaagccggtgacgtatcccaagccgttctgcctgtcgtccagggacgaagagcttgtgcggcgcaatgcgctgaaaatggagctgggttatcgttcgggccgcttgtacggttgccgctgcaacagccagcaaggcacgcggatgctgatcagttttgacgcgtgcatgaactacgtggagaacggtgcgtttgatccggcgattcctgatcgcgttgtaggcgcaggcgggttcgggccaggcgagggacgagccggtacgatcccgcaggcgccgaccggtcgaccggttgagccggtcagccaggcgcgtgtcactgtggtgcctgatacgagccgcttacctcgcacgttgtga

SEQ ID NO: 353959 - DNA, 261 bp, Pseudomonas aeruginosa
atgcaacggaacagtaacggaatgctcgacgtgctgtgcatcgaactcttggtcgtgtgcctgcacatggttctggttctcctgatcctgttcgcgctcaatcaatgggggctgctcgttcgagagttggcgagatccgcgatggtttttgtgctcctttctgatgtggggattcttgggatgctcggctttacctgcttagtacgagcggtaatcagcctgtcgagtgctatgaaggagatcaagtatgaaaccgagtaa

SEQ ID NO: 353960 - DNA, 240 bp, Pseudomonas aeruginosa
atgacgctgatagccccccgcaagctgccaccgctgactgacgagcaggtgcgcgccggcgcgcggcctggcgaaacctgggccgaggcgcggcgccgattggaggcgctgaacgtggcgtgcccggcgccccaggtggatgaccacccaggagctgactacacgctggcgggtccggttgacgagtgcgaggggctggatggcaggcccatcgaatgggagcccggcgagctggggtag

SEQ ID NO: 353961 - DNA, 453 bp, Pseudomonas aeruginosa
atgcatcgttaccacatccatttcatgtccattaacgaggactctgacaaggccaatcgccacacacgccaagtcgagacgttggatcctatcgagtacgacaccgatattgaggcggtccagctatgggcagcagaagaagtcggcgcgaaggttgctgttcttctgtcctggcaagagctgaaaggcgctgagcggcctgatggcagaaaagccgtgccggttagtcagtcgaagcgaccccaagctgcgaagtgctacagccagaggctcagtgctgagcaaaatgcggccttggagcagttccaggcgctgactggttccccgccgatgctgctggaagccttcgaggcgggggagatcacggcggaggaactgtggcgtcagcatgtggcttgggtggagtcggtctgtgctgacgtgagcaacattcgcttccctgctgacggctga

SEQ ID NO: 353962 - DNA, 483 bp, Pseudomonas aeruginosa
atggccaagaaagaagaaggcggcgccgagttcgtcgcgcgcgattatgtgtatacaggccgccgcctgctgaagagcggcaaaatgggtgccgaagtgattgtggtcgtcaacggcgccctgggcgaacgcatgctgtttgaataccgtgccctgaagggcaaagcggttggcggtatctaccggggcgcgagcttttcagatgaacaggtgcgcaagctgggcgaagccacctaccaaggccaatggtcggacgatctggcccgtatcgactggcgttcacgcgacgaagccgccgaagccgagcagcgtaccgacaagctggaggccgacgccaagcgcttccacgaaatcgaagagctgctgttgccgttgcgcaagctgtacgccagctattcgcagcgccatgactacggcggaaaggaagcactagaagccgccgtgttgcgtgccttgcgccgtcggccggcaaagaccgcgtga

SEQ ID NO: 353963 - DNA, 180 bp, Pseudomonas aeruginosa; identical to SEQ ID NO: 336161

SEQ ID NO: 353964 - DNA, 444 bp, Pseudomonas aeruginosa; identical to SEQ ID NO: 353136

SEQ ID NO: 353965 - DNA, 264 bp, Pseudomonas aeruginosa
atggctatcgagatcagccgccagtcgtacctgtcgctccggtcctccctggagctggaactgctcgatgccggtatcgactcgcctgagctgctgagccggcttatgcgccacgtgcttgcctccgaatccgcgacccgtaccgagtcgcaaaccgttcgccgggctttcgttacggcccgtagaaacccgctgctgggcgcaatccctcagcacagtccagggcgcacaaatcgcccgtatatccgcaagaggaaaccctaa

SEQ ID NO: 353966 - DNA, 489 bp, Pseudomonas aeruginosa
atggctacccccgtcttctgggaaggcaacatcggctcgacgccggagcaccgtagcttccccaacggcaacaatcccccgcggcagttgctgcgtctcaacgtgatgttcgacaactcgattcccgatggccaaggtggctacaaggatcgcggcggcttctggtgcagcgtcgagtggtggcatcaggatgcccagcgcttcgccgaactgttcgcgaaaggtatgcgcgtcaaggtcgaaggcagggcgatcatggaccgctggcccgacaaagagtcaggggaagaagtccaggcgctgaaggtcgaagcctcgcgcatttccatccttccgcatcgcctggccgaggtcaccctgttgccgtctaccaacggccagtcgacacaacatcagcagtctcggcaggtgccgcagcaacctgctcagcaggatgcgcaatcgcagcaggactacgacagcgccttcgacgacgacatccccatgtag

SEQ ID NO: 353967 - DNA, 975 bp, Pseudomonas aeruginosa
atggcccaatatgacagcgcctacaaactcctattctcccaccccgacctggtccgcgacctgctccgcggctttgtccccgaacagtgggtccagcacctggacttcagtaccctggagaaagtcagcggccaattcgtctccgacgacctgcgcgaccgacacaacgacctgctatggcgcgttcgcctcgacaatgaccactggatctacctctacctgttgctcgagttccagagcaccgacgactactggatggccattcgcctgatgacctacataggtctgctttaccaggacctcgcccgacagagggtcgtcttgcctggacagcctctaccaccggtcttccctatcgtcctctacaacggtagcccccgatggagcggcccgctcgacaccgccgacctgttcgagatccccgcggactcgcccctggccgcctataaacccaaactgcgctatttcctgctcgacgaacgacacctggatgtcacaaccttgcccaaggacgacaacctggtagcccaagtcctgcacctggaaaacagcgctcacccacaacaagcgatccgcgccgtcgaaacgttgcaaaagctgttgcacgcccccgaatgtgatagtgtaaggcgtgccttcaacgtctggatccggcataccgtcgccgaaaaactcaaccggcaagccaaccagctaccgtcgaccgaaaccttggaggacatctacatcatgctcaccgaacacaccggacaatggtccgaaacctggaagcgcgaaggtcttcagcaaggtcttcagcaaggacgccaggaaggtcaggcggcgctattgacccgattggcggagcgccgctttggcccgctgtcggctgccgatcgcgcccggctggaagccgccacccaggcccagctcgaagcctgggccgacgccatcctcaccgcccagagcctggctgagctgttcaccgctcactga

SEQ ID NO: 353968 - DNA, 225 bp, Pseudomonas aeruginosa; identical to SEQ ID NO: 338879

SEQ ID NO: 353969 - DNA, 621 bp, Pseudomonas aeruginosa
atgcgcctggatccggactacatgatgatcggcgaagtgcgcgacctcttcgccgctgtcgccgccttccgtggcgcgatgaccgggcacggcctgtggtcgaccctgcacaccaacagcgcgatcggcattgtccagcgcctcaaggacctgggcgtcgaccccggcttgctgttcgatccggccctgctgaccggcctgatcaaccagagcctgctgcccaagctctgcccccactgcaaagtgcgcttccaagaccaccaagaccagctcgcgcccgatctggtcgaacgggtccagcgcttgaccgatgtttcccaggtgtacgtcaaggggcctggctgccaggcctgccgtggctccggggtcaacggccgctcgatcgtcgccgaggtggtgctgcccaccctggccttcatgcgtgtgttcgccaaaggcggcccagccgaggcacgcaactactgggtcaagaccatgcagggcatcaccaagcacgcccacgccatccgccgcatcaacgagggcatgttcgacccgcagatggtcgaggatttcattgggccactcgacttcgatgagcatctgctcgacgacagcttctactcgcaggaggcgtgctga

SEQ ID NO: 353970 - DNA, 492 bp, Pseudomonas aeruginosa; identical to SEQ ID NO: 353958

SEQ ID NO: 353971 - DNA, 294 bp, Pseudomonas aeruginosa
atgaaaaccgccactgcgccgttaccaccgctgcgttcggtcaaggttctggaccagttgcgtgagcgcatacgctacttgcattacagcttaccaaccgaacaggcttatgtccactgggttcgtgccttcatccgtttccacggtgtgcgtcacccggcaaccttgggcagcagcgaagtcgaggcatttctgtcctggctggcgaacgagcgcaaggtttcggtctccacgcatcgtcaggcattggcggccttgctgttctggctctgttgcaaaaatcgtgaagcttga

SEQ ID NO: 353972 - DNA, 123 bp, Pseudomonas aeruginosa
atgccgcgcagccgtttgaggagtgccgccagctccttgtgctggttgtcgtccatttcgtaccggtacgacttgccggtggcgttgtggcgcaccttcgtgctgcgggtcgagtggacgtag

SEQ ID NO: 353973 - DNA, 648 bp, Pseudomonas aeruginosa
  misc_feature (479)..(488): n is a, c, g, or t
atgtccggaaatcagcacaaggtcactgaggtgcagcgaattcttgcccctgttggggtagaagtcgtatcggtgtcgcgcaaaattgaagagctgcagaccgaggatgttgaccgcttggtgcgggacaagttgaccaaggcattcgaggctataggtcgtcctcttttcgtcgagcacacaggactctacttgagcggtctcaatgggcttccagcaggtttaacccagattttctgggataagctggaggaagatcgattcgttaagcttgtagctggtctcaaagatgccgcagtaatcgcaaagacggtgctcgggtattgtgatgggcgcgagattcgtcttttcgaaggctccatcgaaggaactgtgccactcgtaccggccggtccaacggactttcaatgggactgtgttttcgtcccgaacgggcacacccaaactttcgctgagatgggatcggctaaggacgctannnnnnnnnncagatatcgctgcatccgagattcatcgtttgattgctcttggacgattctcgcggatctacactaccaactacgatcgatggctggaaatggcccacgacaagtacgaggtgccatacgacaagattgcaagcgttgccgacctcgtatctgctactga

SEQ ID NO: 353974 - DNA, 279 bp, Pseudomonas aeruginosa
atgcgcagcgcggccctacttaaagtgctgactggtgaggtgtcgaacaacatgactcacaaactcaccatgtggagctcgatgctcatcccatctcttgacgttcttagggcgtggtcgatagtccgcagtggtgagcgcaagactgtgtttggcccgagaaactcctacaaaaaacacgcagcgctcttggtcgaggtgcccccagaacgtttgcttctcgacgccgagcacaactaccgaatggaactccagacctttgcttttgtgcatggttag

SEQ ID NO: 353975 - DNA, 192 bp, Pseudomonas aeruginosa; identical to SEQ ID NO: 353256

SEQ ID NO: 353976 - DNA, 555 bp, Pseudomonas aeruginosa
atgtcccgaccctcgttcgcggatcagttcgatcgtatgggccgcgaggtactccccctgggcgaagcgctcaacctcgttgcccgcaatcagcggatgtgccacggcggcatcaccggcttcgctcactccaccggccgcagcgtctccaccacttcccacaagttcgaccctagccacaccagccacatcctgaacatctacgacgtgctcgacttcctgcggtacgtgtcggccgaggggcgggcggtcgtgctcgacgcgctgcatgccgagcttggcgacagcctgtggttcttcgtttcgccgcttcagttcgaggatgtgccggccagcctgattgccggcgccggcgagatcctgcacacgtcggccaacgcggccaccaccatcgcacgccatatcgaggacggccgcattgacgcggccgagctggccgaaacccaaaagctggcgatgagcatcatccgcgcggcggtcggcctctacgagcgtgcccgctacgtccaccaaaccaccaagggcgccgaacgcggggaggtggccaatggctga

SEQ ID NO: 353977 - DNA, 192 bp, Pseudomonas aeruginosa; identical to SEQ ID NO: 353156

SEQ ID NO: 353978 - DNA, 246 bp, Pseudomonas aeruginosa
atgcgaacctggccgttactggtgatcgaacccttccatgcggtctttccgctcgcgcggattgcgcagacctcgtcgatcttcttgcccagggcgaaatggatgtcaaaaaagtattcaaacccgaccgtctgtgccttcggtttagcgcccatcggctacctcttggcgtgcatgttcaaccaatttgagcgcgagcgcgtcgccggtcgcgaccagcacgtcggcctcaatgccgtcccgtag

SEQ ID NO: 353979 - DNA, 219 bp, Pseudomonas aeruginosa
atgcgaacctggccgttactggtgatcgagcccttccatgcggtcttgccgcttgcccggattgcacagacctcgtcgatcttcttacccagggcgaaatggatgtcaaaaaagtactcgaacccgactgtctgtgccttcggtttagcgcccatcggctacctcctggcatgcgtgctcaaccagcttgagcgcgagcgcgtcgccggtcgcgactag

SEQ ID NO: 353980 - DNA, 1302 bp, Pseudomonas aeruginosa; identical to SEQ ID NO: 328571

SEQ ID NO: 353981 - DNA, 795 bp, Pseudomonas aeruginosa
  misc_feature (737)..(746): n is a, c, g, or t
atgatctgggctttcgcaaaatcgatatttaaaattgaccctgcacatggccgcgcaaattttatgtttttttggcgatcagttctcaaagccttagacaatatgccagcgggccttaagaatacaagtcgtgtatttcgtcaccatagcgccatctcacgtcggcgtattgcgaagtttgacgaaaaagcaaatcttgtcactccgaacgaacgaaagtcgttgctcaatgcggccatcgtagatatccgctacgcattagaatttattcaatttgaatcaggatctgagcctgacattaatctttataactctttagcaaacgcttacttagattttgccaagattgaagctgcgcaaggtgcatctagagatatagttcttgagtatatgcaagcggcaagccaggcaactcgaaaggcatacgaacaaaatccgagcagtccctttgttatggaaacttatgttaagcacttgctggaggaaacatcattagaagctccagataaagcaatcgctcactgcatcgaagtgttgggggtcatattttccgcgctcacatctaatgcgcacactgctcgaaacatgcaatggcaaggccttgccgatgaagcaataaaaaaattatttaacctcacacctctagactccctttcggctgatcccgtaaacagtacagacttactaataaatgcatggaaactcttggccggcggaagcgaaagcggccaattggnnnnnnnnnnaattggacttggcgaatgcgagtaccacccaacaaaatgccgcgcttaa

SEQ ID NO: 353982 - DNA, 240 bp, Pseudomonas aeruginosa; identical to SEQ ID NO: 353265

SEQ ID NO: 353983 - DNA, 372 bp, Pseudomonas aeruginosa
ttgatcaagccaattgacgagatgctacggacctgggccgccgagctgcacccaccgaacggcgtcggctctgccggcaacgctagcggcgggagcaatgtgattgctatgctgatggcgaccaggggaaacctgactcgctccacagcgggggctcgctgtcccctggatcgcacggcggacattgagctgatcgtgaacaagcatcttccgccgcccatcgagcgggtggtgcggttgcattacacggactacgacatgtcggacccgatgaaatgggcagcatgcggatgtggcaaacgccagtattaccgcaggctcgacctggcccatgcggccattgctgaaatcctgctgcggcgggcggcctga

SEQ ID NO: 353984 - DNA, 327 bp, Pseudomonas aeruginosa
gtgagctgggcgaagcgcgaccgcattggccaggccgaccagctgatcgataccacggtcggcaacatcggcccggaagctggggcgacggtgacgctccaggtctacagcggcacgacgctgaagcgcacctacgccggcctcacatccagtagctggtcctatccgctggccgaggacatggcggatggtccgctccaggacgtgcgccttgtcctgcgcagtgtccgcgacggcatcaactcttggcagcagcacgacatcacgattgaacgccacggcctcggtttccggcttggcgaagaactgggaggcgtttccgcatga

SEQ ID NO: 353985 - DNA, 327 bp, Pseudomonas aeruginosa
gtgagctgggcgaagcgcgaccggatcggccaggccgaccagttgatcgataccacggtcggcaacatcgggcccgaagatggggcgacggtgacgctccaggtctacagcggcacgacgctaaagcgcacctatgccggcctcacatccagtagctggtcctatccgctggccgaagacgtcgctgacggcccgctccaggacgtgcgcctggtcctgcgcagcgtccgcgacggcatccaatcctggcagcaacacgacatcaccatcgaacgacacggcctgggcttccgcttgggcgaagaccttggaggcgtttccgcatga

SEQ ID NO: 353986 - DNA, 501 bp, Pseudomonas aeruginosa
  misc_feature (90)..(90): n is a, c, g, or t
atggcgcacccgaaggaaacccgcgacgccctgcgccgcgcctacgtcctcgaccgccagtccctggaggtcgcggccgccatgttcggngtctcctacggcaccgcccgccgctggaaacagcaggcggaagccgagggggacgactgggacagggcgcaatcggcgcagttgctggccggtggcggactggaggacgtggcgcgccaggtgctggctggcctggtgacccagttccaggccaccatggaggcgatccaggtggacagcgcgatcacgccagcggtcaaggtgcagatgctcgccagcctggccgacgcctacaacaagtcgatcagcgcatcgaagcgggtactaccggaaacctccagcctggccactgcaatggaagtcatccagcgcctggcggccttcatccgtgaacagttcccgcagcacgtccaggccttcgccgagattctggagccgttcggggaagtagtcgctaaggggctgaaatga

SEQ ID NO: 353987 - DNA, 372 bp, Pseudomonas aeruginosa
ttgatcaagccaattgacgagatgctacggacctgggccgccgagctgcacccaccgaacggcgtaggttcagccggcaacgctggcggcgggagcaatgtgattgctatgctgatggcgaccaggggaaacctgactcgctccacagcgggggctcgctgtcccctggatcgcacggcggacattgagctgatcgtgaacaagcatcttccgccgcccatcgagcgggtggtgcggttgcattacacggactacgacatgtcggacccgatgaaatgggcagcatgcggatgtggcaaacgccagtattaccgcaggctcgacctggcccacgcggccatcgctgaaatcctgctgcggcgggcggcctga

SEQ ID NO: 353988 - DNA, 303 bp, Pseudomonas aeruginosa; identical to SEQ ID NO: 353273

SEQ ID NO: 353989 - DNA, 312 bp, Pseudomonas aeruginosa
atgacctacgcactccgccaaccatcctttgtgcggctcaaggctcaactcagcctcaacggccgcttcaaccacgccctctacgacgcggaaacccgccaggcagtccacgccactcttgacattgagcgcggcgctgaacaggtcagcgtcgtcgttcgaatgggctccacgctgaatagcctgggcctccctatcgatgccccttccaacgccaacaccgtggccgactacctcgaatccatcgcaaacggccgcctggacacggcggacgacaccccggctcgccgccgtttcagccaagcagcgtag

SEQ ID NO: 353990 - DNA, 1512 bp, Pseudomonas aeruginosa
atgaccttcatgaccaatgactacctggagtattacctcaccctcctcggctggatcatcaacaacgggatctggaacatgatctcggacacgggcctgtttgcggtgccgttcgcggccatcgtattgcgcgaatggctgaaagttcgcggggaaggcgccgacgagggcaacaaaggcgtgctgtctctggcccgcatcgagacgcatatctacgtcggctacatcgtggtcgccctggcggggatcccggtcgtcaacgtgagcttcgacaccatcgagttcgaccaggcccgcgcccagcagtgccagtacagcctgccagcgccggcagacaccggctggtcgacctccttcagtagtctggccggcaagagcgcgcagatgccgctctggtgggcgatgatgcacgccctgtccaagggcttcaccgccggcgcggtcgcggccattccgtgcggcacggatctgcggcagatgcgaatggaagtggacaacacgcgcgtgaacaacccgctgctggcacaggaaatcgccgacttctccaaggactgctacgggccctcccgtgcgcggctgttcatgcgacaacctgatctgggctccgtggccgaggacaacaaggcgctgcaggacctgaactggatcggctcccgattcctgctgaacaccccggggtactacgacaccgactattcgaagagcccccgtcagtcatggccctacaacgccacccgcgatgccggcctgcctcaggtgggcggtggtggcggctacccaacctgcaagcagtggtgggctgactcagggatcggcttgcgtgatcggatcaaggaccaggtggatccggacctgatgaccagcttcctcaagtgggcgaaatggttgaaccaagacgaggtgaccgaggctgtcattcgccaggtgatctcaccctccagccaggtcaagggtaacgtctacaccgattacggcgggcaggtgggcggcaccgtctggaacggcatcgcgagaaccgcaggaaccttcggcgttgccctgggcagcctggcctatttcccggcgatggatatggtccgccaagcgctgccgatggtgatgtcgttcctcaagatggccatggtcatctgcattccgatggtcctggtcatcggcacctatcaactgaaagttgccatgacgatgacggtcgtcttctttgcaatgatgttcgtcgacttctggtttcagttagccagatatatcgatagcacgatacttgatgctttctatggttcgggatcaccgcatctttcgttcgatccagtcatgggactgaatacggcgactcaagatgcaatcttgaacttcgtgatgggggcaatgtttattatattaccgctactatggattactgcagtaggatggtccggcatacaaaccggagcaattcttaatgggctagcagacggaaccagaggggttcaagaggcaggtgggaaagctggagaaagaatcgaacgtagcgtgtaa

SEQ ID NO: 353991 - DNA, 528 bp, Pseudomonas aeruginosa
atgaacactgaagcccgctttccgagtatccacgcctcggccgcgttcaccgactcggcagtggttcatgccaatcacgttggggtcaaccccatcgagctggacgccctcagccaagtgatctcgcgcctttcgcgggacgagagcacggtcgcacccagttcgatggagcgagagcttcgtgagctggaggaactggggtacatcgaaatctcgaccacccaggccgggactctggtggtcactacgcgcgctccggggcaattgctttcggcttacttctggtcggtatggatcccgcgacacctgttcagttgctcgctgaaagtgagcctggtgccgtacctctgctgcggcactcaggactcccagcacctcaccgccgtattccgcattgcaggcagcaaggacgccgcgcgtgagttcctgcatcagttggccaacaactatcccgggcatgagccggagttgcccgaactggtggccgttcaggtcggtgatgcactcagcaaggaggccgaatcatga

SEQ ID NO: 353992 - DNA, 135 bp, Pseudomonas aeruginosa
atggatatccaactggtaatccggctttggaatacccagctgttcgaaaaatatttcagacatattggcatcaaaatgctgaccagtatgaacgatgatttccgaaagggtctgctgctcaatgatagcctttga

SEQ ID NO: 353993 - DNA, 309 bp, Pseudomonas aeruginosa
atgagcaagcaacgacgtacgttttccgccgagttcaaacgagaggccgcggccctggtgttggaccaaggctacagccatatcgacgcctgccgttcgctgggggtggtggattcggccttgcgccgttgggtgaagcagctcgaggcggagcgccagggtgtgaccccgaagagcaaggcgttgacgcctgagcagcaaaagatccaggaactggaagcccggatcaaccggctggagcgggagaaagcgatcctaaaaaaggctaccgctctcttgatgtcggacgaactcgatcgtacgcgctga

SEQ ID NO: 353994 - DNA, 822 bp, Pseudomonas aeruginosa
gtggtctgttcagctttcgatgtggcgcggtcttgctactacgtccaccgtcttcgacggcggcgtgtcgatgctcgccgcgtggcgctacgcagccaagtcaaccagttgttcagccagagtcggggctcggccggcagccgcagcattctgggcatgctgcgcgaagagggcgtgaccatcggccgtttccgagtgcgtcggttgatgcgtgagctgggcctggttagcaagcaaccgggctcgcacgcctacaaacaggccacggttgagcggccggatatcccgaatcggctgaaccgcgaattcgcgaccgagcatcccaatcaggtgtggtgtggcgacatcacctacgtctgggcgcaaggccgttggcactacctggccgcggtgctggatctgcatacccggcgggtgatcggctgggcgttctcggccaagccggatgccgaactggtgatcaaggccctggacatggcctacgaacagcgcggcaagccacagcaggtgctgttccattcagaccagggcagccagtacgccagccgcctgtttcggcaacggctctggcgctatcggatgcagcagagcatgagtcgccgagggaattgctgggataactcgccgatggagcgcctgttccgcagtctgaagtcggagtgggtcccgtcaacgggttacctgacggcgcaggaggcccaacgggacatcagtcattacctgatgcatcgctacaactggatcaggccgcatcaattcaacgacgggttaccacctgcggtggccgaagaaaaactcaacccactgtccgggatgggttga

SEQ ID NO: 353995 - DNA, 651 bp, Pseudomonas aeruginosa
gtgccgctgagcgtggtgccgttgctggggttgatcactggcgtggccggggctaccgagtccacggtgacactgctgcccgcactggtgttgccggaggcgtcggtggccgtggcgttgaccacggtgccgttgggcaacggcgtggtcggagtgaagctccagttgccgctgccatcggcggtgacctgcccgatcggattgccgttgccatcggtcagggtcaccgtggcgcccggttcggcggtgccgctgagcgtggtgccgttgctcgggttgaccactggcgtggccggtgccacggcgtccacggtgacgctggccggcgaactggcgttgccggacgggtcggtagccgtggcgttgaccaccgtgccgttgggcaacggcgtgctcggggtgaaggtccagttgccgctgccgtcggcggtgacctggccaatcgggttgccgttgccgtcggtcagggtcacggtagcgcccggctcggcggtgccgctgagcgtagtgccgttgctcgggttgaccaccggagccgccggggcctgcgagtccacggtgacgctggcgcccgggctgctattgccggcggcgtcctgggccaccacgttgaccacggtgccgttggcgatcggcgtggacggggtgtag

SEQ ID NO: 353996 - DNA, 348 bp, Pseudomonas aeruginosa; identical to SEQ ID NO: 340926

SEQ ID NO: 353997 - DNA, 744 bp, Pseudomonas aeruginosa
  misc_feature (168)..(177): n is a, c, g, or t
atgagagagcatgggctcttgtatgttcgtcataaggaagccgtcgatatacctccttgtgatagtaaggagatttgttcgctaaaaatacactttcttccatgtgataaggttgctacttcagctgcctgttatacgccgtttcatcctgaatatccgaataaaggnnnnnnnnnngaggggtatgtcatgcagaagttgatgagcttgatctgtgtgggaaataaaaattccattgggctggtggtttttctcagcaccttctttgggctggtggcatgccaggctgggcctgaagtgctgtctgcacctatcatgggttacaaccatactccggcggcgattaacgaatttacggtgaatggtgctggcggaccgaacttaggtccttatcagggagatggtagtcaagtttgttgtggggtaattccaaagagatggaatccaaatttgaaagttattgtggaatgggagaaggatccaaatccccgtgccgttataaaacgagataaatatgggcggttggatgagagtgattatttgaggcatgcctcaagttacacccgttacaaggcgactgtgaatgtgcctaggtatgatgaaaaggtgtgcttgctgcaggtgcacttcttgccgtgtgacgaggtggctgtttctacgacttgttatgggccaaatcatccaaaatatcctgataaggcctatttcgagatgagaaagtcaacgatatgtccggctaactga

SEQ ID NO: 353998 - DNA, 177 bp, Pseudomonas aeruginosa; identical to SEQ ID NO: 353797

SEQ ID NO: 353999 - DNA, 2016 bp, Pseudomonas aeruginosa
atgcggttgtcgccgcccagcgccgagagatggccctgctggttgcgtacgccttgcccggcgcgaatctccagcgactgcgcctgggtgacgccggcgctgttgtcgaacagcccggtgaccagcttcagccaacccttggcgctgttgagcacgccgccggcgccgttgtcgaggctgccgctctgcaggtcgaggttgccggcccggctgtccaggcggccgccctggttgtccagcgcgccgccgatacgcagccggttgtcaccctgggcctggagcgtgccctggcggttgtccaggctgccggcctgcacctcgagggcgccggcctggctgaagatcaggccgtcctgctggttgcgcagggcgccgccgcccaggcgcaggctcatgtcggcctggctggcgagggtgccggaggcgctgttgtcgaggctgccggcgctgatctccagcagcccctggctgaccagcttgccgccgcggttgtcgacgctggcgctgcgcagcagcaggtcgccgccgctggccaggcgcgccgcgccggtgttgaccagggcgccgccgaggatggcgtcgagccggccttggctgatcaactggccgtcgctgttatccaggctggcgcccttgagcagcaggctgccgccgttgatccggccgccggcgttgttcagcagcgtatcgtcgcgctcgaagctcagcgcgcgctgcgccgagaccaggccgccctggccgttgtccagcttcccggcgatgctcagggtcacgtcgctttcgccggagacgatgccctgggcgttatccaggctggcggcgtcgatccgttgcgcgcccttgctgaccagcgcgccctggccgtggttgtccagcgcgccgccgaggctgatggccagctcgccgtccttgctcgaaagggtgccgccggcgctgttgtccaggctcccgcctgtcaccgtcaggccctgccatccggagagcaggccggcgccggcgttgcccagcgcgtcggcgtccaggcgcagtttcccggcgctgatgatgcgcccctgctggccgttgtcgatgcgcctggccagcagctcgaagccctgctggctggaaatctcgccgccctggcggttgtcgaggacgttcagccgctcgatgctcagcgggccgcgagcactgatcaggccaccctggttgtccaggtcgccgccccgcaggtcgagactgacgccgcgctcgccgaccagccggccctggcgttgcaccaggcgctcgaccgtcaggcgcaggtcgccccgggcggagatttcgccgccgtcggcggaatcgacgcgccctgccgtcagttccagttcgccgtcgctggtgagcaggccgccacggttgtccaggttggcggcgctcaggcgcagcgactgcttgccactgagggcgccgccacggttgtcgaggtcggcgctgctgacgtccagcacgccctggctgatcaactggccaccctcggcgttgtccagcgcgccagtggcgacgctcaggccggcgttgccggagagcaggcccttgccgctgttgtccagcgaggcgctggcgagcgtcaggcgggcgccggagacggtgccttcggcgtggttgtccagcgcgccgtcgacgcgcaggtcgatgccggcgcggctggccagggtgcccttggcgctgttgtccaggcgagcggccgcgatgtccaggccggcggcgccggagatcaccccgcccaggctgttgtccagggcctgggcgatgcgcagggtcaggctggcggcgccgatcaggcgcccgccgcggttgtccaggctggcggcggcgagggtgaaggcgcggtcgctggaaatttccccgccggcgccgttgtccaccgcgccgagctggcgcagcagcagcgcgccgggcgtggcgatcaggccgccgtcgcggttgaccagcgtgccgccattgaggtcgagggtgacgccggtttcgctgaccaggacgccgcctccgcgctga

SEQ ID NO: 354000 - DNA, 3303 bp, Pseudomonas aeruginosa
gtggccagcgccctcgaagcgcgccgcgacatcgccctctccgccgggcgcgacgtgaccctggcggcggcggcgaacgaggagcacagcttcgccaccggcaagaaggtgacggcgaagaacgatcgggtggaacaccaatcgaccgtggtcagcgccggcggcgatctcagcgtgcaaggcggcaatgacgtgaccttcgttgccagtcaggcgaaggccagcaacgaggcctatctgtacgccggcaacgacctcaatctgctggcggctcacgacgaaagctattcctactactcgaagaagaaaaaaggctcgttcgggcgcagcagtagccggatgagcgagagcgaagccagtaccgtggtgtcgtcgtcgatccaggcgggacaaggggcggaactggtcgccaagcgtgacgtcaacgtcgaggcctcttccgcctccagcacgaagggcgagctggcggtcgtggcggggcgcgatgtgaacctcacggcagctgagaacagctactccagcgtgtccgcgaaatccaagtccggaggcttggggctgtcatccaccagcaaggccaacgcccagtcctcttcctacaccagcgttcagggcgccacgttgagtggcgataccaccgtggtgcaggcgggaagggacatctcggtggccgccagcaatgtggtttctaccgggaagactgcgctgcgtgccggcaacgacatcatcatcgacagcgtggcggagacgtcggagtcgcatcgcagcgagtcgaagaagaagtccggcctgatgagttccggagggatcggcatcacgctcggcacggcgaagaatgcctcgacacaggacacccgtaccgtcgtcaaccagggcagcaccatcggcagtgtgctcggcgatgtcgacatgcgggcgggcaagaacctgtctatcacggcttcggatgtggtggccggcaaggacatcaacctcgtcgggcagaacgtgagcattctcgctgccgacaaccagaacgtcagcgagcagacccgcaagaccagcaagagcggcttgacgctggccttgtcgggaacggtcggtagcgcaatcgacgccacctaccagaatgccaagcaggccaggaacgaagacgacagtcgcctttccgcgttgcaggggatcaaggccggcttgagcggcgtccaggcctggcaggcagctcagcagaacggcggcatgacgggcgagaacagcgcgcagttcgtcggcatcagcgcttcgctgggctcgcagaagtccagctctcggcagcgccaggagcagcagatcagccagggaagcacgctcaccgccggtggcaacctgaacattatcgccacgggttccggggctgtcggcgaagacggcgacttgcgcgtgcaaggcagcaagctgcaggctggcaaggacctccaactgatcgccaaccgcgacgtcgtgctggaagccgcggccaatacgcagaagctcgatggcaagaacaagagcagcggcggcgctgtcggggtaagcgtcggcgttggttcgggcgaggctggcatcagcattttcgccaacgccaacaagggcgccggcaaggaaatcggcaacggcaccacctggaccgaaaccaccctggacgcgggccagaaggccagcttggtcagcgggcgcgacaccacgctgaaaggggcgcaggtcaatggtgaaagcatcctggcgaaagtgggtcgtgaccttaccctgcaaagcctgcaggatcgcgattactacgattccaagcagaagaacgtcggtggtggggcgagtttggctatcgttggccagggtggcggcgccaacttgagtctcagccagagcaagctgcattcgaagtacgacagcgtgcaggagcagaccgggctgttcgccggcaagggcggcttccaggtggaggtgggcaagcacacgcagctggatggcagcgtgatcgccagcaccgccgaagccgagaagaatcgcctgagcacaggctccttgggctggagcgagatccataacaaggccgagtacaagagccaacttcagagtgtcagtgtcagcagcgccaacgatggcgccggtgcgttcgtcagcaacatgcctagcggcatgctcattgcctacaaccacggcgatagtgccagcggtaccacgggttcggcgatatccgaaggcaccctggaggttcgtgatccggcgcgccagcaacaggatgtggcgacgctcagccgtgacccgagccgcgccaacgatagcgtcagtccgatcttcgacaaggagaaagagcagaagcgtctccagcaggtccaactgatcggcgagatcggcacccaggccatggatatcctgcggacgcagggccaactcgacgccgacaaggcggcgcgggccgaactggaagcgcggggtatttccgcgccgggcgccggcgccagcgagcggcaagtcgaggactaccgcaaagcgcttctgggcacgaatgcctaccaggacatcatgggcaagtacggcaccggaggcgactaccagaaggccgcccaggcggtgaccgcagccttgcaagggctggccggcggcaacattggctcggcgttggcgggagcttcctcgccctatgtggcgggcgtgatcaagcaagtggcaggcgacaatgacacggcgcggatcatggcccacgcggttcttggcgcggtggttgcgcaggcccagggcaattcggctgctgcggggggtgcaggagcggcggggagcgaactggcggcgcaggtgatcagcgagcgactgtacggaacccgtgatagcgcgacgctgaacgaagcgcagaagcagaccatcaccgcgctggccagcctggccggcggattggcaggctccgttgtcgatgggagcagcggaggagccattgccggggccgcaggcgggaagaatgcaacggaaaacaacttccttggcggcggaactccgccgggcttgatcagctacggtcaagcagcgagttccttgaccgagtacatgcgcaagaacggcgcgacagccgaggagatcacccaggcgcaacgtgatctggcccagggacagggcttcgatggcgtacagccagcgaatgagttcatcaaggcctggggcgaggccatggttgcggaagctgccggccttgggattgttgcggggttgggtagatttgggttgtggggtgcaaagggagcgactcctgttgtaactgctgaggggcgaatcggtaactcagtatttacggatgttaaccagactgtagtggtctactga

SEQ ID NO: 354001 - DNA, 993 bp, Pseudomonas aeruginosa
atgagatcatatatctcgcgccttggtgaattccccgttgatgttgaatccggttataccaatgcgcttgaagtgctgggttgtttaagtgatagagttggtacaggaacaaacaccgcgctagcggcagcttaccttgcttgggtgggtcaagatcagccaattgagatgactatacagttggcggtgaatacgttgggtagtgatacggacactattggtacaatggtgggtgcactactaggtgggatcgccatgaaccctccatcttggccaatacaagatgaggcgtatattcgttatcaagccgttaggatgtctcgcatcgctcaagggataagcgatgaaggtttccgttatcctgatttgatgacttggcagccaccatcaagtcaaagtaatgcgctccagtttaatgagagaggctacttcctgaacggttttggcaatcttgagtctataagtaaaagttggaattctggttcgtttgcgtgggaatggtttaagatgccatttgggcagactattctatgtaagcatcgtttacgtaagccggtttatgagaaagagagtgaagcgcttattctttctagaaaaagcccgcactttagtgacctgcatcgttcagagcgaatgagttcagcgcaagttgagcacggagaccaaaatttggatctgccattgttcgcggatcaagctgtaaccaatagtgaagttacgcttaaagaacaagggaagcctacagattttcaatattcagacaaagctggctcgtctggctcgatcaagcagtcggccgtttcttcagaaactcgtagtgttggcgaacttacagatcttgtgattaaaagcaattttgatagcgccgtccttgggaaatgcttcttggagtgcgtgacaggagagctagcgatagagaatgctatcgcattctctgccataatcgctaaggcgattgatgtaaggcaaaaaaagaataattccggcagatag

SEQ ID NO: 354002 - DNA, 693 bp, Pseudomonas aeruginosa
  misc_feature (666)..(675): n is a, c, g, or t
gtgagaccaaacattgaaaactcgattgtcaactcagctctttgggcagccgcagcagacgcgttgggttggattactgagctcgtggacaaaaaaggtgtagtgcgacgtaccggcaaaggcaaggtattgcggactgtaccatggaaacgaaaaattggaggcattgctggagtaactgttgagctaccggcaggtacttattcagatgacacacagttgcgactggcaatctgccggagtattcaaggcgacggtttttttgatgttgaagcatttgccaaggtagagctctcaacttggtcctcctatgcgcttggagctggtcgcggaacgaaagtggccgctgctaatattgcgaagcgggacgttaattggttttctaacttctactctcagggcgatcaaatatatttccaggggggcggaaatggggccgcaatgagaatccagccccacgtttggaggcgatctcgtggacctaatagagactaccttgctgatgttataaaagatagcatagtaacccatggacatatgcgtggggtatgtggtgctgtctttcatgcggactgtttagcctacattctagaaacgggtcatatcccgggacctgaggagtggattggcttcgtagcaagttttgatgagattctgagtgctgtnnnnnnnnnngttctgatctcggggtag

SEQ ID NO: 354003 - DNA, 894 bp, Pseudomonas aeruginosa
atgaaatactcactgtcgagcaaggtgattttcccttggggcggcgcaggcggtgagctgggtggtgcggcccgcaccactctgccaggtcctggccacggcgccgacggcgaactgagtgttgcggcccgcaacactctgccaaggatcgacctcggcgccgccggcgagctgagtggtgcggcccgcaccactctgccaggtcctggcctcggcgccgacggcgaactgagtggtgcggcccgcatcactctgctaggaccaggccacggcgccggcggtgagctgggtggtgcggcccgcaccactctgccaggtcctggcctcggcgccgatggcgaactgggtggtgcggcccgcaccactctgccaggtcctggccacggcgccgacggcgaactgagtgttgcggcccgcaacactctgccaaggatcgacctcggcgccgccggcgaactgggtggtgcggcccgcaccactctgctaggaccaggccacggcgccggcggcgagctgagtggtgcggcccgcaccactctgctaggaccaggccacggtgccggcggcgagctgagtggtgcggcccgcaccactctgccaggtcctggcctcggcgccgacggcgaactgggtggtgcggcccgcatcactctgccaaagatcgacctcggtgccggcggggaattgggtgttgccactggcaacactccaccagggaccaaccccagcgccggcggcgagctaggtgtttccactggaatcactccaccaggaatcaacctcggcaccgacggagcgtttggtgtttcggcccgaaacactctgccaaggatcgacctcggcgccgagggctaccaacttctcccactcaagaggaaccgaaaagatgtgtga

SEQ ID NO: 354004 - DNA, 747 bp, Pseudomonas aeruginosa
atgaatctggattggtgccccggtatccgtgatgcctgcttgcattggcgcgacgcgccaatgttgcagcagaccttcgaggcgttggagcgtacgttggagcaggacaacgatgcgtgcatcgactgcgcgaagtccattgtcgaagtgttctgccacatcatcgtggatgagttggactcgcccgcccagcccgttaggccggcagaggtaactccaagttttagcgcatgggtcagtgcggcagtgcgtgtgctcaagttgggcgagaaccagaacgccaaattcctcaagctggtgtcgcagcaccacaagctgacaaccgccctgggcgacctgcggaacgaatccgggccggtcagccacggacgggatggattcctcgctaagttgtctgtccatcatcggcgttcagcgatcttgtcggcggatgcgctggtgacgtttctgcaccaggcctatctggaagtacaacgcgacccggtcagttcgcgcgagccgtgggaacggttcgaggcattcaatcaactgatcgacgcaaaagtaggactggagttggtgacggacgacgacggcaacccggagcttcgagttctgctgcccggcggcgaatatctttccctcaacattcccgtcagtcgcttgctctatcagcttgaccgggatgcctacatcgaagccctgaacgctgcgcgtggcgttcccgcggccatcgtggaacaacacgaagaacaaggggaagcctga

SEQ ID NO: 354005 - DNA, 1128 bp, Pseudomonas aeruginosa
gtgccgtgggtgtctgccaaggacatgagcgatttctggctcgaagatgcggaagaccacttaaccgcgctgggcgttgaaaacgcttcgcgtatcgttccagcaggaaccgtattgatgctagtgcgcggcatgactttgcacaaccgtgtgccaatttgccgcgtcgccacggatgtagcgttcaatcaggatgtgaaagccatccttccgaaagaaggtctgtgtgctcgtttcctgccatatttactagtaggcaatcacgacaggctgcatgagcgcgttgattcggcaggccacggcacaggtcgcctcaacacggacgaaattctgtcgcttccggtatttgtcccaagcaaaacggaacaagccgaaattgcaactattggcgaaggattgaatgagcgcatccacaacctgcgccagaccaacaccacgctgcaagcgatcgccgccgcactgttcaagtcccgctttgtggactttgacggtgtgccgccaggggatatgcaggaatcggagctggggttgattccgaaggggtggcggatggggactttcgccgaggctgtcgaaatcctcggcggcggcacgcccaaaacttccattgccgattactggaacggcgacataccatggttctccgtggttgacgcgcccgcaagtgggcaagtgttcgtactggacaccgaaaagaagatcaccagccttggtttggacaattgctcggccaagttgctacccgaaatgacaaccatcatttcggcgcgcggcacggtaggcaaagtggcattgaccggtgtgccgatggcaatgaaccaatcatgctacgcgctacgccccaagcagcaaggcggcgaagccttcgtgtatttttccacgctgcgtttcgttgagcatctgcaacgcatcgctcatggcgcggtgttcgacaccatcacgcgcgacagcttcaagcaaatcaccacttgcttaccgcccggcgaagccatcgccgagttcgccgtcatcgccaacccaatgctcgaacgcattcgcgccaacggtcagcaagccgccaccctcgctgccctgcgcgacacgctgcttccacgccttatctccggccaatttagggtgaaccaatga

SEQ ID NO: 354006 - DNA, 321 bp, Pseudomonas aeruginosa
gtgcctgacatgagagaagagtttgaagcgtgggttcggactcaagtgcctgagccatccctcgcgacggtgcttgcgtatagcgccggcaacgatttgtacctcaacccgcacattcagggacgctacgaaggttggaaagccagccgcgcggctctgagggtggtgttgcctccgacgatcaccgtcgaggaagctgccgatcacttcaacatcgatgaggaaggcatcgacatggctgtggaagttgcgcacatggtcaacggcgccattgccgcctgctccgccttcatcaagcaagccggaatcgaggtgaagtga

SEQ ID NO: 354007 - DNA, 1149 bp, Pseudomonas aeruginosa
gtgagcaacgaattgaccgatgtgcgctgcccttgcggcgccgagttccaagccgacagctatgacgcagggttcattgccggctccggcatgtgccagaactgtgacgctgcactacccccgaaagacatttgcacctgcccttccggcgacggctccctccgccatccctgtccggcacatcctgcggtagagcaggcaggcggggatgagcgggacttccaggcaaagggcgcacaggaggttccatcgccagtctcaaaagagtatgaccgacatttgatcagtcttttgcgtaaaggtgaggcacttcctggccaccaggaggaagccgctgacgagatcgagcgcttgcgcgattggaatgatcacctgaacaacaccgttctacccaacatactcaatccaaatttcctgatgctcatgaagggcggcgagaggctgcttgacctgtgcacgaaggacggcgaattcattggcgtatcgctgaatgacatgaaggacgtgtttgattggatggtcacgcacgctcgaattgcacctgatcaagccgccctggcgcaaccctccccggcgcaggccgagcaggcagaggtggtggcatggcgttacggcttcagcggcggaatcgtcagcgacaaggcatgtctcgatgaatggaaatccggcggcgaatatcaatcgctgatgaccgtcgcccagcaatgccgctttaacgggcactgcgtgtcgcactacagcgtggcacaacacagctacttcgttgccgacttggttccggaagaacaccagttggctgcgcttctacacgacgccacggaggcctacatcggcgacatggttcgaccgctcaaggaactgctacccgagttccggcagatcgaggccgtcatctggtcagccatctgtgagcgcttcgacctcgacgagcaactgccagcagaggtgaagcgcgcggacctgattgcgctcgccactgaacggcgcgatctgatgcacttccatcaggttgaatggggttgcctcgaaggcattgcgccccatcgagcacgcatcagtccctggtcggcagccgacgcccgataccacttccatcggcgcctgcttgaacttctcgcggttacccatcgcaagggggtgacggcatga

SEQ ID NO: 354008 - DNA, 387 bp, Pseudomonas aeruginosa
atgactgttcattgcagctactacagccaccaaggccgatacaacctgcttagcgatgaagatcaggttcagattgtccttgaccttaaggttggcgaggtcagaaagaccatctccgagcgctgggatatcgacaaggcgccggacgttagcggccttcccccttctgaggttctggacctcatcgaagatcggctcaaggcctatttgttcagcaccggccgcgagcagaagcaggaaacaatcgactggatgcgccagttcccagcgaccatggatcacgcatgggcgaaggctcagattgagcgactgaatcgcaatatcaaagaccttgagcaatacgtactcgacgaagaagaccttcacgagctcgctcggtcagcctga

SEQ ID NO: 354009 - DNA, 315 bp, Pseudomonas aeruginosa
atgagcaagcatacgccggggccttggtatcgagacggaacgaccgtttatgccttgaaccctcacaacttcaaccggttttctgctcagattcatggcgctcacacgccaaagtctgaacttgaagctgttgcacaactgatgcaggccgcgcccgagctgcttgaggcgtgccaagccttcaagcgtctgtacggtcgtttgtgggatgtcgtcgagccgagcggatcgggattcctctcgcctgaatcggttaaggagtacgacgccatccatgagctgatgactgccgcaatcgcaaaggccaccgcctaa

SEQ ID NO: 354010 - DNA, 234 bp, Pseudomonas aeruginosa
atgccctgctaccggcaggacggcgggttaggcgaccagggccttgcgtatcagattgattacgtcgtcagttgcgccgttttcgcgagcgctctgaatagttgtttcgagcgccgcgtctgcctgctgctgctgccagcgcgcctgttgctcaacaatgcacggatacccttccgcatgagccggcttccagatgctgcggtagtcgccgcgatggttgattgcgacccgtga

SEQ ID NO: 354011 - DNA, 216 bp, Pseudomonas aeruginosa; identical to SEQ ID NO: 340895

SEQ ID NO: 354012 - DNA, 1155 bp, Pseudomonas aeruginosa
atggccagggccggacttggtgatcgttggcaatgtttatttgccaacgatatggatatcgtgaaagcctcaacatatataagaaactggggcgcggaacacttcgatgggcgcgacattcgagaagtcaacgtgacagaccttaagggatgtggtgatttagcatgggcatcatttccatgtcaggatttgtccgttgccggaaatggcttagggatgggcgagagcggtaccgaagagtttacgaggtcgggtgcgctctggccgtttcttgatctgattgatgatctgcgcctagagtcaagacagccgcatcttctagtgttagaaaatgtggttgggttgcttactcttgagcaaggtcgtgattttgcggccatatgtttaaggcttggcgaaatgaagtatcgttacggcgctgtcattattgatgccaaaacattcttgccacaatcacgtccgcgagtatttataattgcagtgcggaacgatattgaaattccgtgtaagctctcaagcgagacggcaacagattcttggcacgctccaacgttaattcgcgcgtataagtatttacccagcaaggcgcatgaagattggatctggtgggacttagggcctgcccctctacttaagaaaaatgcactagaagatcttattcggctcaatgatgctgaatggcatgcgcccgaagagacccagcgttttataaatatgatgacgcctcttcatttggcacgtctggaggaagcgaaaaatgcagaaaatttctctgttggcagtctttatttgcgaatgcgtcgagagggaaatgcaaacaagcaacgtgcggaagtaactttttcccctattctaggttgtctaagaacgccaagaggaggggcttcccgttcaagaattattgtggcgggaaaaggtcaggttagaactcgccttctttccattagtgaagcagcggcattgatggggctggaccatacctatactctacctgatatctatcatcatgcttttaaggtgataggggatggcgttgcggttccctcagtacgtttcctagctgatcggcttcttgaaccgctcattctagctgcccggaaaccagcagttcctggcagtgagaagaggcccgataaatgtatagcactagcgtga

SEQ ID NO: 354013 - DNA, 2541 bp, Pseudomonas aeruginosa
gtgaacttgccgcgaacttttgatgcatgggagagacagctcgtcgattatttcctgcgtgtcggcccagatggtgatgccagcccaatccgagccttcgaggtcacaccacgcaccttggcgctagcttgcggcgccccacccgagagtgagccaaacgtcgaagaggccttccggcgcatgttgtcggtcgaccctttgctgatgaactcgctgcgcttgggttcccagcgctttgaaaagcttgatgtccccaactgcttttcctacctcgcatttaccttgttgatcgatagcctgctggaaggcaatacgacgcaaagtggcgaatttcgcctgaagctaatgaaatggttggggattaaaactcctttttccgatcttcgcggggttgcgttgatgtgggaaagcctggtgcggtggctcgacgagcgcattcaggcgggtcaaccatttcgccgtctgattctgccggatccaggccattggtcgcagatcggatactcgcgccgcctgtcctttcccagtaagcccgacttgcgcttattggcgaatttctgccgggaacatccggaagcacttcgtaatccgcgagtcagtattacagcgtttgaacgagtgctgactgacagtcgcgcctcatggggcctgcaccgtgcgttcgatgagtttcgctgcgcttactacctgcagcgtcgcgcgttgggcagctttcccttttggcgtcttctggagcacgcctcaactctgacggggcgcccagcacgctccagcgtcacaatcgaaatgctatttgatatggacaagcgtgctctcttctttgcttgccgccgtgaggacggtgaagctgagccgtttacatccctgagtgaagcgctggtatttgctggggcggatcacagcgagaacctagctaccgctgctgcgttaggtatcgtgtttttccgtctggtcggtgcggggcggtggcgggctgaagcggacgccaacgattccgcttttggcttgcatgtggctgtggctgaacgacacaggcggaaaatcggtaatcgattgggtgacctgtccggcagcaactcgtgggcgatcacgacccagcctttgactcttgaggctatcaaggatgctctcaaagcagccaagctgcttagcccccagcaggaaaggatcgtacgtcctctcctgtccggtggagtgcgtagcgatggggtttggctgggccgcccacgatttcttccaactctcgaatctgacacctccgactatgtcatccgcgatgcgttgccgtgcgtaaccgacgtcccgcttaagattgatcagggacaacttatcgccacccggccagtagaaggctgcttcttcatccaaccgaccctcttgcgtgatgaggagcatgcgccatggagtattcgtctccaattcgtcagtaacgctttcccacacgaggcgcttgagggtgctcgctacaagctgccgccgttgctcgactggatgccacgtgtatctgatcgccttgaggtcagcacaaaggccactctagcgtgggaggcagatgagcctgcctgcgcggatcttctcgaggcggtctacgccagcggccgaagtggatgggaggaaacgcagataatttcactcctgggatgtgctgacgtagcgatgagtccctggcacttactgcgaagtctgcgggatgcgggcattgtcgaaccgcgactccgcgctggctggaaagggcggacctggaccttgagggagccaagcattatcgaagctcatcagggggggcagaagctagccctggccgaaggggcgctttgtgcgcggatggtcgacgcttttaagcaggccgttgaaggttttggcgggactcccttccgccgtttgggtgctacctcttgggccgtccccctggttggtgcaaagggggttcaagccaaagcgctcgccgagtttctcggctggcgttttgtggccgaacctgcaacgccgaccgagaagcctttggcatttgtcgaaacccgacatcaagccttgcactataagcaggcggattcttggtcttggtctatagggcgctttctgtcaggtggctgcattgaagagggcgttaggctggtgcgcttgacccatctcggcgagcgcgaccacgatgtctaccgagtcgagcacaacagttgcgtatttcactacttgtcgcgcaccgctgccatcgcctcagctcatgctctggcacaaatgccgttgtttgattggcgcccggaggaggaggtgattgcccttatggggcacgaaggcggacttcccgatgcccttgctacagaagtgcgccgacgcatgctgcgcaacggtgggccgcgtggcgttgaatatttttatcccgtgaacaacgaagtggtgcgctggctagccgggaggttaccaggctgtatcgctggactggcagagggcgagattcggggggcaccgacgctgatcagcctctcccgccgttctaccggacggctacgcctgcaatggcgcaacgggaaaacctctctttag

SEQ ID NO: 354014 - DNA, 2094 bp, Pseudomonas aeruginosa
  misc_feature (1514)..(1514): n is a, c, g, or t
atggcggcgaatttggcgtggtatgccgggcaatgcgtgagcaagaacgatgtcaatatgactgtcaaagtcgttggcattcggtcggaagatggatggtcgctgctcgataagccacagaagctcttcccgaaagctggtgaggtagaagtccgtttacaggccgcttctgggtatcacaagaacgattgggtaatattccaagtcgctcacaaggagccccgagggaaatggaaagcatccacccatcgcaaactcacgcccttcctggacctacaggacataggaagtcttgatgcattgcgtagctgcctaactgaagagggtgtggacgggccggatcatagtgctggctgggtgatccgctacagcgaggatcgcatcatcttactcgacctgatccgctctccggataatcgatacaggatggcagttggtgacaatttctatgtatacgtctacgaaccagaactcttgcattgcatgccatcagatacgggcgaagtgttcctttacgattgcaagcggacgggcgaatgccttcaagttctcgactgggcaccagatgatggatacatcaagcgaatcgtgcgtgccatggcgggagctcacgatccaagtgtggaattcgtcatcgagtggctgaagcgccacgcggacgaggctacaggacaaatcggaagcagtcttgaagataagctagtcgcgcaacagtctgcacgctcaggagagttaatcaaacgattgctggccgataagagtctcctcgggcaactgaccgagttgctactagcagacgccaagatgctttcccacctccaaagcgaaatccaagcgatagctgagcaggaacgtggggccattcgcgcttcgctcatggacgcgttggagcacgaggtcatggcattacgcgaggagcgtttgttagcgttcgaggccgagttgcgttcgctggaagcggagcagcatgaggtgttgaggggccagctagagcaggatatgaagtccaatatcttggccatggaggagcgcgtagcagcccgccagacgaagttggaggatcagcttgaatctcggcgcactgaactgcagcaggggatcgatgcgctcgccgctcagcgtgaggcgcttaagggggaactggagagcatcggtttccaaattaaagcaggtgagcaatcgctggcagagcttaaggcgcatgaaactctcgtcgctgaggagatcgaacggcttaaagatgatgccgcctcgatacacgtgccgaagagcgtcaagcttgagtccgtattgcgcttcaacccacctcagtgcgctcctacccttggcgtcggggacatgcatcgagagattaaagaaagcatcctgcttacgtccgtgggaaaagagcggatgacacagtttttcgcgctgctgctggcgggtgaaagtccagtgctgcacggcccagaaacgcaggatttcttattggcggccgaggcgctgttgtcgtccggacggtcgatgcgtctggnggccgaccctactgttatcacctttgaagatctctggttgcgcgcaggcacccaactgccaaccgccttgacccatgggctggaactctcctgcggacaaacaccagtcaccgtactggcgattgtcgagcgcgccgagcgatccggagcccgattctggcttccggcgcttgcagaccgcacgcgccgtggtgaactgccaagacgcttctttatctgtgcaactgtcgaagacgaagattgcgaggaagctcaagcgattcgtagccaagtgccatggctccatgtcagcggaaccatagctccgtcggcaccagccctggttcccatggtttttgccccagctaaagtttggcaactcgatccgggcgagcgcccgcaggacatcacgccagcgatgacggcggtggcaccactagtgaaccaactcacgttggtgaatgcgcttaggctggcccgcgcagcgactgaatgggtccgcttaaatcagggtgttggttacgagcaaactccatcggcgctaaccgggctgttcatagaccaacgcgctcaggccgaccgcacgcaacagaagtcataa

SEQ ID NO: 354015 - DNA, 5871 bp, Pseudomonas aeruginosa
  misc_feature (3988)..(3988): n is a, c, g, or t
atgcttgacccaataggcggcttccgccgaatccaagatttcgtcatcaactatgttgagactagtttccgtatctcggatacggcagccgctgaagcacgacgcaaccttctacagacggtcggagtgttagcaaccgagccatttattgaacctgtgctgcgctacgaatctcatcaggagagtctcgagcaattggcacaacgtaatgacggtccgcttgcgccgctatcttgggagggcaagcgctcttttgtagagctggcactttctggcctattcgacggcaagcgctgcaaaggagagattcgtcggaaatccagctatgccccctataaccatcaggtcgaaatgctcagacgcggcctgctgccaggtatgccgggtatcgtcacgtcgcgtaccggcagcggaaaaacggaaagcttcatgttgcccgtgctggctgcgatctctaatgaagcggtgacgtggaatgcccctgactgcaactacttgaagaacgattggtggaaggaagacaaggcgcggtggttggcgcggcggcagggagaaaatcgtccaagcgcagtccgaaccttaattatttaccctatgaacgccctggtcgaggaccagatgcagcgactgcgcaaatcgcttgactcggaagatgcgcgcgaagtgatgcaagagcgcttcaaaggtaaccggattttcttcggtcagtacaccagttccacgcctgtcactggcttcgagcgccacccgcgcattgctgagaacgaaggcgagaagcagcgccgtacccggcgcattacgcgcctccgcgaggcaatgcggaggttcaggcgcgaccaagatgcggcgctcgcctttgacctacaagaagaagcagctgcgcaggatgaaagggaggctatgccggacaaaacccgctatatctttccttctgtggatggcggcgagatggtatctcgatgggatatgcaggcgaatccgccggacattcttgtcactaacgcctcaatgcttggcactatgctatctcgtgaagtcgaggagccaatattcgcccagacccgtgactggttgctgaacaacgatgatgcctatttttatctggtctttgacgaactgcacctgatccgcggttcggcaggcacggaaatagccttccttgtcaaaatgctcatccagcggctcgggctcgacctgccggggcatagacataagctacgtttattagcctcctcggcctcactgcctactgatggagagcaaggcctgcagtcactggcgtatcttcgcgatctctttgcaccctatggcaccagccgccatgctaacgatccgggggtggatgacccagatttctggcatgactgcatagtggcgggcagcccacatgttccgacctttggcaccaggtcgatcaaacctcaacccttcgtcgacctgcttgaaacagcgttggagtgcaacaaaggttttgttgccaagatcctaagtgccgaggcgatgaatccggccgttgagcaggcagccaacgctctgggcatctctgcaaacaatgccgtggaccgggtcaaggcgctggctgaagcggctgcggctgtgctgactcaggcttgcctcgacggagcagaggtacgtgctacgtctacttcggacatggctgcccgcatcttcagggccggttcaaataatctggataaggcgttgcgcggcctgcttctggctcgtgcgttacccgagtccaaagtttggcccgcgaccgtttcgctcactacgcccgcatttcgcgtccacacctttattcgcaatatcgaggggctatttgcctcggttgttcccaacggatgtataccaaagttcggcgatttcacggtagagcgtggtgtgacacacgcaatgccacaggccgaaggcgggcgcggcctacgactctttgaattgctctattgtgaagcttgcggtgacctgcttattggtggtcagcgcggacagagtattgcggaaagcagggtaacggaactgctaccgtcggcggccgacctcgagagtctgcccgagaaggttggctccgaatactacgacaagatgactctagacgaattcgcggtcttctggccgcgacgatcgcagccgtcactttccgaacgggactacgacgcatgggacgctgctagtctgaaccctgagacaggtctggtgttgactggccaggttgcgccaccagggcatattgatggttacctctatcgccagacagaggcggcggtgaagggccgtcacggtaagacaacaggccctttgatggcgcagccattttgttgtccgaagtgcggtacagattattcgaatagaccggtttccagtcgttcgcgttcgccaattcgtgcatttcgcaccggtgttacgaaaacttcgcagctagtagcgacggaactattcgaacttctgcatgcgatcggtgcggagccgaaggggattgtcttctcggacagccggcaggacgccgcaaaccaggcgttagagatcgaaacacttcatttgagagatcttcgacgagaagttctggtgattgccgctcgggcgttggtcaagcaggcaaatgcagattggattgacccgacgcaattcccgtcgctgatagctgccgccgctgaaaaccatgaagagatgaaacggcttgcagaaaaatttcaaaagcaaatggcgtccggtggccagaggaacagcggcaaaattccgcttggcaaattactgcaatgtgacggtatggatattggtgctctcactgcagagttcgcctcactgggtgtccatccgttcgatcgagtcggcaagaaactctataaaggaaaacggtggcacgatcttttcgctgagaatggggaacgacttgtttattctccaaagctcaatgacgcgcagaaggcaggaattaataaggaaattctcgaaggtcagtacgaactgatcgatgacgtcctttttgctaatactttctttgcgctggaagagactggcctggcctacccgtccatcatggtaggggacgaggccaaagcagatcgattagatgcctggctccgcgtgtttgcaggcgcttatcgcgttctggacaacaagtacgtcaatggcgaaaatttgaatgaatgggtttctgggttagatgttaagcacaaacgcgtgttgcgcttcgcccaagccgtatttggggcgagctccgcaaccgaaggcctgagtggcatcctcagcgagttttcagcgctcgagcatccgagcggtatgattcatattggcaaactgtacctcaaggtcgcagaggcacatgactcctactggcgttgccgcaattgtgagcgggtgcatcttcattggggacctggtaagtgcacgcgctgcggggaaatcttggacgagcagccaacgggtcaagcagcagaattatggcgtagtaactttctaggcaaccgcatcgtacgaggacaagatgagggcgttgatcgattccgattgcgcgtagaagagttgactggacagacagatgatttctcggaacgcttgcgcaagttcaagggtattttcgttgacggcgagaacgaaattcagaagcgcgcccaggaaattgacatgctgtctgtcaccaccaccatggaggtggggatcgacatcggatcattgcagaccgtataccaggccaacatgccgcctcagcgattcaactaccaacagcgtgttggtcgagctggtcgtcgaggtcaagctttctcaatggttgtcaccttctgccggggtcgcagtcacgatgcgtattacttcgctcatccgcacgcaatcaccggcgatccaccgcctccgcctttcctggctatcaaccacgaccccattccattacggctggtgcgcaagaactggctgcatgcggcattcaggcatttgcgagacgagtgcgctaaggccggctacgagtacccaggggacttactaattccgcccnatgtgcacggtgagtacgtctcgacacatgacttctatcatgatgttcaagcggattggcctaagcgattgcgcgaagcacttaaggaaactattttcgtacgcgatagtttcattgatgcagcttccttcgatcgggatcagtgtgttcggcttaccgagcaaacggacatcgacctgctgatgcaagagatcgaaaatctcagatcgtacgcgccagactcggagatggggcttgcccgattctttgctgaatggggattattaccgatgtatggcatgcctactcgcgttcgaaatttgtacctcggccttcgctcggtagaggttggcaaagaggagaactttgagtggtccatcatggaccgcgacctggatctagcggttttcgagtacgcgccaggcgcagttctagtgaaggacaagcaaaaacatcgtgtggtcggctttacaggcagcctatcgactccgcaaaccgttaaaaaggacgaactttcaatcaaggcgttgtctcgctggtacgaatcagaaactcatgtggcgctctgctcagcctgcggctcggcgacgcgcagggatgttttgccaaactcttcccttccatgcgacgactgccatgaggtgatcctgcctgatgcattcaagccctatattgtgccagcgggcttccgaaccgacttcaatccaaagaatgacgaagaagacatcggtcgcatgtccgtacggagcatggcaaccctggtgcatgaaggcgagcgcttggaatatggaagcgtaactgtgctgcacggtgccaatgtcaccatcatgcagatgaacgatggtgtcgcaaacatagagggtgaaggcgacggttttcttattgaagaagcattcgatctgaaagttccaatgccgtcaggatctaggaaacacccaaaaatagaaggaatgccccaagcattcgaggctggttggctcaacgctgcgcgcagtgggaattggggacaggcgcgctggagtaagttcggaaatccgctgccaagatttggtctcatttcctgcaagcagacagaatcggttcacttggagcttagccagattgacccgaggctggacctggcacatgtggcacgacgcggcaagtatggtcgcttgtcggtacgcgcagccgcaatcagtgcgacgcagatcttggtgcagcgggccgcccttgaactggacgtgtccgctgaggagtttgaggcgctcgaaccgagggtgcgctctggtaagccgatgcttcagatcgccgatgccttgatcaacgggtctggcctatgtcgtcgtttaggcgaaaccgttcctggaggctcaaggtcgaaaatcctagagatcctggatgacatcctggcaaatcatgataagtggccccttgttgacatgctcaagagatcagaagagggagagcactccgcgcaatgccatacctcttgctaccgctgtattcaacgctatggcaatcgccgctatcacagccttctggattggcgccttggcttggcttacctgcgcgccatgacaacgccggagtatgcatgcggattgaatgcgaatgatgagacctatcctgaaatcagcgattggcgtggacgggccgaatggttaacggagaacgttgcacagatgcgtcccggtaccttgactacttatcgtttgccgcattcgggactgtcttgcctgattgagcgggtgggtggagccgaaacgcgctacgtggttgtccacccgctctggagtttggagtcgagtgtgctttccgacgtgctgggagctgattggtcaccgaaactgctcttcgtggatacatttaatttggagcgtcgtccacttaagtcgatgagcactcctttattgcctcgctaa

SEQ ID NO: 354016 - DNA, 219 bp, Pseudomonas aeruginosa
atggccgacaacttcttcgagctcggcgggcattcgttgctggcgactcaggtcacggcgcgcatccatgccgagctggacatgaatgcccccctggtcttgctgttccaggccgagactttacaggcctatgcgacttcgcttgaaggctacaaacccaccgacgcagcggacttcgacgagctgcgggaattcatgagcgaactcgaggccgtctga

SEQ ID NO: 354017 - DNA, 492 bp, Pseudomonas aeruginosa
gtgtggtgtggcgacatcacctacgtctgggcgcaaggccgttggcactacctggccgcggtgctggatctgcatacccggcgggtgatcggctgggcgttctcggccaagccggatgccgaactggtgatcaaggccctggacatggcctacgaacagcgcggcaagccacagcaggtgctgttccattcagaccagggcagccagtacgccagccgcctgtttcggcaacggctctggcgctatcggatgcagcagagcatgagtcgccgagggaattgctgggataactcgccgatggagcgcctgttccgcagtctgaagtcggagtgggtcccgtcaacgggttacctgacggcgcaggaggcccaacgggacatcagtcattacctgatgcatcgctacaactggatcaggccgcatcaattcaacgacgggttaccacctgcggtggccgaagaaaaactcaacccactgtccgggatgggttga

SEQ ID NO: 354018 - DNA, 2043 bp, Pseudomonas aeruginosa
atgttcgcagcagccaaccagacccatttcagcctcgccatcgacggcctcgccctcgacctgcaggtgctctccttcagcggccgcgaagccatcagccagccgttcgccttcgacctggagctggtcggcgaacgccccgtgccggacctcgaaagcctgctgcacaaacccgccttccttaccctcgggcccgccggcaacggtatccacggcctggtgcgcagcgccggacagggcgactcgggcaagcgcctgacccgctaccgcatcaccctcgtcccgcaactggcctacctcgcccagcgcaccaaccagcgcatcttccagcacctcacggtgccgcagatcgtcggccgggtgctggaggaacacggcatcctcgccgacgcctaccgcttccagctcggcacccgctaccccgagcgcgaatactgcgtgcagtacgacgagagcgacctgcagttcgtccagcgcctgtgctgcgaggagggcatccattttcatttccagcacagcgccacggcgcacctgctggtgttcggcgacgaccagacggtgttcccgcggctcgcgccggtggcctaccagcaggactccggcctggtcgccgaccggccggcggtcaagcgtttcggcgtacgcctggaaacccgcaccagccgcgtcacccgccgcgactacgacttcgagaaaccgcgcctgacgctggaaagcgccgcccgcggcgaagcccggccggacctcgaggactacgactatcccggtcgcttcgtcgaccgcgagcgcggaaagcacctggccaggcgcgccctcgaacggcagcgcagcgactaccgcctggccgagggccgcagcgaccaaccgttgctgctcagcggccacttcctgccgctggccgcccatccccaggcgggctggaacgacctctggctgctcaccgaggtgattcacgaggggcggcagcctcaggtgctggaggaaagcatcgtctccgatgcctcggcgagcccggacgacttccggcagggttaccgcaaccgcttccaggccgcgccctgggaggcgttcttccgtcccccaccgacgccgccgaagccgcgcatcctcggcacgcagagcgcggtggtgaccggcccgaagggcgaggaaatccactgcgatcgctacggtcgggtgaaggtgcaattccactgggatcgcgaaggccaggccgacgacagcagcagttgctggttacgcgttgcctccggctgggcgggaaggaactacggcgccatcgccatcccgcgggtcggcatggaggtgctggtgaccttcctcgaaggcgatcccgaccagccgctggtcaccggctgcctgttccacagggaacatccggtgccctacgaactgccggggcacaagacccgcagcgttttcaagagcctcagcagccctggcggcggtggctacaacgagctgcgcatcgaggaccgcaagggccaggagcagatcttcgtccatgcccagcgcgactgggacgaaaacatcgagcacgaccagaagatccgcgtcggtcaccaacgccacgacaccgtgcaggcgaacagctacagcgagttcaaggccgaggaacaccgtaccacccacgccgagcgcaaggtggaggtccgcgccagcgaccacctcaccgtagccaacgaccagcacctgaagatcgccagcggccagttcgtcgaggccggccaggagatccacctgagcagcggcctgaaggtggtgctggaggccggcgccgaactgaccctcaagggcggcggcagcttcctcaagctcgacgccagcggcgtgaccctctccggggccaacgtccgggtcaactccggcggcagcccgggcaacggcagcggcgcggcgccgctgttgccggggccgctgcggcaggccgacgcggacaatccgggcgacctgctgatccgcgcgcagcgtcaggcattgctgcagaagaaaccgatctgcgccatctgcgaagcggccagggcgaaaaccgatgcgcactga

SEQ ID NO: 354019 - DNA, 882 bp, Pseudomonas aeruginosa
atgcgcactgaaccgatgctacccgccttgcccgccgacctgccctggacgctgaatgcctacctgctgctcgatggcgtcagcgtcacggaactgccgcgcaagctctaccaatggagcgatactccgaccttcgagccgctgtaccgcgacagccgctggcaggaactgctggacctgtcgccctgcctggtcgccctcgacggccgccaggaccctatcctgcaggcgttcctcgacaacgccacacaggaatggggctacctgctcttcgcccgggtcagcttgccgatcctgtcgcagcacctgcgggaccttctgtgcgtccaatctccccatggcgagccggtgctgctgcgcctggccgacccggcagtgatgcatagcctgctggaacatgaacgcatggaactgttcggtccgatcgagcaggcatgtgctccagatgccctggaaatccgctggtggcaacaccggcgaagcggttcggcgatcgctcgcgaccgcacgcagccctaccgtctgagcgaggccgaattcgatgcacttggcgaagtcagcttccgccagaccctcatggacatggatcgccacatgaatctgtatttccccggctatcgcccggccctgtgcggccgagagcgcttccagcacctgcgtatgctggccgagcaggcctaccgtcgtgggatgtgctcggcgcgggacatcctgctctacgccaatatcttcggctacctgggcgaggatgcgctggatgcgcacgcggacatcgccgtgctgctcgatggtccctccagccaatccccggcgcagcgggtggccgctgcggccgagctggcggagcgtcgcgccgccgagacagaaaggatgcattcatga

SEQ ID NO: 354020 - DNA, 3525 bp, Pseudomonas aeruginosa
atgactgcgcaggccacaccccggcgagacagcgccaacctggcggcaaacgaagcctcgtccagcgatagtcgttcgccgagcggcacctgtccgttgatgaacgccaaggtgcagctgttgccgctgcgctacggtttgaccgaaggcgtcgatccgagcgccgagctggcgatgcctttcgccctgaaaagccggccgctgggtctgcggctggtgcgcaatggctatctctacgtgatcgacggcggaaccggaaagctgcacgaataccgcatcgacaagggcgctatcgacaagctgctgtggcaggacgccgaggttcgcgccgacatacgcagccgcgcggtcggcgagccccaactggtctttccccgtaccagcatcctgtacgtggcctattcggagctgcaatggaccgcgcgcaagtgcatgcaggtgctcgccagtccgaaggaccgcgagcacttcatgcaggccgtcgatctgcgccgcgccgacccgcagcagggggggccgcatctgctgacccgacggcaggcggaaacctggctggccgaagtggtgcagaacaaggtgcatcgcgacgagcagggccagcagcgcttcccgccccaccagcagcgcccggccagtccacccgccgcccatccggacgaacgacgcgactacgtatgggaggatccgccgctgttccgcgatacccagttcggcgagttgactgcgcaggtactcccgcagtacgagcatgatgccctgttcctggcgctgcgcgacgacatcggcgtgatgcgcgacctagccgcctaccaggacgaagtggtcggctggctcgaggaatggctgcagggcggcgcccaggccggggccaacgagcgcgactacgtgatcgcctgctacatcgagtcgttgacccagatccgcgccgcggaactgcccaagctggccgacgagagtgcccagccgctgttcgacgatctcgaccggctgccacctcccgagcgggagcgatcgcgccaggccttgctggactacctcaacggcgagccgttgccgaagccgatggacccagccatgccggagccgctgcacagacctgtggagcgacacttcaccaagcggaaaatggcggttgccgatccggccttcgtcgaacgcaacctagacgccctgatccgcctgaagaagagccacggcgaaaaggtcgacgacgcgctgcatggcgccaaattcggccagcgtggcatcgacgacctgatcgaccgtcccgccatggatgccttcctcgccgccaacaggcccaacctggcgcgctggaacgccctgcttgagcagatcagcgcagaccgcacgcagatgcttaccgagcagcgattccatcgcgccgcctggtactacgatttccagcaggccgagcaattgggactggccttcgccacccagtacgcctgcctgaaggatatctgccgcagcgacgaggccagcgaggccgtgctcgccttcctgaaggaaaatccgcaatacgatcgcccattgttccagactctgccgttgaacacccaggccgaactgatcgcgcaatacgcgcagctcgggccgcccggccatctctggctctccaagctgaaagagtgggcgcagcagcgcgactcgctggagctgggcaagctgcccgctctcgacggcttgccggaggccacccgagcgcttgccgacagcgcccaggccacgctcaacccggcgttgaccctgggcatcagccggaccatggagggctttttcaagagcgtaggccagcagcaggcgccggatctcgacgcgctgttccgcaagctgcccaaggcccttcctggtcgcctgctcgacgccgcggtccgcgaaggggtgaccttcaccattgccagcgaagcggaaaaggccatcctccaggccgatctgaaggaagtgctcgaacagcgcgcggagctgcgccggctggtccgccagcgcaagcaggtgaagagccaggccggacacaagtcgacggacgcccgcgccttgctcgccgacatccagcgtgtccgcctccagctcaacgccctggagccgcgcctggccgccgccctcagcccgatcgccgagcttccggacaacagcatccgtctcgccggtgcgacaccaggccgcgccggaatcaccttgatcctgccgtctgcacagttacaggaagttgccagtggtatccgtaacctgcgcaatggctatagcagtgcagccgcgttcaataaggtgggggatggaattggtctggctgtgtttgtggcgcagtttgtcaatatggtgcaggtatggcgggggggtatcgcgacttcgccggataagcgtgagctaatgccgctggctggttctattttcaccacaatatctgcgggcgtagcggcagctcaggccattgccgatacagctcttcaggccagaagtgctcagttggcacaggggctgcaaaaccacgctgtggaagttgctcatgtacaaatgggaaaactgcacttacgcctagggtttgtgggatatgcggcaggtttttttgcagcagctgttgctactcaaacccactatggcgagtggcttggtgctatacgcagcggaaatgctcaagctcagcaaggtgccgctttagctatggttggctccagcggaatgctggccagcagcgcctacggggtatggcatacggggtatgctttaaaaggtgtgctcagggctgcaacacctgctgccgagcgtacagcctgggcattggctggcacgcgactttcgagcatatttgctcgattcaatatcgccggtgccattttcaccgccctcgaactggtaggaacctattggtataaccgcagtaataccacgccccatgacgattggttgctcagtacaccctggagccgcgacatcggagggcgcctgaaccagtccctggaaatctatcagcaacgacttctggggatcgtccagacgccaagaggtgaggtcaagcacgcgagtcatggcagttggtggcgagacctgctctcctcacctgccactgcggagatcagcctagccttgcctggtatcagtctgggagcactgcagcagaccttggccgggcgccctgaagtacgcttgagcctggcggcctaccgcattcgtagtgtgaaatacgaaagaggttcgcccatggtgcgttggttccccgtcaccgaagttgtcggcgacagtctacaggtcgcgtccgccgaaccgttggtgttgctggtgccgcggctagcgccgctggagggtgtgaccgggggctcggtcacggaggatctattactggctgtacagatcgaacgactgaacccgcagggtcaatatcatgccgatcggcacatggttcgcctgtcgccacacagcgaaggagactatcctgcttcgccacaacgtatccaggggcaggaagcatcctggatgctaattgacccccgtttgctgccggattttgccgatgctccagaacgataa

SEQ ID NO: 354021 - DNA, 858 bp, Pseudomonas aeruginosa; identical to SEQ ID NO: 326055

SEQ ID NO: 354022 - DNA, 1395 bp, Pseudomonas aeruginosa
atgagcgtagagaagaccaaccagtcctggggcggccgcttcagcgagcccgtcgacgccttcgtcgcccgtttcaccgcctccgtcgacttcgacaagcgtctctaccgccacgacatcatgggttccatcgcccacgccacgatgctggccaaggtcggcgtgctgagcgacgccgagcgcgatgcgatcgtcgacggcctgcaacagatccaggcggaaatcgaagccggcagcttcgactggcgcgtcgacctggaagacgtgcacatgaacatcgaggcgcgcctgaccgaccgcatcggcgtcaccggcaagaagctccacaccggccgctcgcgcaacgaccaggtggccaccgacatccgcctctggctacgcgacgagatcgacaccatcctcgccgagatcacccgcctgcaggagggcctgctgggcctggccgaagcggaagccgacaccatcatgcccggtttcacccacctgcagaccgcccagccggtgaccttcggccaccacctgctggcctggttcgagatgctcggccgcgactacgagcgcctggtcgactgccgcaagcgggtcaaccgcatgccgctcggctcggcggccctggccggcaccacctacccgatccagcgcgagatcacctgccagttgctgggcttcgacgcggttggcggcaactccctggacggcgtctccgaccgcgacttcgccatcgaattctgcgccgccgccagcctggcgatgatgcacctgtcgcgcttctcggaagagctggtgctgtggaccagcgcgcagttccagttcatcgacctgcccgaccgcttctgcaccggctcctcgatcatgccgcagaagaagaaccccgacgtgccggagctggtacgcggcaagtccggccgggtgttcggcgccctcaccggcttgctgaccctgatgaagggccagccgctggcctacaacaaggacaaccaggaagacaaggaaccgctgttcgacgccgccgacaccctgcgcgatagcctgcgcgccttcgccgacatggtcccggcgatccggccccggcgcgagatcatgcgcgaggcggcacgccgcggtttctccaccgccaccgacctggcggactacctggtgcgcaagggcctgccgttccgcgactgccacgagatcgtcggccacgcagtgaagtacggcgtagacagcggcaaggacctcgccgagatgagcctcgacgaactgcgccgcttcagcgagcagatcgacgccgacgtcttcgacgtgctgaccctggaaggctcggtcaacgcccgcgaccatatcggcggcaccgcgccgaaccaagtccgtgccgccgtcgcccgcggccggcagttgctcgcccagcgctga

SEQ ID NO: 354023 - DNA, 942 bp, Pseudomonas aeruginosa
atgtcgtcccgcgaaatccgcatcgccactcgccagagcgccctcgccttgtggcaggccgaatacgtcaaggcgcgcctggaacaggcgcatcccggcttgaccgtcaccctgctgccgatgaccagtcgcggcgacaagctgctcgacgcaccgctggcgaagatcggcggcaagggcctgttcgtcaaggaactggaaaccgccctgctcgaaggcgccgccgacatcgcggtgcattcgatgaaggacgtgccgatggactttcccgaggggctcggcctctacaccatctgcgagcgcgaagacccgcgtgacgctttcgtctcgaacacctacgccagcctcgagcaactgccagccgggagcgtggtcggcacttccagcctgcgccgccaggcgcagctgctggcgcgccggccggacctgcagatccgtttcctgcggggcaacgtcaatacccgcctggccaagctggatgccggcgaatacgacgcgatcatcctcgccgccgccggcctgatccgcctcggcttcgagtcgcgcatccgctcctcgatcagtgtcgacgacagcctgcccgccggcggacaaggcgccgtcggcatcgaatgccgtacggccgacagcgacctgcatgccttgctggaacccttgcaccataccgacacggctctgcgggtcactgccgagcgcgcgctgaacaagcggctcaacggcggttgccaggtgccgatcgcctgctacgccatccgcgagggcgaccagctgtggctgcgcggcctggtcggccagcctgatggcacccagttgctgcgcgccgaggggcgggcgccactggcggaagccgaggcgctgggcgtgcgggtggccgaggacctgctggagcagggcgccgaagcgattctcgaagccgtctacggcgaggccggacatccgtga

SEQ ID NO: 354024 - DNA, 378 bp, Pseudomonas aeruginosa
atgacaatagtcaatccgtacggcagaaaaacaacatatcactttcaatttatccaaggtataaaatacataacgtctatcgaaggcgaaccctctcccaactgccccagcagcaattccaccttcacctacgatgaccagggcctgctcaccagcaaacgcgacaacaacggcaacctgaccacctaccagtacaacgcccgtggcctggagacctcgcgcaccgaggccgccggcactgcgcaggcgcgcaccatcacaaccgactggcacccgaccctgttcctcccggtgcaggtcagcgagcccggccggatcacccgctaccagtacgacgccgagggacgcaagaccggcgagaccgtcaccacccgctga

SEQ ID NO: 354025 - DNA, 240 bp, Pseudomonas aeruginosa; identical to SEQ ID NO: 340141

SEQ ID NO: 354026 - DNA, 300 bp, Pseudomonas aeruginosa
  misc_feature (58)..(58): n is a, c, g, or t
atgaaccaggaacgcgtattcaaagtgctgcttggtccgcacatctccgagaaagccncgggtctcgcggacggcatgagccaattcgttttcaaggttgccaccgatgcaaccaagctggaaatcaagaaggccgtagaaagcctgttcagcgtgaaggtacagcgcgtcactaccctgaacgtcaagggtaagaccaagcgcaccgctcgcggtctgggcaagcgtaacgactggaaaaaagcgtacatcgctctccagccgggccaagatctcgatttcgccaccagcgctgagtaa

SEQ ID NO: 354027 - DNA, 432 bp, Pseudomonas aeruginosa
atggctgagctgcaacgcgcgagtgtgacgggaggtgggctgtacgagaggctgctgcagcgtctcgccctggctctggatgaagcggatacggccgagcgcctgcgtgacgagcatcccacggagcttgagttgcgtggtttgagcgaagcggagatggggctgatacgcgcctatctcgaccaggacctgcactggttgcgcggctggcatgcggccgccgaggagctggcgctgctcgagcgccagcccggcaggacaccccggccgccccggccgcaaccgccggcgccccgtcggcacgtctcgttgaaacagcggcaactgctctgtgcgctctgcggtgcgccggtgcagtggagcaaggggcatggcgtgttgccgtgcggccattgcggctcgcaactgttccgttcgggcaacggccgctag

SEQ ID NO: 354028 - DNA, 435 bp, Pseudomonas aeruginosa
atggtgccgacccagtgggtgttcctggcggcgctgccgctgctgcccaacggcaagctggaccgcaaggcgctgccggcgccggaagccggcgacagccagcaggtctacgccgcaccggagacggacctggagcagcaactggcggcgatctgggcggaggtactgaagctggagcaggtcgggctgaccgacaacttcttcgagctgggcggtcattcgttgctggcaacccaggtgctggtacgagttcgggaacaactcgggctcgaaatggcgctgaaggaactgttcgagtttcctgtcctgactgatctggctcgccaactggaagggcgcggcagcgtcagtgcatctctccaggatgaattggctaaatccctggaggcccttaaacgtcttactacggaggaaatagatgcgctgacgtcttaa

SEQ ID NO: 354029 - DNA, 555 bp, Pseudomonas aeruginosa
  misc_feature (297)..(297): n is a, c, g, or t
atgatcgacccagcagacaagcaaacccaagccctccccctggagcagccgaagcgcgggcgcggtcggccagccaccggcaaagccctgtccgatgcagagcgggcgcggcgctaccgggcgaacaagaaaaagcgtgacgatcaaccgtcacgaaaagacaacgaggacgggaaagaagcgctgcaccggagaacagtgatccagcaagctgagcaaatacgggcgcttgaacagcaactggtgcagcagcgcgaggaatacaacgacctggtgcacaagctcatgactgaacgngaccagctcaagcgcgacttggctgccaagccaaggcgtcaccgcgatcaacctgccgccgaactgccagagagcgcctacgaggacgaacccggggcgaagacctggacgctccagggacgcagcggaagcggcaagtggcagaacctggccgcaggcctggaccgcaaagaagccagccggcaactggatcgagtgatcgacaacaagatcctaggcgctacgaaaggccgccaataccgcatcgtcgaagaataa

SEQ ID NO: 354030 - DNA, 345 bp, Pseudomonas aeruginosa
atgctcgctctcatcggcctgtgccagggctattactccgatactcgcaacgtcaataccgccaacggtccttcgcagattgttgaacactcggtgctcgtccaggttgagcaaaccaataagttcggcatgccggaaaccaaggttgtccaggtccgtatttcgaagcggcatatggatggcgggctcaataatgtctggaagatggagaagggcaaaactgtgtccgtcccggtatttatccaggcctgggcgagtaagtccggtaacgccggattcgattattggctgtcgggcgatggcatgccgttgaaacttcaagccgttcaggagaaagccgcttaa

SEQ ID NO: 354031 - DNA, 1233 bp, Pseudomonas aeruginosa; identical to SEQ ID NO: 347597

SEQ ID NO: 354032 - DNA, 555 bp, Pseudomonas aeruginosa; identical to SEQ ID NO: 329848

SEQ ID NO: 354033 - DNA, 1101 bp, Pseudomonas aeruginosa
  misc_feature (630)..(630): n is a, c, g, or t
atgaatactattgaagcaaaagtcattcgaaccgaagagcagtacagagagtacttcgacaaggttcaagagcttattcataaaatgccgatacctggcactgatgaaagtgacgaccttgagcttctgtccgtgctaattgaggactatgaaaaaaataaatatcccgtagaggcacccgacccaattgatgccattttattcagaatggaggaaaaaggtcttaaacaagccgatttggttccctactttggaacacggagtcgagtgtcagaaattctctcacgaaaaagacctctcacagtcccaatgatcagggcattagccataggacttggcatatcgactgatacgttaattggactttctgaaatagagaacactcctaaaaaagaaagtatcgactggaaaaaatttccagttgccgagatggtgacaagaggatggattcaaaaggctacggacaaagcgaaatccagtgccgaagaaatagtaaaaaagttcattttcgagatggggctccaaactggaggagcatcctttagaagaactctaaaaggtgaagcagcaacccccaccaccaattacactctgtacgcatgggtcgcacgaataattcaaaaatcaagngaaactcgaaaaacaatcgaataccaaaaagaatcaataaacaacggtgctgcgttattagatacagacggaacaccaataattggcctaactcttcgcaacgacagaatagataacttctggtttacactgatacacgaggttgctcacatatggaagcatatggatgacaactcagaagcaatattagatgacctagaaagaccatcagaagacaaaagagaagccgaagccaacagaattgcaagagaagccttcataccgagatccatatggaaaaggtcagatgcctatttaaaccccagtaaggagtcgatattcgaccttgctagaaacttaaaaatacaccctgcgataatcgcgggcagattgcgacaagaaagcggcaactacaatctcttctctgaccttgtagggcaaggcgaagtaagaaagctgtttaaatccgaaatgcagggtgaaatgttatga

SEQ ID NO: 354034 - DNA, 603 bp, Pseudomonas aeruginosa
atgagattcggtattccaagtggtattccaagccatccactggtaatttttggaataccgaaaccgttcttggaataccccatgtgcgcccaagccacccgcctctcggacctcaaggtcaaagccgccaagcctcaagagaaggactatgtcctgagcgatggtgacggcctacagatgcgagtgagaagcaatggctccaaactctggaacttcaactaccggcacccggtgacgaagaaccggatcaacatgggcctcgggaccttccccgaagtttcattggcgcaagcccgcaagcgcactgttgaggcacgtcagctcctcgcccacggtatcgatcccaaagagaaacgggacgccgtgcagcaagccaagaaagcagcgactgaacacaccttccagaatgtggcgacgtcttggtatgagctgaaaaggatgcggttacacaagcctacgccgaggacatctggcgctccctcacgctgcacgtcttcccagacttgggcaccactccgatctccgccatcaacgctcccaaggtcatcaacctgctccggccacttgaaaccaagggcagcctggaaaccgttaaacggctga

SEQ ID NO: 354035 - DNA, 237 bp, Pseudomonas aeruginosa
atgtcggcagtcctgcacaagatggaatctgatcttgaaggatacaaaaagacctttaccaaaggcccattcattgactacgaaaagcagtcaagcctctccatctatgaggcctgggtcaagatctgggagaagaactcttgggaagaaagaagtacccttttcagcagcttgttagagatgaactggagcgggcggttgcctactacaaacaagattcactctctgaagcggtaa

SEQ ID NO: 354036 - DNA, 774 bp, Pseudomonas aeruginosa; identical to SEQ ID NO: 322267

SEQ ID NO: 354037 - DNA, 678 bp, Pseudomonas aeruginosa
atgagtctgttcggccaaggtgagcaagacaccagcatggtaacgggagctgctgctgtcacctccgccgcaggagcgctttccaccgcaggcggaactctggtggctggtgcggctgccattcagggagcagcagccagtcttgcggccgcgaatggactcgcaggtgctggtgccgctgccagtggtgccggtgcggccggtgcggctgccggtggtagcgggtggtggtcctcgatcacaagcatgttcgggttcgccgagggcggccaggtccgcggccctgggactccaacaagcgacagcattccagcctggctttcggatcaggaagtcgtcatcagggccgcggccgcaacccagccgggcatgaccccgctgctcctggacatcaacaagcgtggttgggctgcgctgcatgactggtccggcgctgtgcgccacgcgacgggcggaatagccaccatccccgcgcccgcaatgcctgctccgggcctttctgcttcgcgcctgcaggagccatccaagaacttcagtacctcggtcgccaactcgatctacctgcacgccgttcaggacacggatcagatggcggccgacatgtgggccggcaaaggcggcgaacacttcctggtctggctgaacaagaaccgccaggccgtcaagcagattatctag

SEQ ID NO: 354038 - DNA, 231 bp, Pseudomonas aeruginosa
atgcgcccgtgcacccgtgccgggaacgacgccgactccagggtgatcgcgcgcgccgcgccccattcgatctcggccttcaggcgggtgctgccggactcgcggatgatccagtcgacgatctcctcgtggcggcggtcgaacacctccaccgccttgtacagtaccgccgcgcgtgccgagggcccgagcgcggcccatgccggctggacctcggcggccttggcgtaa

SEQ ID NO: 354039 - DNA, 597 bp, Pseudomonas aeruginosa
atgagccgaactgaagaatcaaaccagagggaagtcgtgtgtaaccaggattcccgatctgagcaaaatcaaagttcggcatccacatcccggattggcaatctactgggaacaggtgatagttacgccagtgctatctggtgtgttatagggggttgtgtagttgaagccggggccgatttcagtgatcaggccgaattgatatctcgttccaaaaacttgattaacgcccaagcaaaatctccctccacaagttatcgcatatcgaatgtagtcgtaatacatcatacctatatccgcgccttggagggtgcaccaatactttacagtgccggcgttgttatcaaatctcgctgcattcaatgggcgtgtccaaacaccggattggcaagaaagtatcaggcctgccgtgttcataccttggaggcccgtgcccgaacacgcagtgccctccgttacgattcgcggattcaccgccggcagagctccgagcgtggtcgaatcgcctgcgttgcaactcagggcgaccagggcggcgcacagcgccaatgcgatgcggttcatggtgacctcacttgcacatggtttcggttttaa

SEQ ID NO: 354040 - DNA, 174 bp, Pseudomonas aeruginosa
atgggcgcatacgcaggcctctcaggtgagacgccgatccttgctctggatgtctgggagcacgcgtactatctggactaccagaaccgccgtcccgactacatcgcggccatcttcaacatcgttaactggcacgagtcgcccggcgctacaaagaggccgtcggttcaatga

SEQ ID NO: 354041 - DNA, 1206 bp, Pseudomonas aeruginosa
atggcgccggatccagccctcttcctccaggcaggcgagaaacgccgggaaccgcccgggcaccgccagccactggttcaccgtgcgcccgccgatccggcaacgatccgaatgcatcccggcggcgtaggggcgcttgcgctcgaacatggccagcaattcttcctcgagatcgaagccgtcgattacctgcgtagtgctcaggccgacctcgttcaggcggtagccgttcctcacccgttcgaggaaggccgcgcgcccgccaagctgcggcaggttgtcgtagagcgcgcgcagggccttgcgcgcatgcccgctggcggcgttgtcgatggtcacgtgcaactggaagtagtaggggtcgaagcccagctcgcgcagctcctgagtggtgatcaacaggtgcagcggcggttgctcgtagccgaggttgtagccgatcacttcgggcaggtagtccgcggcgaggtggccgagggcgagttgctgggtgccctgcaggtagtggaggtcgctgaggccttcgacttcctcgctgccgatgctggccagcaggcgccggtagagcaggacgtggttgcgtgccgggacgccgtcgccgagttcttcgaggaaggtctccagcagcggccgcaggcgttcctcgccatgatgcggcaacagcccatagagccaggcgccgtcgaccagcttggtcggggccacgctgcgaatgaagtgcatcgcctgggagggaacctggaagtagcgtcgcccttcgccgcgccgacgtgcccggaggtattcggcatgcgcctcggcggtgcgccgggccccggcgtcgagccaggccggccaatcggcggggtcctccggcaggtcgtcgtcatgggtggcggccaggctcaattgctggtcgaggaactcgccggcggcttcgaggtgctcgcggggctcgtcgagcagggcgtggtacaggtcgcggaccctgggcgaagggcttgcactggaggcagggaggggcgaagacaggctcatgtcgcgttccttgtcgtgggtttgcgggggcggccggggcgaccacacatatgggtgcgagtgacaccaggggaaaaaggtttcactggcaggatcggcggcgcgccggggaacctcacggcggaaaaaacgaacctcgacggcactccggcgtcttcccgagacaatccccgggagctgcgccgatga

SEQ ID NO: 354042 - DNA, 528 bp, Pseudomonas aeruginosa
atgaagcgcttcctgattgttgctgtaatgtttcccatgctggccacttcggctctggcggaatccgggtcgaacatctttctgagcggtaaggtgttcaaaggggacgaggttgtcgcttcgtttgccgcaccgactcttctggggaatacccttcccgttaaagaccaggtcctccacagctatatcgaaaaagctgtaagcgacggcaaaaaaacgacgctgattccgggcaagcttgttacgggcctcgatatgtcgatgactccgacagctgttgttggtgaaaacgtgatcgtcgccgtaaaaggctcgctggctgtgctggaggggttcgacaaggcgcccctggctggtactaatctggcgattgatttgccgaagatgagtcgaaacgagttcagtcagtcgttcgaaatcaaaaagggacagcccctagagttcggtttcggagggtgcactctggtcgacggtaatccgaccaattgcagccataagctgattcttgatgcttctgcaaacaactga

SEQ ID NO: 354043 - DNA, 258 bp, Pseudomonas aeruginosa
atgcaaacacaagagctgaaagcctaccaagtcggcgataacgatattgtcgccgcctacgaccccgccggcgccattcaagtgctgtgcaagcaaggcggatacgctgacgacgatttcaccgtcgacgacgtggaactggttgacgcccgcctgctcaaagcgccgatgcgcgacgaagagggcaacgaatatccgccgctgcgcgtcgacctcgatgccgccaccgaaccgacctacctgcatggctgggattga

SEQ ID NO: 354044 - DNA, 201 bp, Pseudomonas aeruginosa
atgaataccctagaccgcatggccagcatccccgctgcgccgacccacgccctgcatgtgttggacaactgggacggtgagggcgaccgcctgttcttgttcgccttcgagcgggatggcgagttctaccgcttcgacgacggcaagccggtgctggagtacaagggcgacaaggtgctgaaagcctggctgctgagctga

SEQ ID NO: 354045 - DNA, 693 bp, Pseudomonas aeruginosa
atgatagcagcatccagctatgtcgctgacgcaacaaggcttttgaccgcctttggtgttcacgaggtgtctcaaggcgtctgggcgctgaccgatgttaaaacggccagcgaatcctacattcatcactcacagaagccggcagctctcgctgcatatgcggcggtgaacactacgttcgcgacaggtcgattcccgggctacgccttgattgacctggtcgacaagattccgagcatggattacgccgagtacgcggctttagccatggtatgtggctcgcctatgccctcgtttgaaggatccgatgcgcgggcgttcctgttcgggcaggcagtctggaatgtggttgaaaagtacgagcttcaaggctgtttcgagcggcagaaccaaaagtttcccggcaacggcgatcactacaacctacgtcctcggggttacgactgggccggggactgggaggtgattccggatgccctcaaggccatgcgcaagtgctatcgagctatgacgccgcttcagcaagtgatgaccttgactgtcatgcacctgtaccgccagggcaaggacaagttgttcttgaccggcgggtgtccgaccaagatccatgctgcggatgcgttgcacgtcttgcgcaagagcgcggccttgtctgactggggccatctggtaactaattacgctgggtggtaa

SEQ ID NO: 354046 - DNA, 231 bp, Pseudomonas aeruginosa
atgccgatgtttcacgaatgccgtctgtgtgagacggaaggctttgtcgactacgacatgctctgtggcgcctgtgcggcggagcgcgatgagcaggctcgcgccgaaacgcagtgccctgaatgcggtcgtctcggtgtcaccgcaacgggaatttgctatccctgcgagaacgcccctgacgacggtgttgatcaagcccagggcgatagggaagggcagacagtatga

SEQ ID NO: 354047 - DNA, 231 bp, Pseudomonas aeruginosa; identical to SEQ ID NO: 330976

SEQ ID NO: 354048 - DNA, 465 bp, Pseudomonas aeruginosa
atgtcgaatgcaagcattttgagcgatgcggactggccgcataaccaggatatcgtcgtgctggtcaagcccagtgcgcgcaaacgggtaggtatcacttttgtaggcatcgcccttttgttttgcgggggcatggcggtcctcagcgaacgtggccctgtctcgtcatggctgcagtccatggatcgagaggctgatcgcgccaagctggagccggagatgcgcaaattcgctgagcagggcaagccggaagcgatcatctggctcgcccagaacttcccgaaagagaacagggctgctctcgaagctttggcaagccaagggaacggaacagcgctctttaccctgggggcgctgcgccttcatgacggcgacaaaggcgagttcgaatcattgatgcagcaggcggcggaggcaggtaatgctgacgctcttcgcatcatcaagcgccaggctgagcgttga

SEQ ID NO: 354049 - DNA, 288 bp, Pseudomonas aeruginosa
atgaagatactgggtattccattgcggacgccgtcggtaaaggatttaggtgactttctgatccgccttctcgtcggtgtcgtcatcgtcggtttgcttgtccattttagggtgttgaacgtcaactccgcctccggggccatcgttgggttggcaggtgctctgcttgccatggcttgcggttgtactgtgcgagaacatggcctccgtgtaggagtggtctgggctctcttctcgatggccatggctatcgcgtgtttggtgatcatcgccgtcgcggcggtctag

SEQ ID NO: 354050 - DNA, 204 bp, Pseudomonas aeruginosa
gtgagtcgcgctcccaagagacagctggctgaccgtaccgccgaggcggatgcgctggccagccgctggctagcggacggccacgcggcaggcgccctcggcgataccgctaaagccgagcactgctatgccaaatcgcagttctggaaggaccgctacaacctgctgaccggatccggcgatcgcccggcccctaaggcttga

SEQ ID NO: 354051 - DNA, 129 bp, Pseudomonas aeruginosa
atgcgggacacccaggaaagaagtatcggcggcgaaatcgagttttccgcggtcaaaactacggccatgaattcgggagaggcgaccctctcgaagcattcggcatatgtgacggcaggcttgggatga

SEQ ID NO: 354052 - DNA, 606 bp, Pseudomonas aeruginosa
atgcgaatactcaccgaaatgcgtggacaaggcaaagtcctgcccgatcatcaacgccccgaacccggcgccgacgaatcccgccaacccccatataccgtggaagaacggcaactcggtctttccgatgagcgcctccgacaggcttgcctgggtattgttcgacacattgaccgcgctataggagaaccccgatacgaacaacagagcagcaagctggtagacgctagaagccaagggaaccaacgacagcagaacggcgttcgcgagaatcgccgttactccaacgtttctgctgccgagcttcgcgatcatccagccggataccggcaacgagagcaccaccccggccgacatggcgaaaagcgcactgccgaacaccccgtcggaaagctggagtccgtcttttatcgtggccatccgggggctgaggctcccgaaacacagtccgagcatgaagaacatgccggagatggcaatacctttccctacgctgctggaggtcattcgatcgatcccggtgcttgtttgatggacagcgaaagcgcggtatccgcggcgtcttccgtgtgctcgactaggacgcgaatgcgtcgatcccggtga

SEQ ID NO: 354053 - DNA, 1728 bp, Pseudomonas aeruginosa; identical to SEQ ID NO: 330826

SEQ ID NO: 354054 - DNA, 492 bp, Pseudomonas aeruginosa
atggccctaccgcttaaacaactcttgccttcgcgcgacacggctctacacgccagttggatcacgctgactgtccttgtactgctgctttcagcggctgtactcatgacgatgggcaggctcaaggagaccggcacgtattggcaaatcctcgtcgaagtcgccctggtattgctgtcagtccaatggctgctcaccgcaacctgggttcgagtgggtactcgtcgtggtccatggaccagacaggccgttttaactccgctcgcctggctcagcgtgacctcggtgctatacgtctatgccgtggtacaggtgataaatcggttgattccaacaatggagacgatagccccccacgcgactacaggggccgccgagggtgcggcatttctcacgctatgtgccggattttcactatgcctggcgactatgacaatggtcattacgcacctttgctacctgtgtattcgtcaccggcgcactatcggttga

SEQ ID NO: 354055 - DNA, 675 bp, Pseudomonas aeruginosa
gtgggttccgtaaacagtaaacccgctatcctgaccgccgaggttgatagtcagcgatcccatgctctccataacggggctgcgggactgctgcaacagtgccgacggaacatccgggatactcgggagcagcctgggaatgttcaccccgccaccgtcggcgaacctcggaacgcgcaggctgttgagccgatcgagcacatccggaccgtaatggcgaaccgctgctgcgcgaacaacgaactcgccattagacaggcgagccaggatgctgtcggaagtccccgtccctggcccattgatccggccgccgccggcaaagccaggcagcttcggcgccccccctccaccgcccggcaatcccgcaccaacgcccggcacaacggtaaccgggataaacatccgctttgcgagatccgcagctaccgcatccaactgagccttcagtgcatcaacgctttcgaagtccatgccgaaggacacctggacgttctcaacatccttgatccgcttctccaagtcggccaggttcagttcgtttacctgctgggcggccttggcatttcccgcctcaacctcggcggccttgttggcgatcctctccaactccttggccataccggcaaacccgtaactgttctctcctgcatccttcaattgctggagcagctctag

SEQ ID NO: 354056 - DNA, 492 bp, Pseudomonas aeruginosa
atgagctctgtgtctgatgcaaaacgccctcgtcgaggcaagaagccacaggggatatctctccacccgcgcgccaaggaaacttggcagcgcttgcccttcgtaggcaaggaccatggtcgctactcaatgtgggatgttcctttgactggtagctacctcaccggtctcgaggccggcaagagtatcgcgcacatctatctgaagtatgtccgggacgtggatgactggatggctagcgaggtgttcaggagcatggtccgtgatctgctcgccaaagcgcctttggatgagcgagaggaaactgtcaaacgcggccagttcacgggattcatgagcgagatattcaactggctcaaggcgtctgcccagtttgccggaagcagtctagaccgggtggaagaccaggccctcgtagatcgggtgaaccattacttggatgcaggcgtagccgatgccatagatgctgagattgagagggcttcgacatga

SEQ ID NO: 354057 - DNA, 618 bp, Pseudomonas aeruginosa
atgaagatcactgccgatcagctcgaccgcgctaccggctgcggtgctgctactgcctcgacttgggtcgaacacatcaacggcgccatggctcggttcgagatcaacacgcccgagcgcgtggagatgttcctggctcaggtcgggcacgaaagccagagcctcaagcgcctggtcgagaacctgaactactccgccgaggggctgctcaagacctggccgaagcggttcacgccggtagaggcgaagcagtacgcacgccagccagagcgcatcgcgaaccgcgtctatgccaacaggatgggcaatgggtcgccagatacgggcgatgggtatcgataccgtggtcgcggcctgatcatgatcaccggccacgacaactacgccgaagccgcccgcgccctggcgctgccactggtggcgcaaccggagttgcttgagcaacggacctgggctgccatcgcgtcggcatggtggtggaagtcgaggggtttaaacgaactggccgatcagggtcgcttcgagcggatcaccctcaagatcaacagtggctacaacggcgcagacgaccgtgcggctcgcctcgaatgggcgcgtgctgcgctcaatggggaatga

SEQ ID NO: 354058 - DNA, 237 bp, Pseudomonas aeruginosa; identical to SEQ ID NO: 332089

SEQ ID NO: 354059 - DNA, 231 bp, Pseudomonas aeruginosa; identical to SEQ ID NO: 324752

SEQ ID NO: 354060 - DNA, 282 bp, Pseudomonas aeruginosa; identical to SEQ ID NO: 323796

SEQ ID NO: 354061 - DNA, 561 bp, Pseudomonas aeruginosa; identical to SEQ ID NO: 323795

SEQ ID NO: 354062 - DNA, 282 bp, Pseudomonas aeruginosa
atggccgtgctccagacccataaagtcgtggcgcaactccccgcgtcgctggagccgaacgcgatctacttcgtccggcgcagcaccggctacgaccagttcgtcaccaatggcgcgggcgtggtggtggcctatccgatgaacgtccgcatccctgcggctgtgccgggctatctcgccgacggctccatgcttcggctcacgatgagccctgacggccaactgccggcctataccgccggcggcgcaactctcaacctgcaggtacttttcgatggctga

SEQ ID NO: 354063 - DNA, 435 bp, Pseudomonas aeruginosa
ttgctggcgcgcctgcaaaccatcacgccaaaccagggataccggacagacgctggcactcgtgtgctctccgggtggtttaacgaactggtcaaggaacggcacgagggctttccgctgattgtcgtccagcccggcaaggagcagccgccggagcatcttgatgccgccgttcgcttccatcgcggcttcgacgtggtaggcgcggtgcaaggtgggtatgaccactatgaggaggctctggaggacctacagctagaccttttggcgtgcctgatgcctgcccccaaggggcatttcctgcgttggctgccccgagagcgcggcattaccgggctgacgttgggggcgcctgagccgtacccgccgggtgatggagtggccgctgctgtgattcgaatccctgtctatctgaaaaccatcatcgaggcgtaa

SEQ ID NO: 354064 - DNA, 336 bp, Pseudomonas aeruginosa
atggcagtcagcgaaaacctacggaacctcagagaatccaggggtttgagccaagaacaggtcgccgaactatgcggccagtcaaagtcatcctggatcaaatgggagcacggcgatgcccagccgggcgctagtaagatcagggagatagcaaaaggccttcaggtatctaccgatgaaatcatcctagagccaggggagcgctcggtcagacaagacctgcgcaagctcatgcaaaaaatcgaggcgcttccggagcaccgccaggctgagatacggagggcgctaaaaggccatctcatgatcctggagcaggaagagctcgacgaggagtag

SEQ ID NO: 354065 - DNA, 390 bp, Pseudomonas aeruginosa
atgagcagaactcgaacctacgtggacaagctgctgggcgataccgagtacctcctcgagcagtgggggtggtggcgaatggatggaatgggggttcccggatatgtgtcgccggccgccgctatcatgagccaagccatgccaatgtcgagccccaaggcctaccacgtcactgatgatatggccttggccgtcgaccgggtcattgctcgactcatcgacagggcgccgcaggctggtgatttcgtgtggctctactacggcgcgaagtggccggccctgcgcatcgcgcgtgaacaccagatcggcgaggccaaggtcagggagactttgaagttggcggtgggctgggtcgatagcgctctggagcggttccgcgagagcgcttga

SEQ ID NO: 354066 - DNA, 360 bp, Pseudomonas aeruginosa
atggccaagtaccgcatctcccatgatgcccaagcggacatcgtcgatatcctgcgcttcacccacaaccgcttcggcgatgccgcgcgccgacgttaccaggcactcataggggcggcgctggaagcagttgcgacagacccacaacaggtaggcagcatcagccgtgaagaattgggagctggcctgcgcagcatccacctcgtttactgccgctcgatgcccaacgtcggtaaggttgttcggcccaggcacttcgtcttctaccgggttgcgacagaccaggtgctcgaggtggttcgcgtgcttcacgactcgatggagcttgagcgtcacctggctcgcaaccgattacgttga

SEQ ID NO: 354067 - DNA, 180 bp, Pseudomonas aeruginosa
gtgttcgacgctgccgagcggttgccggtgttgctggcggtgtcgcccaccaccgtctgctcaaccgagctgtccaaccgagccatgatccagtcgatggcccgcgagatcatggtcggcatgctgatttccgcctccaccaccagggtggcgctggcgatcttgctgtcatcgtcgtga

SEQ ID NO: 354068 - DNA, 1221 bp, Pseudomonas aeruginosa; identical to SEQ ID NO: 26773

SEQ ID NO: 354069 - DNA, 1407 bp, Pseudomonas aeruginosa
atgggcatgatcgccaatacccaactgaaagccgcacggggaccgctgctgctcgactggcgccccgaggaccccgagttctgggcgcgcaacggcaagcgcatcgccagccgcaacctgtggatctcgatccccgcgctgctgctcgccttcgccgtgtggatgatctggagcacggtgaccgtgcgcctgaacagcgccggcttcgccttcagcaacgaccagctgttcctgctcgcggcgctgccgtcgatctccggcgccaccctgcgggtgttctattcgttcatggtgccgatcttcggcggccgtcgctggaccgccctgagcaccgcctcgatgctgatcccgtgcatctggctgggcttcgccgtgcaggacccgagcaccccgtactgggtgttcgccctgatcgcgctgctctgcggcttcggcggcggcaacttcgcctcgagcatgtccaacatcagcttcttctatccgaagagccagcagggcaccgccctcggcctgaatgccgggctcggcaacctcggcgtctcggtgatgcagttcgccgtgccgctggcggtggccggcggcctgttcggcgccttcggcggcgagccgcagcagctcggcgacggcggtcgcctgtggctgcagaacgccggctggatctgggtgccgttcatcgccgtggtatcggtcgcggcctggttcgggatgaacgacatcgccgacgccaaggcctcgttccgcgaccaggcggtgatcttcaagcgcaagcacaactggctgatgtgctggctgtacgtggccaccttcggctcgttcatcggcttctcggccggcttcgcgatgctcagcaagacccagttccccgacatcaacccgctgcaatacgccttcctcggtccgctggtgggcgccctcagccggcccctgggcggctggctggcggacaagttcggcggcgcgcggatcaccctgtggaactacgcactgatgatcggcggggtgttcacggtgatcgccttcctgccgggcgacggcggccagggcaacttcttcggcttccttggcgccttcatcctgctgttcttcttcgccggcatcggcaacggttccaccttccgcatgatcccggtgatcttccgcaacgagtgggcccggcgggtgcgcgacggccaggccgacgaagccggcgcggcgcgcaacgcgagcatggagtcggccgcggtgatcggcttctccgccgccatcggcgccttcggcgggttcttcatcccgaaggcgttcggcacctcgctgcacatgaccggcagcgccgagggcgccctctacgtgttcatcgcctactacctgagctgcatcgtcgccacctggtggtggtacgcgcgcaagggtgcggagagtccctgttga

SEQ ID NO: 354070 - DNA, 2046 bp, Pseudomonas aeruginosa
atggtcatcgtttgctgcgtttttacacggtctgggccggtagctgacgaagccttcgccgaacgcctgcatccacgggtggtcctggtagaactgctggcgaccggtgatggtgcgccacgggatcagctcgtggacgttggtgtagccggcgttgtagctgacgtgctcgtcctcgaggccggaccaggtcgggctggagatgatcttgcgcggctgcacctggatgtcgcggaagcggatcttctcgtcttccttgggcagcgccaggtgggcgtgctcgcggccggtgatcttcgacagcgcttcccaggccttgaccgcgacctggccgttggtttccggagccagggcgaggaccacctcggcggcgtcgatggcgctgtcgatgcgcggccggccctggctgacgccgctctcgacgacgcgatggttgaggtcgccgaccagcttcacttccttctcggtgttccagccgatgcccttgccgccgttgcccagcttgtccagcagcggaccgagcgaggtgaacttgcggtagacgttcgggtagtcgcgctcgaccaggtgcagcgtcggcaggttgcgtcccggcatcggctcgcactcgcccttcttccagtcatggccgtcgccgccgaacggctgcgccagctcggtgggggtgtcgtgcagcagcggcaccgtgaccaggtcctgctccacgccgaggtggccttcggcgacggcggagaacttcttggcgatggccttgtagatctcccagtcgctcttggcttcccaggccggatcggtggccgccgacagcggatggatgaaggggtgcatgtcggaggtgttgaggtcgtccttctcgtaccaggtagcggtcggcaggacgatgtccgagtacatgcaggtggaggacatgcggaagtccagggtggtgaccaggtcgagcttgccctcggcaccgtcgtcgacccagtcgacctcggtgggacgcggaccgccggccttgccgaggtcatcgttcatcaccccgttcttcgccccgagcaggtacttgagcatgtactcgtggcccttgccggaggagcccagcaggttggagcgccagatgaacatgttgcgcgggaagttctgcggatcgtccggcgattcgctggcgaagcgcaggccgccgctcttcagttcgcgcaccacgtagtcggcgaccggcaggccggcggcctcggcctcggcggcgatgcgcagcgggttgcggttcagttgcggcgccgacggcagccagccgaggcgttcggcctggatgttgtagtccagggcgtgttcggcgaagcggctggcgtcggccagcggcgacagcacctcgtgcatcgacagcttctcgtggcgccattgcgagctgtgcaggtagaagaagctggtgccgttcatctgccgcggcggccggctccagtccaggccgaaggccagcggcgcccagccggtctgcgggcgcagcttctcctggccgacatagtgcgcccagccgccgccgctctggccgatgcagccgcacatcatcagcatgttgatgaccgcgcggtagttcatgtccatgtggtaccagtggttcatcgccgcgccgatgatcaccatcgccttgccgcgggtcttgtcggcgctgtcggcgaactcgcgggcgacctgcgtcgcgcgcgccgccggaacgccggtgatgcgctcctgccaggccggggtatagggcgtgtcggcgtcctcgtaggaggtcgccacgttgtcgccgcccaggccgcggtcgatgctgtagttggccatctgcaggtcgtagacggtggccacccgcaggcgcttgccgtccgccgcgacgatctcgcggaacggcacccggcgcagcagtacctcgtcgttagcgacgcccttgaagtgcgggtgctcctgcccggcgaaatacgggaaggccacctcgcaggcatgttccgggccatcgagcagcgacagttgcaggcgcgtctggtcaccgctcctgccgtccagctcggcgatgttccacttgcctga

SEQ ID NO: 354071 - DNA, 444 bp, Pseudomonas aeruginosa
atgcaacagcagacctggactaacctccttcttcgtctttgcgccggcctggcctgcacgctggttctggcagcgtgctccaccagcaaggaggagatgctgccccacggcgaggccaacatgctcgacgtctgggaacaaggtgcaaccagctcgataggcaacagccgtggccggctgctcctcgatgccaggcaaacgctgcggcgcccaatcgatccgcagcaggctgcctccgcgaatgaccaggccgactacacccgcacggccagcaacgagatccacagccagttcaaacgactgcccaatcccgacctggtcatgtatgtgttcccgcacctggccggcagcgatcccgccccggtcccgggctacaccaccgtgttccccttctaccagcgagtccagtacgccatgccgggcgagcgcacggaggactactga

SEQ ID NO: 354072 - DNA, 1506 bp, Pseudomonas aeruginosa
gtggcgctgaccggtaatcccctcctgaaattgctggtcatccccgtcgtgatcggcgccatcctgatcggcgtgagcatgatgggcaagaaggaaagcgcgcagtcacaaggcgccgcaaccccgacggtaacgtcggaagaagcggcaaccctgggcatcgacggcgacacgcccgccgacacactacgcaccatcgtggcggaaagccggcagctcaaggaccagatcagcaaggtgatccaggagaatgactcgctcaaagccgccaatgagaacctgcagggccgcctgcgcaacatcgatcagaacatagagcagaagctcaacaacaccgcccaggaactgcagcaacagcaggaaaaccgtagccagacgatcctggaccaggtacagaaacggctcgagaacctaacccacattcccgaggccggtgacaccgacctgcccgtcgggttcggcgtgcgaccagaggatggccagcactttcagggagcgggctcgtcttcatcggatatcgtctggatcgagccccaggacgcccgcgcagtcgatgccaatggccagccgctggccgccggctccaccacccaaccgagcggattcagcttcccgacctccttcggcaatgcggtcgatcgcggccagaacgcgctggagcggatcgatgacgggctgcaccccgtcggccaacagcgatccgacctggaaaaccgcaagctcgtccgcaagacctacacgctgccgcagaactcgacgctcatgggctcggtggccatgtctgcgctgatcggtcgtgtgccggtcgacgggacggtcaatgatccttacccgttcaaaatcctcatcggcccggacaacctcaccgccaacggcatcgagctgccggacgtcgccggcgcggtagccagcgggaccgcctcgggcgactggacactctcctgcgtgcgtgggcagatccgcagcctcacgttcgtgttcaacgacgggaccgtgcgcaccttcccggcgccggccgaggaggtgaatgacaaccagagcaacaacaaccagaccgccagcgccgaccagaaaaccatccagggcggtctcggctggatcagcgacccctacggcatcccctgcatcgccggtgatcgccgatccaatgccaaggagtacctgggcaatcagagcctactcacggctgccggggccggcatcgccaaactcctggacgccgacgagaacaacaccagtaccgtcttcagcggcaacggcaccagcttcgggacgaccggaaccaacagcaactcggccctcaacagcatcctctccggcggcgtcagcgacatccggcagtggatgaacaagttgtacggggaggccttcgccgccgtctacgtgcaaccgggcgcgcgggtcgccgtgcatctcgatcagcaactggcgatcgactacgaactcaagggccgcaaggtcgattacagctctggagccgctcatgcaacagcagacctggactaa

SEQ ID NO: 354073 - DNA, 603 bp, Pseudomonas aeruginosa
atgctcatcgatatcgccgccaccgaggctgcggccgaccaacagccgcgcgagccggtcaggatcgtcgccggcgagcccgtggctccgcactatggccagccccgggaagcccagccatcggcagcagcgaaacagaccgagcaggcagaagcaccgaaggccgtgccgcgcgaaacgcccgtccccgtggttctgacgcgctatgcggcgcagatgctctatgccccgcttcgcacggtggaaccggtagatggcgtcggtcaggtgcgcgtcaagcgacagctcgacctgaccaccctgctccccagcctacccatcacggctaccgccatgggcgcctggcggctggacgactactacgtcacggcggtgaagctgcagaatgccagcgcccagcacctggccctggatcccagggacctgatgggcaatttcgtcgccgcaaccttccagcacccgtacttgggaccccggggcgacgcttccgacaccaccaccgtgtatctggtgacgcgcggccgcggccttgccgacgcgctcctgccctcctccatcagccagatcgatcccaaaggaggccgtcgtggcgctgaccggtaa

SEQ ID NO: 354074 - DNA, 759 bp, Pseudomonas aeruginosa
gtgaagacgtcggtcaaggtccgccactacgtgcctgacgcagtcgtctccagctacgcgaataccgggagcaacccctggaccgaggtgtcggcgctgggtacaccgaatccactcgcccaggccggcaatgacgcaaccaccaactacaaggccgagaacagcatcggccgcttcaaggaagcggatgtgatcggccatcctggcggggccacgttcagccggttcgctagcgcctctgggtacgtttgccctggcgccaccttcccgctggtgccctatttcctcagcacactggacgccattggctggcggcatggaattcccgagcaggtgtaccccgaagcgttggttccagggctgcgcgaggtgggtggaatcttctccggagacatgtgggggaacctctatccgcgcagcggattcctgcaccagaccgacgactacaagacggcggccgtcatcgcccagcgcgccggcgacatcaccacacgaatcggccagctccacgtctacctccccatgcgcgcagctccaaaggacggttactggccggcgggcgagctgagagagggcgatgcctcgaccgggaaatggcaggagctgaccccgtccctgagcctcaactgcgcggtgtttcccaactcagggccgaagacgcaagccgtcgacggcgattacgcctgggcgctctggcgtccctactcctgctgccagcgcaaggggcagatcttcctcggcagtaccgacttccaataa

SEQ ID NO: 354075 - DNA, 309 bp, Pseudomonas aeruginosa; identical to SEQ ID NO: 328351

SEQ ID NO: 354076 - DNA, 318 bp, Pseudomonas aeruginosa
gtggtcatcggcggcctgactgcggacgaaatgtggatcacggtcttcaccagcggagcagccgggttcgtacttggcatcccggctgccttggtcgcaggtaacgctgcctgcattccactgggcgcgctgctggtcggcgccctcggcctgggtatcggcagccgcgtcctgcggcggatgaagcgggggcggcccgatacctggttctaccgccaggtggagttggccctctcgctgcgcgttcccgtcttcggcaaccgtcgcctggtgacgcgctccggcgcctggaccagtcgacgcacggagtccccatga

SEQ ID NO: 354077 - DNA, 318 bp, Pseudomonas aeruginosa
gtggtcatcggcggcctgactgcggacgaaatgtggatcacggtcttcaccagcggagcagccgggttcgttcttggcatcccggctgccttggtcgcaggtaacgctgcctgcattccactgggcgcgctgctggtcggcgccctcggcctgggtatcggcagccgcgtcctgcggcggatgaagcgggggcggcctgacacctggttctaccgccaggtggagctggccctctcgctgcgccttcccgtcttcggcaatcgtcacctggtgacgcgctccggcgcctggaccagtcgacgcacggagtccccatga

SEQ ID NO: 354078 - DNA, 270 bp, Pseudomonas aeruginosa; identical to SEQ ID NO: 324403

SEQ ID NO: 354079 - DNA, 546 bp, Pseudomonas aeruginosa
atgaacgaagcggattatctgcgcctgctcacccgtcaggccgaacaagccaacgacttcctctccaacgcacgtaaatgggaccgcgagcgctgggtctgccagcgcttcctcgaagccctcaacgtgccctatcgccaggaggacttcgccgcccccggggaacagccgccggacgtcatgttcaagggtgccggcttcgaggtgttcttcgtcctcgatgaaggtcgccggctgaacgaggagtggcgcgaggaactgacccgtcgccgccaggccgtcagcctgcgccaactgatccgccgcgaagagcggccacaacggatcgccgccgccgagctgcaggcacggctggcgccaaccctgcgcaagaaggcgcacaactatagcgagcgcggcatcgaccacggcgaactggacctgctggccttcgtcaacctgaagcgcgcggtgcccgatttcaatacgcccttcccgccgcccaccgaatacctgcgcgccaacctcggccgcagcatcctgttcgacgccggggtaggcctgtga

SEQ ID NO: 354080 - DNA, 174 bp, Pseudomonas aeruginosa
atgcgtaagaatagctgtctgcagtggcactgcaaattcaaagtgcgtatatcgaaatccctcccctttctgctggcgatccctctgatgatttttggcgagccaggtacactccagggcgacccaaaggtaattccggatcaatgttcaagcagtttcgtaaaaacgacctga

SEQ ID NO: 354081 - DNA, 288 bp, Pseudomonas aeruginosa
atggccaagaccaacgcccagcgccagcgggagaagcgcaagcgccagcgagaggccggcatagccgagcgcaagctgccctcgccgcccgcaatcgacgccgctttcgaacggatccaagcggtaggagagttcgaggattggagagaggccttctcgacacttcttctaaacgcagccttgctcccagactctgatctacggccgctcctgactgtgtcgcgacacgaatactcgcctagtgaaaaggttatgagaatgcttgtagaagaaaggcccagcatttaa

SEQ ID NO: 354082 - DNA, 990 bp, Pseudomonas aeruginosa
atgccagcgggacaaggcccgcgccggtggacgcagcgattgctgcgcagcccccaggtgcgtgtcctgcgatggccacaagccttgcagcctgccaacctcatcggcgaactgctcgggctccatcgtcacgcggaagaaatgctctggctcggccgggctggcggggacgatgtacggcaggaacggccactcgctcggcagttcctcggcttcgacttcgccttgccctacctgcaacagcagattgcgcacggccttgacgccatcgggcacctgctcgcgctggcgcacccggcgtccgaagatcaccacctgcttgaactgcgtctccaccgctcggtagatgcgcaggtccgtgtagtggcgcgtcagccagccgaccaactccgcgtcgagcacgtagccggggacgatgaaaaccagcacgccgccgtattgcagcagcgagagcgtgcgctggtagaacagcttttcaaggcgggcacggccctggccctgatagccgatgttgccgttgacgtccttggacaggtccccatacggcgggttgagccagagcagcccgaaggactgcttggagaccatcgtgtccatcaggtccgcgtgcaggcagtgatcgaccaggccgcgggcatggcgcgcccgctccgcgtcgaactcgacggcgaacgcctttgcctgctcgcgcccgagggcatgggcggcttcggcgatcgccacgccttcgccggcgcagggatcgaggatgcacatcggcccgtcgctgggcatcagtgcgttgagcgctctttcgagcgtgggttcgtcggtcgggaaatatccgttcttgacgaaattgcgggcgagccgcgggaacatgagggccatggaagtctcctggttggcggggatgaaacacggaagtacgccaaggcgtgcctccgagggtgggtcaagccgctaccgcttccggcgtccaaatcttggccggatacggataggcgttga

SEQ ID NO: 354083 - DNA, 648 bp, Pseudomonas aeruginosa
atgcccgcaaacacttcttccacgctgtaccgcatcgacgaatgcccggacgtgatggccgacgcctgcgtcggcgatgaccagggcaacctgatcttcctgtccatctgggcgcgggacaccgccgtccagcagttcctcgctcgcctgaccctcgggcgcgacgagcagggactggaccagttccacgtcatcaccgaccagggcggcagcgtcccggtattcatcggcaacgtcgatcgcctggaaaagcgcatcacgcgcgcgtaccggcggacgctgttcggctcgctgtccaacgtgtggctgttcgaccggcgctgcgtcaagcccgacaaggccaacgccagcgcattggcactgctgccacgcgacagcgcccaccggcttgaccgcctgtggatgctggtgcgggacacctgcccgttgccgctgctcgaccactggcgcgagaccgtgctggaactgctgcaaagccgcgagatgctggcccgccttccgttcgccctcgggccgctggaaggccatcggctcgccatcgacgtgccggcgctgaccctggcgctgggctccctgatccgcagcgacgtgctcaacgcctatccgtatccggccaagatttggacgccggaagcggtagcggcttga

SEQ ID NO: 354084 - DNA, 300 bp, Pseudomonas aeruginosa
atgaactatgacattcacgatctcgttctccaccacctgtgcatctactacttcatcatcaggcgcatcaatattcgcttgctgttctccagccataaccactccccatactttttcaaaaaatcaacaccactcaagactacgacttatctaaatcttcataagcgtatatcaaagaaccctcacaaacttctagtcactacatacctgccctatgttcttctaaccgagtcgatccctatacgcctcagtcaacttactctttctggcattattctctgcctcagaatgctctcttag

SEQ ID NO: 354085 - DNA, 714 bp, Pseudomonas aeruginosa
gtgtctacgaaactaggggcgattcacctgtggtacgttgacaacacagaagacagaacaaagaaatccagagtgttcaatgacgcaatattggcatcaactctcggactctgccgctggatggctgggggtaaacttcccgaaatccaagaaatagaattcatttaccccactccacaagacatctcagagcaccaacggctttttgattgccccctacactttgggaaaaatagaaacagcatcttatttgacaaccacgcgctatcgctgccgctaagcactgcaaatgaaacacttgcactactccatggcagccttgctgaacatcaagaatattttttaaataacggacattacagcgaacgcacacgaagcttgctcatcaagcgccttggccactccctctgcgacatggactctgtagcaaaagaacttaacgtcagtagtcgtttcttacagcgcgagcttgcaaaagagggtaaaacctttaaagaaatattcaatagcacccgaaaaagactagccgaacactacttaaaaaactaccactcttactccctagaccacataagcacactacttggctttaaagagctaagtagttttcacaaggcttgccttcgatggttcggcatgccaccagggagttttcgaaacactcacacagaaactcacccatcaggagtagaccagaaaataactcatacctaa

SEQ ID NO: 354086 - DNA, 231 bp, Pseudomonas aeruginosa; identical to SEQ ID NO: 348257

SEQ ID NO: 354087 - DNA, 1020 bp, Pseudomonas aeruginosa
  misc_feature (567)..(574): n is a, c, g, or t
gtgttgcgggccgcaccacccagcttgccggcggcgccgaggtcgatccttggcagagtggtgcgggccgcaccacccagctcaccgtcggcgccgaggccaggacctggcagagtgttgcgggccgcaacacccagcttgccggcggcgccgaggccaggacctggtggagtgttgcgggccgcaacacccagcttgccggcggcgccgaggccaggacctggtggagtgttgcgggccgcaacacccagcttgccggcggcgccgaggccaggacctggtggagtgttgcgggccgcaacacccagcttgccggcggcgccgaggccaggacctggtggagtgttgcgggccgcaacacccagcttgccggcggcgccgaggccaggacctggtggagtgattcgggccgcaccacccagctcaccgtcggcgccgaggccaggacctggcagagtgttgcgggccgcaacacccagcttgccggcggcgccgaggccaggacctggtggagtgattcgggccgcaccacccagctcaccgtcggcgccgaggccaggacctggnnnnnnnncgggccgcaccacccagctcaccgtcggcgccgaggccaggacctggcagagtgttgcgggccgcaacacccagcttgccggcggcgccgaggccaggacctggtggagtgttgcgggccgcaacacccagcttgccggcggcgccgaggccaggacctggtggagtgttgcgggccgcaacacccagcttgccgtcggcgccgaggccaggacctggtggagtgattcgggccgcaccacccagctcaccgtcggcgccgaggccaggacctggtggagtgttgcgggccgcaacaccaaaaaacacgacgcccgaccgagactttctcatggctcatcaccccgctcggatggcacgctcgatccgtgcctgggacgaatgaggtccttgagccggctgaggacctcgctccctgtccgggtatcccccctgggctggacctga

SEQ ID NO: 354088 - DNA, 192 bp, Pseudomonas aeruginosa
atgcgcaccttccaaagctggccgccctgcagcagcgcgaagcactggcccttgggcagaccgacgacgtgtgacggctcgatcatcggcacgctggacatgctgatgcggtcctgggtgttcgacgtgaagtccgtcgcgccgcggatgtctgagctgtccgtcgcgcccgagacgatggtggtcgtatag

SEQ ID NO: 354089 - DNA, 1260 bp, Pseudomonas aeruginosa
atgcacgttgatcggcacgcgcgcaccagccgatgcgcccggcaggccatcgtcgattccgtgcttgtagatgtgcccagccaccgagacgagatcgctgaacatcgagttgccgaccgctgcggcgacctccgcatcggacagcgcgtccaagccgacatagacgacggcgcgcttcctgatcacctgcatccagtcgaagatcgggcgcgggtcggccaggtcggagtagttcggcgccaggagctgggcgatcttgccgctcgtgagcttttccagcagcggcagcagcgatgcaacgatcttgtcgaagtaggtcttgtcgtagcgcaccgccgagcgcaggccatcgagcacagggtcgtagttgcgcgcctgggagaggtattgctccagcgccaccacacgcttctcgcgcccgatcatgttccttgggatgttcttctcgttgagcttggcctcgatctggacgatcacctcccaggccttgggctccgtcttggcaaagtagtgctgggcgtactcaatgaacagcgcgtcgatgttgatgacgtggcgctggatcagcatgtagtccgggcgctgccccagttccaccagggcgcgggcgatgatgttcacgaagcgccatgcgaactcgcggaacgccgcgctgttgccttcgccggagagctgccccgcgatgcgtgtcgccacttccgagatccgaccgaagcggcccacggcgttgtagcgggcgctgatttccggccagcccaagtggaagatgtagaactcgccttcgcggccagcgcgctgggcttcgacgtacatccgtttcaagagatcggcatcccccttggggtcgatgacgatgacgacctcatgctcgccggcagcattcctgcggcggatgtcctgcgtgacgaacaattcggccaggcgcgtcttgcccacccgcgtggtgcccagcaccagcgagtgcccgacgcgctcgcccagcggcaggctgacgtccacttcgtcgggctcgatgccgtgcagccttggcaggccgccgacaggcggcaacgggcgcacggggttgaaaggcacgtcccagccggtgagcttcggcaggcgagagagcggcaatggcgcgaactccagccgttcctccaggcgcctggtcagccggtaggccggcgtcggctcgacgtagcggcggaactcgggccggtacgtctgcatcagccgatgcgtgtgcttctgctcccagagaaagccgcgccccacgaatag

SEQ ID NO: 354090 - DNA, 741 bp, Pseudomonas aeruginosa
gtggcgctacgcagccaagtcaaccagttgttcagccagagtcggggctcggccggcagccgcagcattctgggcatgctgcgcgaagagggcgtgaccatcggccgtttccgagtgcgtcggttgatgcgtgagctgggcctggtcagcaagcaaccgggctcgcacgcctacaaacaggccacggttgagcggccggatatcccgaatcggctgaaccgcgaattcgcgaccgagcatcccaatcaggtgtggtgtggcgacatcacctacgtctgggcgcaaggccgttggcactacctggccgcggtgctggatctgcatacccggcgggtgatcggctgggcgttctcggccaagccggatgccgaactggtgatcaaggccctggacatggcctacgaacagcgcggcaggccacagcaggtgctgttccattcagaccagggcagccagtacgccagccgcctgtttcggcaacggctctggcgctatcggatgcagcagagcatgagccgtcgggggaattgctgggataactcgccgatggagcgcctgttccgcagtctgaagtcggagtgggtcccgtcaacgggttacctgacggcgcaggaggcccaacgggacatcagtcattacttgatgcaccgctacaactggatcaggccgcatcaattcaacgacgggttaccacctgcggtggccgaagaaaaactcaacccactgtccgggatgggttga

SEQ ID NO: 354091 - DNA, 798 bp, Pseudomonas aeruginosa; identical to SEQ ID NO: 333605

SEQ ID NO: 354092 - DNA, 1236 bp, Pseudomonas aeruginosa
gtggtccctcatgaacgccatggcggccgacgtcatgctgccgctcgtggtcgggcggtagccgtcttcgatcattcgcccaggcaaggcgcggaacagcagataaaagagatcgtcgccgtagccgcccatcaacgtgccagtcagcagcaaggtcttgcgagccttcgccgccagcacgcccatggcctggccctgtgcggaaccgccgttcttgtactcatgcgcttcatcagcgatgagcagatcgaacgtgccttgcggcaggtagcgtttgatgaattcggacggctggtagccgccctcgccaaagccgaactccatgttggccatcgcgcgttccatgcgcgtggcttgacggtcggaaaacaccagctcgccgttgccatccatgaggttgatgaactcgtggatgttgtcgccgagcatcgaggccaggaaaccgtcgccgaacttctgcatcagcttctgcgcggtgacttccccgatcgtcgggatgcgcttcaaggctttgagcacggccgaggactggtcgctgccggacaggctgcgcgggcggatcagcgtccacaggggcgcggcgcaatggctgcacttcctgcgggactcctcggcttccagcgcgaccgggttgaccggctcgccgtcgaggtcggtgatgaccgtgccgcagtccgggcacgctgccacgtcgccgtggcgggtgcgccgctgggtgaagacgggcttccagtggaagcccatccgcatcctcacgcggcccaggacgaagaactcctgactcgtgggctggacacccaactgttcacgcagcttgatgagcttgacgagcgtatccggcccgttgagcacccaagctttggcgcccgctaccgtctcctggatctcgcgccgccacttgtaaacaaggtgcggtggcgaaagcaccagggtgcggcggtagccttcggcgttgagcacggcggccgtggcgatgccgacggtcgtcttgccgcaacccatttcgccattgacgatcgcggcgcgttcgccacggtcgatcagcagctcggcggcggcgtggacgacttcggcctgggccgggaacagcttgcgcttgaggctggcgacgacgagttgccgctgcgcctgcggttggccggtatagaccggcgggttggcgctgttgagggcgtcgagcagttcgtcgccgaactcgccgacgaaatcctgaaggctcagggtcagaggggatga

SEQ ID NO: 354093 - DNA, 846 bp, Pseudomonas aeruginosa
gtggagtacccggttcgacgtctctgccagaccctcaaggtgcatcccagcggttactacgcctggctggccgagccgaaatccgtacgcgctaaggaagatcagcgcctgctcggattgatcaaacatgcctggctggaaagcggtggggtctacggctatcgcaagatccacgacgacctgcgtgagctgggagagtcctgtggccggcatcgcgtagcccgcctgatgcggggggaagggttgcgctcgcagaccggctatcgtcgtcggcccggctactacggcggcaagcccacggtggcttcgcccaaccgtctggagcggcaattcaccgtcagcgagccgaacaaggtctgggtcactgacatcacttacatccgcacttatgaaggctggttgtacttggcggtggtgctggatcttttttcgcgccaggtgatcggctggtcgatgaaacctcggatgtgcagcgacttagctatcgatgccttattgatggcggtttggcgacgcaagcccaagcaggaagtgatgatccactccgaccagggcagccagttcagcagctcggactggcagagtttcctcaaggccaacaacctgatcagcagcatgagccgacgcggtaactgtcacgataacgccgtggcagaaagctttttccagttgctgaagcgcgaacgcatccgacgaaaaacctatgccactcgcgaagaagctcgcagtgatgtgttcgattacatcgagatgttttataaccccaaacgtcggcacagcagcgctatgcagctgtcgccagtggagtttgagaaacgctatttccagagcttggaaagtgtctag

SEQ ID NO: 354094 - DNA, 354 bp, Pseudomonas aeruginosa
atgcagcgcgtgaacctgcccgacgacaagccgggcgccggcccatccagcagtcccttgcgcggcagcggccgcatggcggtgttcgtcaaggacggctgcgcggcctgcggacagctcgtgcagcgcctgcaatcctcgggcgcggagttcgacctgtacatggtgggcagccgccaggatgacgcgcgcatccgcgactgggccaagcgcgcgcagatcgacccggcgcgcgtgcgcgccggcagcatcacgctcaaccacgacggcggccgctggctgtcactgggcctgcccggcgatctgcccgccgccgtgcgcgaagtgaacggccaatggcagcgccagccgtag

SEQ ID NO: 354095 - DNA, 144 bp, Pseudomonas aeruginosa
atgtccttgagcttgagaaagatcgtgaacggcaggatgcagcgcagcacgcccttggggccaaaccccggggccttgaccgtgcgcaccgataccttggtgcccttggccgtcttgtgcgccgtgccggtgctctcggagtag

SEQ ID NO: 354096 - DNA, 168 bp, Pseudomonas aeruginosa
atgcgccagagctacagcgaggccacgcagtggtgggagttcaccagctcgccggccttgcaggatgcggccttgcccgacgacctgctggacgatgccgctgcggccgagcccggcgcggtggccactggcgccgacgatggctcgggcaacgaggccgtgccatga

SEQ ID NO: 354097 - DNA, 963 bp, Pseudomonas aeruginosa; identical to SEQ ID NO: 347450

SEQ ID NO: 354098 - DNA, 528 bp, Pseudomonas aeruginosa
atgcgtcattggcaacgaacgatcgaacagggcaaccgctgtttcgtcaccggcgcattgatcgatgcgcgtgagcactacctccatgccctggccctggcccaggtgctgctggaacgctggggcgacgccgacgaggcggtgatggcgttcgtcatttcccatcacaacctggccgacttgcacctgcaactggagcaaccggaggaaaccgccgaatacctctgcgcctgccacgagcgcctgttgcgggtcagcgccgaccagaagctgccgttggccctgcgccaggcggcccagcatcacagccggcgcacctatgtcgaactgctgtcgttcatcggcgaacacggtgcctatccgcgcaccgagcgcctgctcaagggaccgccgaacgcggaggtccgacccgagttcctcgctccgccccctcacttcgctatcactgacggagagtttccatgccccacgccttgccgcccttgccctacgcctacgatgccctggaaccgcacatcgatgcgctga

SEQ ID NO: 354099 - DNA, 645 bp, Pseudomonas aeruginosa
atgccttggtattccacaggcacggtttccgtcgtcctcaattcggacacggtgaccggcagcggcaccgccttcagcgccaatgcgcgcgccggcgatgccttcagagggccggatggccgctggtacgagatcggcaacgtcagcagcgccaccgtgctgaccatcaagcccgcatatcaaggagctaccgccaacggccaggcatattcgatcaccccggtgcagggatattcgaaagcgctggcggatcagcttcgcgatctcaacaatctgtggggaagcaccctggcagcggtcaaaccgtgggctactgcggcgaccggccccgccgccctggatgacatgggcttcggcgtaacgggcaaggccctggccgtcagcgccacgccagttgcagccagatccgctttgggggtgcctgccgtgggtgactatggaatcggcctgacggcgggaagctccaataccttgagcgatgccaatgtggtcattcccaacggtatttaccgtgtagcatcgactaccgcagggaccatgctcggctcctatatcggacagatgctccatgccgagcaacagggtggatatggcgtgcagttggtcatggcggcgcagaccccccgcagatgcgtatgcgtgtaa

SEQ ID NO: 354100 - DNA, 126 bp, Pseudomonas aeruginosa
gtgatcccggtcggtggcggcgaggtccagcaactgatgctgatcgtccgcaccgaggacgggttcagccgccaggtactcgactcggtacgtttcgtcccgctgctcaacggcccgatcgcctga

SEQ ID NO: 354101 - DNA, 1410 bp, Pseudomonas aeruginosa
atgactgagccgcttgcgacaaagaccgcgatcttcgacgttgcagtgatcggcgctggcgtggtgggttgcgccatggcccgccgcttcgccctggaaggtgcacgggtggtcctgctggaaaaaagcaccgacatcctctccggtgccagcaagggcaacagcgcgatcctccataccggtttcgacgcgccgcccggcagcatcgaactggcctgcatgcaggagggctatcgcgaataccgcgacatccatgcgcgcctcaacctgccgctgctggaaaccggcgccctggtggcggcatggagcgacgaggatctggcgcgcctgccggctatcgtcgagcaggcccacggcaacggtgtcgatgacgtccgccaggtcggtcgcgacgaggtcctggcgctggagccgcagttggccggcaacgtgctcggcgcggtgcgggtccccggggaacatctggtcgacccttggtccgcgccgctcgcctatctgcaacaggcgctggcccatggcgccgaggcctgtttcgacgtcgaagtgctggacggcgccttcgacggcggcgaatggctgttgcatacccgccgcggcgatctgcgcgcgcgccaggtaatcaactgcgccggactcttcggtgaccaactggaacagcgcctgctcggcgcggcgagcttcgccatccatccgcgcaagggccagttcgtggtcttcgacaaggccgccgcggcgctgctgcggcacatcctgctaccggtacccaacgagcggaccaagggggtggtattcacccgtactgttttcggcaacctgctcgccggccccaccgccgaggaacaggacgaccgcgaacaggcacgggtcgacagcgacaccctgcagcgactgatcgacgccgccgtcgagcggatccccggcctgcgcggcatgccggtcaccgccacctacgcaggattgcgaccggccagcgaaaagaaggaataccgcatccgccaggtcgacggacgcaactggatcagtgtcggcggcatccgttccaccggtctcaccgcggcgctgggcatcgcacgccacgtctatcgtctctaccagggcgagcgcttccacgaagcggttcgcgagccgctctggccacaggtaccgaacctcgccgaacacctgccgcgcgactggcagcgtcccggctacgacgagatcgtctgccactgcgagatggtcacccgccgggaaatcctcgccgccctggaaggcccgctgccagccggcgacttcggcggcctgaagcgtcgcactcgcgcctgcatgggacgctgccagggtttctactgcaacgcgcgggtcgccgagctgagcgccggccgcctcgcccagcccctcgccaccgggagttgccatgagcatcactga

SEQ ID NO: 354102 - DNA, 252 bp, Pseudomonas aeruginosa
atgtcctcacgcgcccttcccgccgttcccttcctgctgctgtccagttgcctgctcgccaacgccgtacacgccgccggccagggcgacggctccgtcatcgagctgggcgagcagaccgtggtcgccaccgcccaggaggaaaccaagcaggcgccgggggtttccatcatcaccgccgaggacatcgccaagcgaccgccgagcaacgacctgtcgcagatcatccggaccatgccggggtcaacctga

SEQ ID NO: 354103 - DNA, 1236 bp, Pseudomonas aeruginosa; identical to SEQ ID NO: 322803

SEQ ID NO: 354104 - DNA, 771 bp, Pseudomonas aeruginosa
ttgaacgacaacagcatccgcaccagcgcccaggagattctggacctcgtagcccacggcgccctcttcgtcgccaatcattccggcggcaaagactcccaagcccagttgatccgcctgctggagatcgtcccgagggcacagctcatcgtggtccatgcgtcactaggcgcggtggagtggcccggcgccctggagcttgctcaggaacaggctgaagccgctggcctgccgttcatcgtggccaccgccgggaagactctgctggaaatggtcgagcggcgtttctccagccgcccggaggtcccgagctggccgtccgccagcacccggcaatgcacgagcgacctgaagcgcggacccatccagcgcgaggtccgccgctacgccaaggagaacggattcaaggtcatcgtcaactgcctcggactgcgcgccgaagagtcgcccggccgtgcgaagcgcaagtcgttcagccgcatgggcatcagcaactccgtgctgacttggtacgagtggctgccagtccatgacctgaagaccgatgaagtcttcgacatgatcgccgccgggctgaagcctcactacgcctacgccttcggcaacgaccggctgagctgcgtcttctgcctgtttggcagcaagcgtgacctgaagaacggtgcaaagcaccggccagagctgcttggccaatacgacgccctggagaagcataccggctacaccatgcacatgagccgcatcccgctcgtcgagctggttgcggactaa

SEQ ID NO: 354105 - DNA, 807 bp, Pseudomonas aeruginosa
atggcgaatcaagtgaacgtaatcgtccttgttcggcaccacgggcaggaacatcccgcgcatggcctcgctccattgcgcagaatgcaccagcaacgcacgcacggtttccggccggaggtgcggataggccgccatgatctgagccaccattcccgcacacaatgccgacgcggcactggtggcgttgctggtggtgaacaggcgatccagcggctggttgtgggtcgtcagcaagttcaggctggccataccgaccgcacccagttcatccttggccgtattgcctccttccagcacaacctcgggcttcaacggccatgcccgatcccacgttctggttgtcgtcgtgaaggggctgaggccgccggcttcggcgacggggctcaaggaaggatgaccttccgtgtcgatcttgtcagtacaagcacccaccgtgattgcgttccatgcctggccggggtcatgcacgagattggtggaaaggctatcgggatatccagcccacgcattggggtcgcgcgtgttgccggcggacagcacgaacaggcgcggactttcaccagccccatcggtatccgcagcaaggccatcgacagcagcagaccacgaggaaggacggccacggtcacggtagtccgaagccgtcaccgccgaagcaaacacgcgcgaccgattcggcgcagagatttcaggccgcgcgacgccttccgtgaaaagataagcgtggtggcgcgcatcaccttcattcgcaccttccgccggtatcagcttcaccgactccagtcgatgagggacattgattga

SEQ ID NO: 354106 - DNA, 870 bp, Pseudomonas aeruginosa
atgatcagcctcatcatccacgccccaggccggctccacggtatgcaaatcgctcgcatccatcaaaggcgccaagagcggatgcgcacgagtcactccggaatccaacaggcagacgcggggagccgtatcgtccgacggctgcaaccgggcacgacgcagcaagtcgtccgcccacgcctgctgctcgcgtacgcccatgccatcgaagaactcagcagtctccttggcatagcgaagttcagccacacagttcagcgtcatcaccgaccgcgagaactgctgctgcgatccatacatcaacagcaccgtgcgttcggggaaattgacctgcttgtcactgacgacacattccgccaatcgagcaagtttcttgaagtcctctacaacgatttgccgctgtcccgcccctcgaaccggaagccagacctcccaccagaaggcggtcgcgagatcgtcaggcagcaattcgggggcgtcagtccacagagccctgatttctgctgcccggatggattcgatggcatcgatcagcttgcggtgatctcgcgccttgccgttacgatcctttttctcttcgaggtagtcggaaatgtatttctcgaaatgcgccagctttccatcagggacaaagacattggcgaaggtccggttgccctcgtgacgaacactgagaagctcaatcctcttgcgagcatccgccaagctctcgaacgccagctcaacatccggttgactggaaaactggatttgcaagccaaggccactttccagttgcagttccccttgaactcgcaccgcctctgccacagcaggcttcaagatctcgatttgggctctgttgcaaagattggcggcagtcagaggtag

SEQ ID NO: 354107 - DNA, 606 bp, Pseudomonas aeruginosa
gtggattgcgcgcaggacgggctgtccggcctgcacctggcggccaccgagcactacgacctgatcgtgctcgacgtgatgctgccgggaatcgacggctatgccctgtgccggcgcctgcgcgaagacgcacggcgcgacaccccggtgatcatgctcaccgcccgcgaccagttggacgatcgcctgcaggggtttcgttccggagccgacgattacctggtcaagcccttcgccctttccgaactttccgcacgcatcgaggcggtgctgcgtcgcgcccagggtggcggccgccgcgagctgagcgtggccgatctcagctatgacctggacaccctggaggtcaagcgcgcgggcaagtcgctcaagctcaatccgatcggcctaaagctgctcgccgtgctgatgcagaagagcccccatgtggtgcgccgggatgccctggaagaagcggtctggggcgacgactgcccggacagtgacagcctgcgcagccacgtccatcaactccgtcaggtgatcgacaagccattctccgtggccttgctgcatacggtgcatggcgtcggctaccgcctggcggaggagccgaatggagtataa

SEQ ID NO: 354108 - DNA, 894 bp, Pseudomonas aeruginosa; identical to SEQ ID NO: 343188

SEQ ID NO: 354109 - DNA, 651 bp, Pseudomonas aeruginosa
gtgcaggtcggaagagccgccgcggatggcgtcgagcagcatcttgttgacgaagcgcaccacgggggcgtcttcggcatcgtcgccgccgtcgtcctggctggcgctttccgccttgccgacatcgaccccgtcgagatcgatgtcaccgaggtcgccgagagcgtccatagcgccctcgtagagcttctcgatggctacgccgagcttgtcgtcctctaccagcagggcttcggtggtgaggccggtgctgaactggatatcggtgaccgcctgatggttggtcgggtcggagagaccgatgaacagtttgttgccgcgtttccacagcggcaacacgcggtgctggcggaccaggcgctcgctgatgacatccttcggaatgctttcccgatccaggctgttcaggtcgcaataggcgatgccgaactgctcggcggccacctcgaccaacgcccggctctgcaccagcttggcctggaccaggtggctgaccagcgactgcttgttgcgcgcggcctgcacctgggcctggcgggcggtcttttcgtcgaggagttcgttcaggaccagttgcttggcaaggccgctgagaggcgtggaatcgttcattggggaacatctgaagaaggcttggagcgagacttataa

SEQ ID NO: 354110 - DNA, 651 bp, Pseudomonas aeruginosa
atggtgctgctgcgcggcgtgtttggcggtcaagcggatggtgtactgacgagaatgcagcggctgcttaacaagcacatcaacaagaaggcattccctctggacgagatcattgaagccttcactgcgaccaacaaggatctgcgctttgacgaggcgtacctaagagggttgctcgatatccagtatggggacccgcggtgccgttcggtattgagcctgttgttccccgaaatcaatgaaaacctgcagttggacatcgatcacttgcatccacaaagtgccttcaccaaggcagagctctccaagcaaggctttcttaaaaatgactccgagctgatggcgttctaccagaacccagtcaattggaattcaattgccaatctgcacctgctgaacgcttcgcagaaccgctcgaaaaaggatatgccgctgatcgagtggctggccgaaaaagggtgcggcatcaaacgagccgatttgctgctagacgagactgacagcctgcagtttcaggacttccaggcgttctgcaatgcacggcgtgaggcccttctacagcgcctgcgtagcaatgtggtggtcagtggaccacagccagcgtctgaagaaatattggatgaagaggaagaaaccgaggctgtggtatga

SEQ ID NO: 354111 - DNA, 2955 bp, Pseudomonas aeruginosa; identical to SEQ ID NO: 323913

SEQ ID NO: 354112 - DNA, 1863 bp, Pseudomonas aeruginosa
atggtgcaggaggtgcacgatagctggaagtacagtaactcgggcatggggccggcgacgcagatagctgtcgccatcgcggcggcagccatcggtggcatggcggcagcgggagcgctcagtggagcaggagtgggtgccagtagcttcgccatgggcgcaggagttggtgcggcaggaagcctgtcgggcacggcagcggtcagcctgatcaacaacaagggcgatctcgggaaggtgctgaaagacagcttcagtagcgacagtctgaagcagattgctattgcgagcctgaccggggggctgacggctgagtacttcgacgggattcttcagaccaagactgatccgcttactggaaaggtcacggtagacctcagcagcctatctggtgttggtcgcttcgctgccaatcaggcgatgcagaacgctacatccactgtactgagccaggccttgggccagggcgggagcctgaacgaggcgctgaagagcgcgctctacaacagtttcgcggcggcaggtttcaacttcgtcggcgatatcggccaggaatacagcctgaagccaggcgatccttcgatggtgaccatgcacgccctgatgggtggcctggcggcgcaggtcagcggtggcgatttcgccacgggcgccgcggcggctggcgccaatgaagcgctggtggccaagctagaccaggccttcaagagcttgagccctgagaaccgtgaagccatggtcactatggggtcgcaattggttggtgttctggctgcggcggtacgcgatcccgatgcgacaggcaaagctctggaaagcgctgcttgggtagcgaagaactcgacgcaatacaacttcctcaaccatcaggatgtggccgatctggataatgccttgcagaaatgcaagtcccagggaaattgccgtcaggtagaggaagagttcaaggcgcgtagcgacgagaaccggcggaggttgaatggctgcgtggctgtgggtaattgcgcggagattcgtgcggagatcgatgcggggtctacggctctcaacgagctggtggcccggcaggaaacagctaatccgggaggaagtgacagcgatatagcctacggtttcctgatgggccgaaatgttgtcgactggacgacggctggtcagttgcacctggagcagaccgccaacctctggtggaacggtaatccacagtggcagaaggaagtcggtgcatacctggaccagacggggttcaatccgttcggaatcggcgttccggcaatgggcggtgccgctggcaaggtaacggccaaggcgctcatgaatgcgctgaaggcgggagagttgcccaaaggagaggtggccccaggaaaggctaatctgcctaccattggggcgttggcggatgctgaggcgggaatgccttatacccatccagttaagctcgccgcaaaagcgactgggacagcagggaagattaagattgaagccggcgcaatacctgacgcaaatgaagtacgtgcaggacaagggttatctggtcttgggtacgatgttacgcaccaaaccactgcgtcagctaaaggtattcaagggcagcgaactgcggacttgcatgttgatggactcggttccattgatgtgtatacgccgaagaatcttgatccgacaaagatagttcgagcgatagagaagaagtcgaatcaagccggcggagtcttggtgcaggcggacttgccaagcactgacatgtcgtccattgctgctcgtatgtgggggaagactaacgcgcagagtataaaaactatatttttccagaaaccagacggatcattggtccgatttgatcgacctgctggaggaggctga

SEQ ID NO: 354113 - DNA, 174 bp, Pseudomonas aeruginosa; identical to SEQ ID NO: 330002

SEQ ID NO: 354114 - DNA, 681 bp, Pseudomonas aeruginosa
ttgcggcggaagcggctggaggaggggatatccgggaagaccctgaacaacgaactgggatatatccgcgcggtgttcaatgagctgaaggacctgggccagatcgactacgacaacccgctggccggagtgaagctgctcaagctgcaagagcgtgaactgtcgtggctgatgaccgagcagatcggcgaacttctcgaatcaatccgcagccgttgcgacaacccgcatacggagctggtgacactgctctgcctggctacgggggctagatggtccgaggcggaaaagctccccgcgcaacgactccagggcaacgtcgtgacctatgccggaatgaagtcagggaaggtgcgccacgtaccgattccaccagagctggctgaccgggtgagggcgcattggcgaatgcatggtccgttcacatcctgcatcacatccttccgacgcgccctggagcgaaccacgattcggttgccgcaagggcaagccagtcacgctctacggcacaccttcgccagtcactttatgatgaatggcagcaatatcctcaccctacagaaaatcctggggcattcgaccctgacgatgaccatgcgttacgcgcatctgtcgcctggtcatctgcaggatgccatccgttttgggccgaatatagatattacccttgcttcatactag

SEQ ID NO: 354115 - DNA, 963 bp, Pseudomonas aeruginosa; identical to SEQ ID NO: 347450

SEQ ID NO: 354116 - DNA, 1251 bp, Pseudomonas aeruginosa; identical to SEQ ID NO: 328572

SEQ ID NO: 354117 - DNA, 789 bp, Pseudomonas aeruginosa
atgatcggcctcgatgagatcgccgccgacctcgacgccacgcaccgccgcgccgccctcgacgatcttcgtcaccctgcggccatgcagttgccggcaatgtccggaagcctgcaagcgctcggcaagttgcacgcagaaggcatggcagtcggcgacctcctcgtccggcgtgtggatgccgccgacgaagggcgcgtcggacagggccggctccaactcgcggcactcggcggcggacaggacgaattgcgccgagggatcggccaggccctggcgggcccgcgcaaagctggccggttggcgaaacgccaccagcttgccgttgcgccgccagtcgaagccatcgaggccatcctcctcgcgccagtcctgcagggtgcgctggctgagcaatgccaggcgcagcaggtgcgcggcattgcggcggttcagcgagccgcggcaggccgcgaggaagcccagcagccagcgccactgcgccggatcaagacgcggccgcaggcgcaacggcgcatcgttgcgcagcagccagccgagcgcctgggccggcacgccgctgtcggccaatggcgccacgtagcgataggacaactgcccgccattggcgtagctggtttccagcccgccccgctcgcgcgcttccaccagggtcacgtcgaatccttcgcgaaccagggcgtaggccgtggccaggccgaccacgccggcgccgatgatgcaaacccgctgagccatgacaatcgttatccaggtgttttccagggcttcgacgataggcgcggatga

SEQ ID NO: 354118 - DNA, 813 bp, Pseudomonas aeruginosa
atgcaagcaaagacgtacggcgccctaatcaacaatcgaaagctgaccgcgaagccgaaaaatttagcggctaaaatcgctctttccatcgccgcgacctttggcgtcgccacaatgccagcgcaagcgggcattccggtcatcgacggcaccaacctgacgcaaaccactgtcaccgcgattcagcaggtcgcgcaggtccagaagcaaatcgagcaataccggacgcagttgcagcagtacgaaaacatgctgcaaaacacgatggccccggccgcctacatttgggatcaggcgcagtccaccatcaacgggctgatgcagtccattgacaccctgaacaacctcaccaatcaggccggtaccctggatgcctacctgggcaagttccaggacgtttcctattacaagtcgtcgccgtgcttcacctcggccggctgctctgacaccgaacgcgcagcgttggagaaaacgcgcgccctggcatcgcagtcgcaaaaggcggcgaacgatgcgctgttcaagggcatcaaggatcaacaggaaaacctcaagtcggacgcgcgccagctcgaacggctgcaatcgaaggcgcagggcgcacaagggcagatggaagccctcggctacgccaaccagctcgccagccagcaggctaaccagctcctgcaaatccgtggcctgctgctcgcgcagcaaaacgccatcggtgcgcagttgcaggcgcagacggaccgggaagccagggaggcggccggctcggcgcaattctggtccggccagcccggcaaaagctcgaacaagggctggtaa

SEQ ID NO: 354119 - DNA, 225 bp, Pseudomonas aeruginosa
atgaacgtcaaaatctatctcgccgtcatcgccctggtcgtcattgtcgtgggtgcgggcgtttcgatcttcggcggctcgaaagaccaaatgcctgcagtgagcgagcaaaactgccagcccgaagccatcagcaaaatccgcgacagcgacatgcgtagagagttctccggcaagtgcttctggcgtggcgcgccaggcaaaagctcggacaaaggctggtga

SEQ ID NO: 354120 - DNA, 1539 bp, Pseudomonas aeruginosa
atgaataatgtgcgaattaaaccaagcgcagccgtactaatcccgacgctggccgtgctgctgctgttcaccgttgacgctcatgcagcggtcagcaacaccgacatgctgaacggcatcgttgagaagatgcagactgccacgcagagcatggccgacaagctcgtgggctttgctacgacgctgttctggtcgctcgcggtcatcaatatggtgatcacgttcggctttatggtgatgcgcaaggcagacattggcgagtattttgcggagctggtgcgcttcatcatcacgctcggctttttttggtggctgctgtcgaatgccgtcagtggcatgaacatcggcggcacgatcatcgattccatgcgcaacatggcggtccaggcaactggcttaggccgcgagctgtcgccatccggcattgtggacgttggattcaatgttcttttcactgtctacaacgccgatctcgggattgcggacaagctgctcgcctatgccgttgcggtcatcattctgctgatcttcgcggccgtcgccgtcaacatggtgctggtcctggcagagtcctggttcctgctctatggcggcattttcgtcctgggctttggcggtgcccgctggaccacggatatcgccattggctactaccgccaggtactcggcgtcggcttcaagctgttcggcatggcagtgattatcggggtcggaaaaggcttcatcgacggctttctggcagacctgtcgaagaatccgggaatcctggaattggccgtaatccttgtggccgcctatgtgttgttcaaactgtcggaccgcatcccgtcaatgctggcctccctcattcctggcggcggcgggcctggcggctttgccggtggtggcggagccgtaagcgcgggtgccatcgcaggggcggccgctggcgtcgcgggcgctgctatgaccgggggtgcctctctggctgcggccgccgccggcggtgcgcaggcggtcatggcggccgcgtcgaagggcagcgataacgtctcggctggaaccgacattctgtcgagcatgatgggcggcggtgatagcgccgataccaacagcagcgacattggcggtggcggtggtggcggtggtggcggctcgggcggtggtgaaaccccgatggcctcggccgccggcgacaacagcagcggcgcacgcggcggcagctccggcggcagctcgggtggtggccgctcgtccggcggtatcggggccacggcggccaagggcggccggatcgcggccgatacggtcgccaacctcgccaaaggtatcggctcgatggcatccgccaaggccggcagcatggccgacgcggctaagagccggattgcagagacggccggcggaaagctcgccgcgacgatcaaggcggccagcagctcggccccgtcgcaagcggccacattcgacggaaataacctgtccggcacaaacgacaacacggcggccggcgtagatgacgaggtggccgagtttgtgaaccgaccgcagccaacctaa

SEQ ID NO: 354121 - DNA, 246 bp, Pseudomonas aeruginosa
atggcaactgtacatcctaacgaattttcccaggcggttcagcacgcggtggcggaactgaacgctatcggctggctggaccaggacgccgcgcgcgagctggggccgctggccgaggccacggccaacctgttcatggtgctgttctaccaggccgaaacgggtcttgcgacgcgcgaggacttttcccaggccagggcacagattcagcacgccctgaccgcccaacacgttcgttttcaataa

SEQ ID NO: 354122 - DNA, 258 bp, Pseudomonas aeruginosa
atggacttctttccccctcaatcgttttcggacttcctgcttgtcatgggggtgctgttcctggtgttcgtgccgggcttctatctgctcggccgcctcatttgggcgcttggtttcggcccccaggctaccgcccttgcggataagatggagcgcatccgcgatgcggtagcgccaacggtcgccagcagtctgttcgaaaccagcaaagaactggaaaggcaaaaccgctggcctttcaatcatcgcggaaagtaa

SEQ ID NO: 354123 - DNA, 150 bp, Pseudomonas aeruginosa
atgacgaacgaccgtgaaccacgggtgcgagagttgtcgccagccgagattgaggcgctgcgccaggagatgagggagtctatcgaatgggccaaagccatactggcgagccgctgtcttggagaaattattgcgggagagctgcactag

SEQ ID NO: 354124 - DNA, 1473 bp, Pseudomonas aeruginosa
atgtttgccctgaccgcgtaccgcttacgttgcgccgcctggctgttggcgaccggcatctttctgctgcttgcgggctgtagcgaggcgaaagcccctaccgccctggagcgcgtgcagaaggagggcgtactgcgcgtgatcacccgcaacagcccggccacctacttccaggaccgcaacggcgaaaccggtttcgaatacgaactggccaagcgcttcgccgagcgtctcggcgtcgagctgaagatcgagaccgccgacaacctcgacgacctctatgcccagctttcccgcgagggcggcccggcgctcgccgcggccggcctgaccccgggacgcgaagacgacgccagcgtgcgctactcgcacacctacctcgacgtcaccccgcagatcatctaccgcaacggccagcagcgcccgacccgcccggaagacctggtcggcaagcgcatcatggtgctcaagggcagcagccacgcggagcagctcgccgagctgaagaagcagtatcccgaactgaagtacgaagaatccgatgctgtcgaagtggtcgacctgttgcgcatggtcgacgtcggcgacatcgacctgaccctggtcgactccaacgaactggcgatgaaccaggtgtacttccccaacgtccgcgtcgccttcgacttcggcgaagcccgcgggctggcctgggccttgccggggggcgacgacgacagcctgatgaacgaggtcaacgcgttcctcgaccaggccaagaaggaaggtctgctgcaacgcctgaaggaccgttactacgggcatgtcgacgtactcggctacgtcggcgcctacaccttcgcccagcacctgcagcaacgcctgccgcgctacgaaagccacttcaagcagagcggcaagcagctggataccgactggcgcctgctcgccgccatcggctaccaggaatcgctgtggcagcccggcgccacctccaagaccggcgtgcgcggcctgatgatgctgaccaaccggaccgcccaggcgatgggcgtgtccaaccggctcgacccgaagcagagcatccagggcggcagcaagtatttcgtgcagatccgcagcgaactgcccgagagcatcaaggaaccggaccgcagctggttcgccctggccgcctacaacatcggcggcgcgcacctggaagacgcgcgcaagatggccgagaaggaaggcctcaacccgaacaagtggctggacgtgaagaagatgctgccgcgcctggcgcagaagcagtggtacgccaagacccgctacggctatgcgcgcggcggcgagaccgtgcacttcgtacagaacgtgcggcgctactacgacatcctcacctgggtgacccagccgcagatggaaggcagccagatcgccgagagcgggttgcacctgcccggcgtgaacaagacgcgcccggaagaagacagcggcgacgagaaactctag

SEQ ID NO: 354125 - DNA, 228 bp, Pseudomonas aeruginosa
atgacccgggttcgtcattattattccattcttcgtcagagaattcggcggcataagtataccgccgaagccattcccgatacgaacatcttcagccaactcaattacaatagtctcaccagcctcaagagtacactgccccactgcaagatcggagaacttttgcgctttatttgcttcattaacactgcccggcaaatatatccttccagcagacagatcaactga

SEQ ID NO: 354126 - DNA, 297 bp, Pseudomonas aeruginosa; identical to SEQ ID NO: 325200

SEQ ID NO: 354127 - DNA, 366 bp, Pseudomonas aeruginosa; identical to SEQ ID NO: 341824

SEQ ID NO: 354128 - DNA, 1248 bp, Pseudomonas aeruginosa; identical to SEQ ID NO: 199571

SEQ ID NO: 354129 - DNA, 1410 bp, Pseudomonas aeruginosa; identical to SEQ ID NO: 199574

SEQ ID NO: 354130 - DNA, 954 bp, Pseudomonas aeruginosa
  misc_feature (19)..(28): n is a, c, g, or t
atgattgcgggcagaagcnnnnnnnnnnagcttgaaaaaacaatccagcacgcggacttttttattcgtcatgcattgggtggaatacagtcgctaaccgcgccctgcgagcgattcgtcggtttggtgcatggtaaaaatggtctaacacccaccgtcgatgaggccggtatgtatgctgcctattccgcctcgctaaaatccgcctgcttgagccgtcaagttggggcatctattgctgattcgaaggggaatattgtttctcttggctggaatgatgtgcctaaggctggtgggggattatatggggccgatgatggtgaaggcgatcagcgctgcgtgcataaaggtgggaaatgccagaacgaccaccacaagaatcgattggttgaaaaggtcgtaagtcttattcagaaggagttaaagatcgatgcagagaccgcgcgcggactctctggcaagattatgcagcatactccggtgggatcgctgattgaatattctcgagcagttcatgcggagatggaagcgattctgaatctcgcgagaaagaaaagcgggactaccagcggagctacactgtattcaactacatatccatgccataactgtgcaagacatattatcgcagccggaataatgcgtgtggtttatattgaaccatatgagaaatccttggcaactacccttcactctgatgcggtttctaagaataaatcagacgaccatatggttgtctttgaaaattttgaaggtgtttcgcctaagcgctatgccgccttctttggcggtggctctgatagaaaagatccacatggaacagcccttcacattgtatctcgtgaggctaatttgatctctaccgaactcttggactcgtatatcgatgtagagagcaaggtcgttcaactagctgtggatgagttcgggcatccatacggcggtcaagcctga

SEQ ID NO: 354131 - DNA, 849 bp, Pseudomonas aeruginosa
atggcgccaccaggaaataaagtcgctatacctggacaggtcgcatctacagactcaacaggttatacacgggggaccagcaacgctacagcgctaattagccgggcggctgtgcattgctatgagactctttcagaggtaattgatggggcagcggctgcgggctacgatgactcatataccgcaccgctaatcaaggcaatgctcgcccatgggtgtagctggggagatatggggcagcgtctggttgatgtaattggagaacagcagaacataaggaaccctgtaagttttgctagtcggtggattggatacggtttgcctgatatagatcgagtattggagtgcactgagcagcgagcaactattttaggcttcggggagctgtctgatgcacaggcccatctcttcaggatgcccttgcctccgtcgttgagctcagttcaggagtggcgtcggctgactgtaactcttgcctggctttcgcctattcagccgagcaatcaaaaatatagatgcgcaagtatgtggttcgaggcaaataaccctattgcaaatcaaaggcgtgaagctgcaagcggaaatgctggttggcaggcagtaaggaggggaacgcttcagcatgagatatttgaaggtgattgggctcagcctttcgttgatggagatagcttggttctaaaaataaactgtcgaaaggaagcagcggcgatagattcccctgtttcttatgggctagtggtgtctttcgaggtccgtgaaggggttcagctgccgatttaccaagaaatcagggagaaaatccgcgttcagccggctgtgccggttaggcaggggccaattatttga

SEQ ID NO: 354132 - DNA, 258 bp, Pseudomonas aeruginosa
gtggtggcggccaatccgcaagcggagacgagcatgtccctgagtgtcttcgatctgttcaagatcggcatcgggccgtccagctcccacaccgtggggccgatgcgtgccgccgcgcgcttcgccgaggggctgaggcgcgaggggttgctggaggccactgccagcgtcaaggtcgagctgtacggctcgctcggcgccaccggcaagggccacggcagcgacaaggcggtactgctcggcctggagggcgagtag

SEQ ID NO: 354133 - DNA, 1218 bp, Pseudomonas aeruginosa
atggcggacaaagcgttaaagaccagtgtcttcatctgggaaggcactgataagaaaggcagcaaggtcaaaggagagttggccgggcaaaaccctatgctggtgaaggctcaactgcgcaaacagggtatcaacccactaaaggtccgcaagaaaggtatcaccctgtttggggcagggaagaagattaagcccatggacatcgccctgttcactcggcagatgtctaccatgatgggtgccggcgtaccgttactgcaatcttttgacatcatcggcgaaggattcgaaaatccaaacatgcgcaagctagtcgatgagatcaagcaggatgttgccgccggtaacagcttagccagttcacttcgaaagaaacccatttacttcgatgatctctactgcaacctggtcgatgctggcgaacagtccggtgctttggagacattattggatcgggtagcaacttataaagaaaagacagaatccctgaaagccaaaattaaaaaggccatgacttatcccattgcagtaattgtagtggcccttgtggtgtcggcgatccttctgataaaagtggtcccacagttccagtccgtatttgcaaattttggcgccgagttgccggcctttactcaaatggtcatcaatctttccgagattcttcaagagtggtggctcatagtgcttattggtctttttgccgcagcttttgcatttagggaagttcatcggcgctcgcaaaaactgagagattcagtagatcggggcctgctgaaactacctatcatcggcgggatactttacaaatcagctatcgcccgctacgcccgaacgctatccactacctttgcggctggagtgcctctggtagaagctctggactccgtttccggagcaactggcaacgtggtattcaagaatgccgttaccaagatcaaacaagacgtgtccagcggcatgcaattgaacttttccatgcgcaccaccaatgttttccccagtatggctatccagatggctgcaattggcgaggaatcaggttcgctagatgagatgttaggaaaagttgccggtttctatgaggaagaagtcgataacgccgtcgacaacctgacaacgttgatggagccgatgatcatggccgtgctcggcgtactggtcggcggcctgatcatcgctatgtatctaccgatcttccaactgggttccgttgtgtaa

SEQ ID NO: 354134 - DNA, 717 bp, Pseudomonas aeruginosa
atggcgatttctgagttgaagctgccggccggcgtcggcctgcaggtctggggcagcgccgccgagcaggcccgcggcctggccgccgaggtcgccggccggttgcgctcggcgctggccgagcagggccaggcgttgctggtggtgtccggtgggcgcagtccggtggccttcctcgaagccttgagcgaggagccgctggactggtcgcggatcaccctcagcctggccgacgagcgctgggtgccggagtcgcatgccgatagcaacgccggcctggttcgccgccacctgctccgtggcgaggcggcgaaggcgcgcttcatcggcctctaccagccggcggcgagcctggaggaagcggccgagctggccgaccaccacctgcacgagctgccgttgccgatcgacgtgctggtcctcggcatgggcgacgacggccataccgcctcgctgttcccgaacagccctggcctggacctggcgatggatccccagggcacgcgccgttgcctgccgatgtgggcgccgagcgtgccgcaccagcgcctgaccctgccgcgcgccgtgctggcggcggcgaaggtgcagctgctggcgatccagggccagtccaagctggccaccctgaacaccgcgctggcggtcgaggacgaacggcggatgccggttcgcgccttcctccgcgcgccgctgacgatccattggtacccctga

SEQ ID NO: 354135 - DNA, 1191 bp, Pseudomonas aeruginosa
atgcgccacatgtaccagatcggcctgctcggcctgatccgcgaacagaacctctatcccagcctcaagctgatgggccgcgcgctggcgcgcctcgacagcctgcacggcggggtggcccgttcgcggctgtgctggatcggcgccgcggcgatcgagtcgatcgtcgatggccaactgttgccgcgcaagtcgcgcaagcaactgttctcgcgcatcgaccgcgagctcaagcaattgctgatcggcccggcctacgaggcgccgcgccatctgctcaaggaactgctttacctggtggcgctgtccgacggccagggcccgcgttcgcgcgaggtccgcgaactgcatgggctggcgccgctgccgttcaccgaccacctgctggaagaggaatcgcagcgcctgtccggccccggccagtcggtgatgcgttcgctgtccacggcgatccgcgaggaactcgccggggtcaaggacatgctcgacctgatcgagcgcggcgtggcccagccggatagcctgaccaacctgcatgcgcaactgggcaagctgagcaagaccctcggcatggtcggcctgaactcggccggcaccgccctgcagacccagctacccaccgtggccgcctgggctgccagcggcgtcgccgattcgccgccggcgttgctgcgcctggccgatgcggtgctctacgtggaaagcatggtcggcaacctcgagcgcggcgagcgccgcatcatccggccgactccggcggagcccgggcaggaagccgatgcgttcgccgtgcaccagttggccgaggcgcgcatcgtggtgatcgaggaggccaaggccggcctggccctggccaagcgtgcgatcaccgcgtacctggaatccaatggcgacaagctcaacctggccaacgtcccggccagcctgcaggcggtccggggcggtctctggttcctcggtcaggagcgcgccgcgctgctggtcggcggctgcgccgactacatccagcagcgcatgatcgagaccgcgcagatgccttcggagcagatgctggaaaccctcgccgacgccctgaccagtctcgaatactatctcgagggcggtgccgtgctgcgtccgcagggccagccggacgtcctcgacctggccagcgccagcgtcaaggcgctcggactgccggtggccgcctga

SEQ ID NO: 354136 - DNA, 471 bp, Pseudomonas aeruginosa
atggtcacaggagccacgtccctcagtctggtgcgcgacgagttgttcgccaccatggaacaggccgaacagggtcttgagcagttcattgccgagcggcagaacggcagcctgctgcagcacgccgtcgaatgcctgcaacagatccgcggcaccctcaacctgatcgagctggccggcgccgagctgctggcccaggaagccctgcagctggcgaccgacattcccaccggcgtcagcgaggagcgcgacggccagctggcagccctgggcaacgccctgtacgtgctgcgccgctacctggagaacgtcgaggccaatcgccaggagatccccgagctgctcttgccggcgatcaacgaagtgcgctgtgccgcagggcagccggcgctgccggaaagcttcttcttcagcgcccgcctggatatcccgcggccgccgagcaccgccatcgaccacctgccttcctaa

SEQ ID NO: 354137 - DNA, 195 bp, Pseudomonas aeruginosa
atgacctttgcagcgaactctcaagtaatttggaccagcaccgaagccgccggcaagggacctacccctgtcaaagtcgtcggccccaccgacccgagcgagtacgaccacgacgaagttggccagatgtatgacatcgagctgccggatgggtcgagtcactccgcctttgaagacgagctaaaggctgaatag

SEQ ID NO: 354138 - DNA, 237 bp, Pseudomonas aeruginosa
atgttaagtctcgttacagatcagcgaccaggagagccggaattgctagccacagtgaagcaccaggctttcgaaatccgctcgctcgccggcaacgtgctggcaacggtgacagcgccggtatccggttggacgcatgagcaacttctggacgttgccgtgcagcatgaagcgatcacccgtgacggcgcggatggctaccttggcacccaatgggttggtagcaccgaaatctga

SEQ ID NO: 354139 - DNA, 585 bp, Pseudomonas aeruginosa; identical to SEQ ID NO: 324382

SEQ ID NO: 354140 - DNA, 1260 bp, Pseudomonas aeruginosa
atgcctttccgaatgacctgtttgcaagctgccatcactgtggcattcgccacgtccacctctttcgctttcgccgcgccgttgccggatgccggcaagctcactgaacccaatcagccaggacagatgctgaccacggagcaagcgtttgaggccgagattctggaagtagctaaagcgcagcgcgtttcgccgaatcaggcgcgcagcatcttgaacattgaggcgcagtcgggcgagatcgttgcggcaatccgggagcgatataagaaccggctcgcgggaatcttcattgagcacaacgctgagggccatcgtctggttgtccgtctgaaaggcgcggagcttgttccgaagcaatcgcaccagttcggcgatgacgtcctgatcgtcgatttccagcctggcgcaacacatacggtcaacgaattggtggccgcgttgaatactgtgactcaaggcgatgttgccgccagtattcccggtgcacacggcggatatgttgatgaacgcaccggtgaactggtgatagaggtcaaccctaattctgaagctggcaagggctcagccgcggttgtagccagagagatggtccagaagcttgtgggcgtccctgttcggatagaaaagggcgaagcagccgagatccaggcggtgttcggtagtggtaccctaggcaacggttgtacagcagggtttacggtcaaccatgccgcttctggcttgcagggcgttctgactgcgggtcactgccagaccgctagcggtagcgatacgtattcaggtatcgacggtgcaaccgccaccttggagcaaaaaggctgggtgcaaaacgctaaaaccgatcttctctggtacaagggaacgacagaagagaagttcggtccctggttctatgcggatgcttggcggcaagttaccggtcgccgcacacaagcggcaactgcggtgggcgcgagcttttgccattatggcaagacatcgggttactcttgcggggttatcaaaaccgtgtatggcaacccaggctctatctgcggtgcgccgaacgaaagcaacccctgcaatgcatcgtttgtgggcgttgaaggcacggacttgcgctgcctgggtggcgacagcggtggtccctggtttaccgccgctaccttggccgctggcatccatttcgcaggaccgaagagtggcgtgggccggtgctggtactccagcaccgactatgcttactcggatctcgggttgaatctgctgtataaatag

SEQ ID NO: 354141 - DNA, 630 bp, Pseudomonas aeruginosa
atgcgcgccgcgttgatgcgtgagctgggcctggtcagcaagcaaccgggctcgcacgcctatagacaggccatggttgagcggccggatatcccgaatcggctgaaccgcgagttcgcggtccagcgtcccaatcaggtgtggtgtggcgacatcatgtacatctgggcgcaaggccgctggcattacttggcggcggtgctggatctgcaggcacggcgggtgatcggctgggcgttctcggccaagccggatgccgagctggtgatcaaggccctggacatggcctacgaacagcgcggcaggccacagcaggtgctgttccattcagaccagggcagccagtacgccagccgcctgtttcggcaacggctctggcgctatcggatgcagcagagcatgagtcgccgagggaattgctgggataactcgccgatggagcgcctgttccgcagtctgaagtcggagtgggtcccgtcaacgggttacctgacggcgcaggaggcccaacgggacatcagtcattacctgatgcaccgctacaactggatcaggccgcatcaattcaacgacgggttaccacctgcggtggccgaagaaaaactcaacccactgtccgggatgggttga

SEQ ID NO: 354142 - DNA, 1332 bp, Pseudomonas aeruginosa
atgaccatgaggctgtcgcgctttcccatttcgaccttgctggactcggcctcgggacatctcgaggaccacttgtttaagaagcggcttgctgccgaaagcggcgaaccgctggctcaacaatattccggcatcattttcagcggcaacccgcatgaaaccgttcctcggcgcctgctgctggataaacgcctcaccccgctggagcggaactgttggcaagtgttccgcttgctcatcaacgacgacgggctgaccgcgttcccgacatacgagcagttgcgcccctacctcggcatgcaaccgggcaagattgcctcgcgcgaaaccatcgccaaggcactcacggtccttcgtttgacacgctggctcagtcttggtcggcgactgcgcaacgatctcaacgggcaggtgcaaggcaacgtctacatccttcacgacgagcctgtctctccagccgaagccttggagctggacagcgactacatgcaattgctgagccaatccaccgaccacagcaaccgagccatacgcgaaatcggccagatcacctggcgggagttcagggatgacccggacgttggtcgccgcctcccaacccatctggagaagctcgagggacgcttgaaccaccagcaatgggctatcgatagtcagctcgaagcggatccagcggcagagttcggcatccgaactctgcccgatctacctcattcaaccccgagttcggaagccgaactcagtgaaatcagcaacaagcaatgcgctttaccgctgagttcggatgccgaacccagacagaatccgccgagtacgcccttggttcggatgccgaactcatatagtacgtatacatacaaacaagattctgtatgtaaaaaaccagtacaaccgcgagcacgcgaggaagcccatccgaactggcaggacctcctgcacgcactggaggccgagcaacggatccaggcggtaagcgcgctccgacgggtgtccgaggatcttcggctacccatcatcgagcagtggcggcaccgatgtgccggcggaaccgtcggtaatccgttcggctacctcatgacgctcatccagcgtgcagtccagggcaagttcaacgcttcttgggctccggaagaaccggctgagcgaaccatcctcgcaacggaacgccccattcgtgctccggcaccatcaagccccatagcgcctacacagcctcaggtccagcccaggggggatacccggacagggagcgaggtcctcagccagctcaaggacctcattcggcccaggcacggatcgagcgtgccaactgagcggggtgatgagccatga

SEQ ID NO: 354143 - DNA, 1116 bp, Pseudomonas aeruginosa
atgctgtactcgggcctgggagttgatcgtgtctctcgcattctctcactacgaaaggcttccctgggctgctggaaacgcctttactccggcgagggtatcgacttcgagatgctgttccaggacaccctggcgatcttcgacagtagccctgacgagttcattttcgagcgtttccaggacgaactcatcgaccagatgaagcgtcccttgggccttcgctatgatcaaatcctgctcgagatcaccaacggccagcaggagcagcgccgcggcactctggtcgacctgcccgcacctgccgcaccacctggaatcccagccgtagggcaggaaaatcctgctgcgtcgactactggacaagcacaatcacagagccccgctgccggcctccaaacgtccaagaccaatagcctcccgggtaatccctctaccccgccaactccgccactacctgtacaacagcagcaactgaccgacgaggagcgtgctgaactcttggcaggtcatatcgtgagcccggtatccaccaagattcagcagactcgccaacggctggccgctctcgagggtgaacatctacctgtcttcgaggaaacagctctgcaggcaatcccggtgcaagtcggcggcctgcacccgatcaccgacctctggtacatcgagcggtcgatcgacacccccgaaatcctgcgacagcacatcgctgacttggtggaagaaattgccgttatcgtcggcgcccccggaacgatcgagaggattcaaggtggtgtgggctactcgtaccgggagccagcagaagattgcgaactttctgaggcagccctgcacctgatcaccttgtttcagtctctcagtggccaggtccaggtaatcctggacaaggtcgactcgcaaacttgtcgtgatgctctgggtgaattccagttctcagctggcctcgctcagttgctgctgggccaacccaccacaggcgatcagccatccagccaggcaggccgtcttaatgacgaagccctggtgaaactgttccggatcattcgtcttgcccggcgcctggttgaccttgagctgccgccggccacctccgagcaagcagctaccgaccagtga

SEQ ID NO: 354144 - DNA, 1305 bp, Pseudomonas aeruginosa; identical to SEQ ID NO: 324449

SEQ ID NO: 354145 - DNA, 303 bp, Pseudomonas aeruginosa
atggaagccccgctgcgcgagatcgtcaccaatgccggcgaagagccgtcggtgatcgtcaaccgcgtcaaggaaggttcgggcaacttcggctacaacgccgccaacggcgagttcggcgacatgatcgagttcggcatcctggacccgaccaaggtcacccgcaccgcgctgcagaacgccgcttcgatcgcgggcctgatgatcaccaccgaagcgatggtggccgaggccccgaagaaggacgagccggcgatgccgggcgccggtggcatgggcggcatgggcggcatggatttctaa

SEQ ID NO: 354146 - DNA, 834 bp, Pseudomonas aeruginosa
atggctatcgtcggcgatccccatcagcagctctaccggttcaggggcgcggaagatgccctgaacagcgactggatggtcggcgccgaggagcactacctgacccagagctggcggttcggccccgcgattgcgcacgtggccaacatcatcctctcctacaagggcgagacacggaaacttcaaggactgggcccgcagacgctggtgaaaaagtccctcccggcggaccttcctcaccgcactttcattcaccgcaccgttatcggcgtcatcgaaaatgccctgcagcgtgtgcgcaataatccggcacccaagttctactgggtaggcggtatcgacagttactcgctgcgcgacctggaggacctgtacgcattcagccgaggcctgcaccaaaacgtccaaaacaagaagctgctccgtgactaccgcgactacacccagtacgtggagatcgccgagatcagccaggacggtgaaatgctgcgctcgatcaagatcatctcgacctaccctgatctaccggcgcggatcctcgagcttcgctcactgacccttgacaatgagctggacgcgacgatcaccctgaccaccgcacataaggccaaagggctggaatgggatttcgtttgcctgtacgacgacttcaacgcggatccgctggcccccgacaccgacccgggcaagcgcgacgatgagctgaacctgatctacgtcgcagtgacccgcgcgatgaagatcctcgccatcaatagcctggtgctatcgatcatgcagcggtacgtggacgacagaaagctgaaggagcagatagctagctgtgaaaaatga

SEQ ID NO: 354147 - DNA, 243 bp, Pseudomonas aeruginosa
atgactgccacgttcttgttcccgggcgggtacgaggttgacgccgccagcggcgcggagctgccgggcaactaccgcgtcgagtccatctcgctggaccaggtcgtgctcaccgacaaggacggcaaccgcgtgcccgtgggcttctccagcgttgccccctcccaagcctcctctacggcccaaggcgcctcggttccgccagcgctgcccggggctgtaccgcagccgttcattcagtag

SEQ ID NO: 354148 - DNA, 234 bp, Pseudomonas aeruginosa; identical to SEQ ID NO: 345808

SEQ ID NO: 354149 - DNA, 228 bp, Pseudomonas aeruginosa
atgacgttctggaaggagaatgtgggtcagatcattgcatccaatggttttcccctgttgaacgatgctggcgctatcagccaagccaaaatggagcatgtcactaccgcgctttacaccgagttcgatgagcggcgcaggctgcaggaggcacaggacgcagatcgtgccgacgagggtgaactcatcgctttggaacaccaactcaaaggtcggctgaaatcttga

SEQ ID NO: 354150 - DNA, 204 bp, Pseudomonas aeruginosa
atgggcgcggacgtgcttgatgttcagggtgccaccaaccattgggcgcaatgtcgggtagtcctggacgctattcggcacatacagcttggtttcgccgaggtcgcggatgcgcggtgcgaagcggaagcccagcaggtgcatcagggcgaagacgtgatcggtgaaaccggccgtgtcggtgtagtgctcctcgatccgtaa

SEQ ID NO: 354151 - DNA, 303 bp, Pseudomonas aeruginosa
atgcgagtcattgccgtgtccactcttcgagcattctgggaactgcaccctgatgccgagcagccactgaaagcttggtacgaggaagcgacgctcgcatcctggacccagcccgccgatatcaaagcgcagtaccgcagcgccagcgtgctgaagaaccgtcgcgtggtcttcaacatcaaaggcaatgactatcgactgatcgtggccattgcttacaaattacagatcgtctacgtgaagttcgtcggtacccacagggagtacgacgctgtcgacgcagaaaccgttgaaatggcctga

SEQ ID NO: 354152 - DNA, 372 bp, Pseudomonas aeruginosa
atggacatccgccctatccacaccgaagcagactacaaggccacgctcaaagagatttcggccttgatggagtccgaccctgatctgggcacgccggagggtgatcgcctagacatcctggccacactggtgcaggcctacgaggccaagcacgttcccattactgcgccggatcctgtggaagccatcaaatttcggatggatcagagcgggctgtccgtcaaagatcttgagcccatcattggcaagagcaaccgcgtctacgaagtcctgagccgcaaacgcccgctcacgctggccatgatccgcagactgcacaagagtctgggcatcccggccgatgtgctgattgcggagacggctgcagggtga

SEQ ID NO: 354153 - DNA, 564 bp, Pseudomonas aeruginosa
atgcactaccccgtgatgaccgaaaggcaacttgccgcccgctggaagatcagcctgaaaaccttgcgacgctggcgttcagacaacgaagggcccacctggcacaaattgttccagtacgtccgttaccacgaagctgacgtcctcgacttcgaacgacagagcgcgcagcactggtcagcgattctcggcgacggtgaacgagtgcccaaagtcgtgacccggccaccgcaggagcagcctgaaacggaagaagataccggtgctttttacatcacggcccaagatgtgattgaggcaaccggactgccgaagcactggttcacaaccccggaataccgcaccagaaagcaggttccgcatctgactttggttggcaacgtgcgcttctctctgcaagccctctggcaatgggagcaaaaccacagcaccgtcggtcggccgccggagtccaaggcgccaccacctgttacggagccagagcccgcgcagccttcgcacgtgccgcgatggcatgaacttgcccgggaactggacagagaacgattcgattccacttcgtag

SEQ ID NO: 354154 - DNA, 204 bp, Pseudomonas aeruginosa
atggcagacccggaaggtgaaatcctgaccctagacgaggtggccgcctacttgaaggctggcaagcgcaccgtctaccgcctcgcggccgaaggcaagcttcccgcgttcaagctcggcggaacgtggcgcttccgccgcagcgacctggatgagtggattgccgccaatctgaccaacaaagattcgggggcaagcgactga

SEQ ID NO: 354155 - DNA, 3291 bp, Pseudomonas aeruginosa
atggaactgatcgacaacatcagcaggttgcttggcgacgatctcaagcagaccctccggccaggtgcgcgcctgaaggttgcggcctcgtgcttttccatgtacgccttcgaggcgctgaaagccgagctggaaaagattgacgagctggacttcatcttcacctcgcctacttttgttgccaacgaggtcaccgacaagattcgcaaagagcggaaggaattccacatccccaagctcgaccgtgagcgcagcctctacggcagcgagtttgaaatccagctgcgcaataagctcacccagagggcggtggccaaggagtgcgccgagtggatacggcgcaaggccaaattcaagagcaaccgcaccaaagcgccgatgcagcagttcgcctgcgtgcaggctggcggcaccgacacggcatatatgcccctgcacgggttcacggctgtcgatctcggttaccagcaaggcaatgcggtatccaacctcgtcaacaagatggacgaggcaccctttgcggctacgtacctgagcctattcgatcagatctggaacgacccagaaaagctggaggacgtgacagcgcagatttgcgagcacatcgcctcggtctaccaagagaactcacccgagagcatctacttcctgatgctctacaacatcttcaacgagttcttagacgacatcgacgaagacgtcctgcccaacgaccgcaccggctaccaggacaccctgatctggaacaagctcttcaactaccagaaggatgctgccaccgggatcatcaacaagctggaaacctacagcggttgcatccttgccgacagcgtcggcttgggcaagaccttcaccgcactggccgtcatcaagtattacgagctgcgcaaccggtcagtgctggtgctctgccccaagaagctggcggataactggctgaactacaaccgcaacctcaagaccaacatcttcgcccgcgaccggttcaactacgacgtcctctgccacacggatctgtcccgcaccagcggcgagtccttcggtacgccgctgaaccggatcaactggggcaactacgacctcgtcgtcatcgatgagtcgcacaacttccgcaacaacgacgcctacaaggacaaagaaacccgctaccagaagctgatgcgcaaggtgatccaggaaggtgtcaagaccaaggtgctgatgttgtcggccacgccagtcaacaaccgctttaccgacttgcgcaaccaactggccctggcctacgaaggcgactccgaaaacctcacaaaaaagctgcgcacggacagaagcgttgaggagattttccgaggcgcacaagcagccttcaatgcgtggtcgaagctccccccggaagaacgtaccgcgcgtgcgatcctcgactcactggacttcgacttcttcgagctgctcgacagcgtcaccatcgcacgctcgcgtaagcacatccagaccttctacgacaccaaggacatcggtcaatttccggagcgccgcaaaccgctgtcgtttcactgcccgttgactgagcggtcggacgtgttgggcttcaacgaaattttcgagcaactctcgttgctcaagctggccgtgtatgcgcctatcagctacatcctgcccagccgtctgaagaagtacgaggagatctacgacaccaaggtcggcggcaagggcacgctgcgccaagccgatcgcgaaaagagcctgcaggccctgatgacggtcaacctgctcaaacggcttgaaagttccgtgcagtcgttccggcttacgctgcaatcgctgcgggccaacaacgaagccaccctcgcaaagatcgccgcgttcaatcaatccggcggcgcggtcacggtgggcgacctcacggaagtgctggaagggctggatgcagaggacgatgaactgccaatgcccggcgacgagggcggcgagatcggcagcaaaatcaagatcagcctctccgacatggacttgccgtcctgggagcacgaactgaaggtggacttacaggtcatcgatgccctgctggcttcgatgaacaagatcacgccgcaggacgacgccaagttgcagcacctcaaagcgcaactgctcggcaagattgcaaacccaatcaaccccggaaacaggaaggtactgatcttcacagcctttgctgacaccgctgattacctgtacgccaaccttgcgccggagctgctggccacgctcgccatccacacggccaaggtcaccggcaagggggcgccgcagtccactatcaagagcaaaactcagaagcgcagctatgacttccaggagctgctcaccctgttctcccctcgctctaaagagaaggcggtggtactgccggacgagccgtacgaggtggatctgctgatcggcaccgattgcatctccgaaggccagaacctgcaggactgcgactacctgatcaactacgacatccactggaacccagtacgcatcatccagcgctttggtcgggtagatcgcattggctcgcccaacagcagcatccagctagttaactactggcccgacatttcgctcgacgagtacatcaacctcaaggagcgcgtcgagagccgaatgatgatcgccgacgtcaccgcgacgggtgacgacaacgtgctgtctgcgcaggccaacgacgtgtcgtaccgcaaggagcaactgcgtcgcctgcaggaggaagtcatcgagctggaggatttaaagaccggtgtctcgatcaccgacctgggcctcaacgacttccgcatggatttgctcaactacgtcaaagcacacggcgacctgagcaatgtgcctaacgggatgcacgcagtggttcccgctagacccgagatgggcctacggccgggcgcgatcttcacgctgcgcaatcgcaatgctgggatcagcctcaaccagcacaaccgcctgcatccgtactacctcgtctacatcaaccgcgagggagaggtcattcatgaccacacagaggttaagcgcctactcgatctagtgcgtacctgctgcaaaggccaggacaaacccatcgtcgacgtgtgccagcgcttcaatcaggaaacggcagatggccgccggatgcagccctactccgatctgttgggcaagtccatccgttcgatgatcgaggtaaaggaagaaaaggatttggacagcctgttcagcggtggcaagaccacggcactgacagacaccatctccggcctggacgacttcgaactcatcagcttcctcgtgattcaggaggctggatga

SEQ ID NO: 354156 - DNA, 699 bp, Pseudomonas aeruginosa
atgagtcaaggagcgaccacacagaaaacagcgctgatcgcctaccccaagcaagcggctttcgggcgcgttctgcccaagaacaaaatctatgagcacagcggggccaacacccggctgaaggaactgttcgtcgagcaggtcgagcagatcgtctggcagtacaagctcgccccggagacgatcaacctgcctgcgcggcccggtgtgccggaaatccaggtcttcagcatccagctcaagtccaccgagctgcacgaagacgtgctccgctgcattgatggcgcggtgcagttccctatcctgtttgaactgaaccaaggccagggcgatcaggcgaaaacgcaggtagcggcagcttacaagcgcccgagcgaagccgacgccagtcgctgggtgctgtccagctacttcaccggcgactggatgccagcagcaactgcccgcacggctatgccgctggccctcgacatggcccacctgtactccgttctgctgcaaggcttaatgccgttgccagcacgtccacaggaggccttacccgactggattgcgcgtatcgagcaggcggcaagcaagctccgcgaagtcgagaagacacaggcgagactggctaaggaaaagcaattcaaccgcaaggtcgagatcaacgcgaccttgcggcaactgaaatctgaacttgagcaattgagccgctga

SEQ ID NO: 354157 - DNA, 2106 bp, Pseudomonas aeruginosa
atggaaaaactaaaaatgcactcgcccaacctcacgcaggacaacgtagcccgcatccgagagttgtttccggggtgcgtgaccgaggccaagggcgaagacggacgagtgaagctggccgtagattttgaccagctgcggcaggagctgaccgattcgattatcgagggaccgcaggagcgctatcacctgaattggccgggaaagcgtgaggccttattgactgccaatgcaccgattgccaagacgctgcgccccttccgtgatgagagcgtggacttcgacaccacgaagaacttgttcattgagggcgacaaccttgaagcattgaaactaatgcaggagaactatcttggacaagtcaagctgatctatatcgaccctccctacaacactggaaaagacttcatctaccgcgacaactttacggcaaccagagaggccttcgagaaagtcagtggtgaccgcaatcaagagggtggtcgactagtcagcaaccccgaaactcggggtcgcttccatactgactggctcaatatgatctatccgcgcttgacgcttgccaaacgactgttaagtgacgacggtctcattctgatcagcattgatgacgctgagcaggcctcgctgcgccgtgtctgcgaccagatttttggtgagcagaacttcgtttcccaactggtctgggaaaaaggtcgaaaaaacgatgcaaagtacttctctatcggccatgagtacatgcttgtctacgctaaagatgtagtatttctgcgggagcgcggggaggtttggcgggaggaaaaacccggcgcaagagaaatttggtctgaatttctgcgcctccagaagattcacggcgaagactacgccgcaatggaatctgcgataagcaagtggtattcagacttgcccaaaggacatccgtccaaaaaatgggctcgttataagcgcgtcgataaaaatggcccatggcgtgaccgtgatatttcttggccgggtggcgatggcccgcgttatgacgtgattcatccagaaaccaagcagccgtgcgttgtaccggaggcaggctggagatactcaactcccgaggaaatgcagcgccagatcaagctggggcttgtagagtttcgccaagatcatactgagcccccttttcgcaaggcacacattcgcccaattccggacgaagcgatagaagatcagactgatgctgacgaggaagtcagtgatgaggataccgacgcagaacttgcaacgcaggtacgaggctcatacttctacaagcagtcccaggtcgcagttaaatatctgcggaaactaatgggcgccaaagtattcagcaacccgaaagaccatgaagaacttgcacgtctgattgaatacatgaccccgctcgatagagaagccatcattatggatttctttgctggctctggagcaactgcagaagcagtgatgagggctaatgcggtgtatggaacgaatcaccgtttcattctcgtgcagttgccagaaaaccttgaagatgctttggcatcaacaacaggcactgccaagaagaccgtccagtcggcaatcaagctgctcacaaaaaatgctcgcccgttgttgctttctgaagtgacaaaggagcgaattcgcagggctggtgcagctacgttgaaggatagctcgcatgagcagtggaagaaagatactggcttccgcgtcctcaaagtcgatacatcgaacatggcagacgtctactactcgcctgatgcgctcgacaaagcgaagctggaattgtttgtcgacaacattaaacccgatcggacaccagaggacttgctgttccaagtaatgttggactggggtgtggatctaggtctgtcgatctccaagcaaatcattcagggcaaggacgtgttcttcgtcgatgagaattccttggccgcttgttttgatgccaacagcggcgtcgatgaggacttcgtcaaggagcttgccaagcgacagcccctgcgcgtggtgtttcgcgacgccggattcaaggacagcgcggtcaagatcaacgtggagcagatattcaagctgttgtcacccgccaccgaagtgaaatgcatctga

SEQ ID NO: 354158 - DNA, 3063 bp, Pseudomonas aeruginosa
atgaaactaaagttcaagacacaggcctaccaaacagcggcggtgcaagccgtggttgactgtttcaaagggcaaccacttgcatcgaccgaatccatgagctatcgcattgacccgggtaagggccggcgaggtgtcgaggatttgtttggtggagatggcttcaagaatgccgatctggttctgtctgattcaaccttgctcgccaatattcaagacgtgcagcgcactcaaaatctgccgtcgtccgacacattggtcaaaaccaaggttgccaaggtcaatctcgacatcgagatggaaacgggtacgggcaagacctattgctacatcaagacaatttttgagctgaataaacagtacggctggagcaagttcatcatcgtggtgcccagcattgccatccgtgaaggtgtggccaagtcgctgcagatcaccgctgagcacttcctggaagcctaccgtaagaaggcgcgtttcttcatatacaactccaagcagctgcaccacctggagagcttctcgtctgacgcaggcatcaacgtgatggtgatcaacgtgcaggccttcgccgcacgaggagccgacaaccgccgcatttatgacgtactggacgactttcagtctcgcaagcccatcgacgtgataagcgccaaccgccccatcctgattctggatgagccgcagaagatggaaggcgcggcgacgctgaagtcgctggaggagttcaaggcgctgatggtgttgcgctactcggccacccacaagactacgcacaacaagattcaccgccttgatgcactggacgcctacaaccagaagttagtgaaaaaaattgccgtgcgcggtatcgcggtgaaaggtctggcgggcacggctggctatctgtacctgcagtccatcgagatctcgagcaagaggccgccagaggcgcgtgtggagttcgagcagaagctggcgggcggcaacatcaagcgggttgttaggaagctatccaagggcgacaacttgttcgatctgtcgaacggactcgatcagtatcgggatggctttgtcgtggccgatatcaacgccaactccgacaccctgagcttcacgaatggcgttgagctgaccgttggggatgcgaccggtgatgtcactgaagccgcgctgcgccgtatccagatccgcgaggccatcaaggcgcacttcgacaaggaacaggcgctgttccaacagggcgtgaaggtgctcacgctctacttcatcgacgaagtggttaagtaccgcgactactcgcagcccgacgaaaaaggcgagtacgcccgaatcttcgaggaggagtatcagctctacctcaacgaggtgctggatctggatgagacaccgtacatcaagtacctaaaaggcattcctgccgacaagactcacagcggctatttctccatcgacaagaagagcaaacggctggctgaccccacagtcgctgcgcgaggcgagaacgcggggctttccgacgacgtggacgcctacgacctgatcttgaaggacaaggagcggctgctgtcgttcgccgagccggtgcgcttcatcttctcccactcggccctacgtgaaggctgggacaacccgaacgtgttcgtgatctgcgctctcaagcacagtgacaacacgatatcccgtcgtcaggaggtgggacgtggcttgcggctgtctgtcaaccaaagcggcgacaggatggatcacccggctacggtgcacgatgtgaacgtattgactgtggtagccagcgaaagctacaaggactttgtctcggcgctgcagaaggacatcagcgattcgctatcggcccgtccgcgcgtggcagacgaggcctacttcaccggcaaggtgctgaaaactgagaccggcgatgtcgagatcactcctcagctcgccaaacagatttacaagtacctgctcaaacacgattacaccgacgacgctgaccgcatctccagcacgtaccacgaagccaagaaagacggcgcactggctgcgttgcccccagaattggcaccgcacaccgagcaggtcttcaagctcatagacagtgttttcagcgagagccagttgcccgaaattggcgacgaccgcaagcccaagaagaacccgctcaacgccaacttcgagaagcaggagttcaaggagctctggaatcggatcaatcgcaaggcggcatacagcgtcgacttcgactccgacgaactggtgcagaaagcggtcaaaaccctcaacgacaaagacgccgggcttcgtgtaaccccgttgcagtacaccatccagcacggcgagcaggcagctgccgtgacctacgatggaatcaagggcggcaatgcgttcgatttgaaagccacgcagacggaaactaaccgcacctcggtccattcggcggtcaagtacgacctgatcggtaagcttgccgaaggcacccagctgacgcggcgtactgtgaccgagatcctcaaggggctcaacgccgctgtattcgcacagttcaagaccaaccctgagagtttcattgccgaggcgatacgcctgatcaacgagcagaaagccacagtcatcatcgagcacttggcctatgacccggtcgaggacaagttcgatctggacatcttcactgccgggcagaccaaacaggacttcagcaacgcagtcaagacgcccaagcaccacatatacgatttcgtgctgcctgactccggctcgaagccggagcgcgattttgctgaggcgttggaggccagcgctgaagtcgttgtgtacgctaagttgccgcgcggttttctgatcccgacaccggtcggcgattacaacccggactgggctatctcgttcaaggaaggcgcggtaaagcacatctatttcgtcgcagaaacgaaggggtcgatgtcctcgatggatctgcgcgagatagagaaaacgaagattaaatgcgcccgcaaattcttcgacgaaataaatcgtcgttttgcgcaggagaacgtcagatacgatgttgtaaatagtttcggacggttgatggagttggtgaagtaa

SEQ ID NO: 354159 - DNA, 912 bp, Pseudomonas aeruginosa
atgcgcgaatcaacgacaaaaagaaaagattggctgaccgaaggactatctgcggaagacaaagttttcgtgagcggatctgatgcattctcggaaagaataggtgcgactggtcagttaacactgagaatatttggacatcatccactcaatgaaacaccaccatccgatccgacagaacgcaggatgtggttgccctcatattacaaaatcccatttgtagtattgacatgcgaaatggagcgccaggatgctgtggactcttttaacccttatgccgagcggagaatccgagattatctgagcaacgctcttggcctacccacctatcttgttgcctacagcagagacaatctgaatcttgcagaggccttccatatcacctctccgaacaatgtttcagaactacagacgccatcggatttcgcaaatcaaataaatagattgagggccggcaggttggaggatgaacccgaagatcggaaagccatcaacaagtcgcttaatgacgtctttcaaatatttacgagatctcttgtttcttggcagttcagcatcaatgacgtggacgtcctggttacagcaccaggcggagtgatatttttagagctgaagcgtagcagcgtaactccttggcagccctatctagatgatgccgccaattatttacttatgcgatcgctcaccagactcgtgccaaaaggtatcgatttcacacttcgatatgatctagatagacccactgaagttgaagttcatacgatcctcgggatttctcgtgaagtgatcccaggcttcaggaaaaaagtctcagggcccaacgaatcttcagtaataaaggaagtattggcgcttctccgtgatcctgatattcaagcctacgggtctcaaaagagcagagtaaataactga

SEQ ID NO: 354160 - DNA, 891 bp, Pseudomonas aeruginosa
atgcatccattctctataaccatttttgcaacaaccggagaccccgaagggattcgacatctcgacaagtcgaattggtcaggttatggcgttgtctttagcaaggagctttttcacctgttgaagcaagagccgggcttctcgcaagccggtgtctacatcctcgtcggcaacgcggccgaagagacgatctacatcggcgaggcagatcccgtcggtgaccgtctgaagaaccacgtttcgaacaaggaaggttgggtgtggggcgtctacttcttcgaccggaaccacaagatcggaaaaactgaagtccaataccttgagtcggcgctggttgcgcttgccaagaagcatgaccgggccatccttctaaacaagaataacccgacggctccgacgatgtcaccagctgccaaggccacggcccaagctttcctggctgatatgttactgatcctgccgatgctcggcattaacgccttcacgccgcctaagcaggaagacccgagtgatcaggtgcagcctgtagggtccgagaatgacaagttcgacaccatcgtcgtccctgcacgtgaggaaggattcaagcagcgcttcctgaacgagaactgctggtttgccgttcggatcaatgcgaagcacatctcgaagctgaagttcatcgcggcctatcaggtcgctcccgtcgcagcgattacccatattgccgaggtcgaggccatcctgccttacaacgacaccgggaagtacatgatcaagttcaaagggccggcgacggcaattgtcccgatcccgcgaccggagaacagtgaggtcaacatgcagtcgtcgcggtatgcgctacgggaaaagctgctgtcggctaaaaatctggacgaggtctggacgtaa

SEQ ID NO: 354161 - DNA, 600 bp, Pseudomonas aeruginosa
atggataaatcaaagtttactagcatatgcgaatgctgtggagctgaatatattccatggatgaagaaggatggcacaccaggcaagtcaaagcataagctttgctctgtgaagtgccggaatgccacatattcaaaatcggcttataaaaagcttgagcataatcctgttcgtataggtagaacttgtaaaggctgcggaaaagaattcgtagcaaaacaatcaatcaatatttattgctctgcaaaatgccgtgagcgagaatcacgacagcgcaagaaattagctcctgcatcggtggcaatgcgtcgagctcgagatgctaaaagaagagctatcaagcgaaatgtaacggtcgaaagaatagatccaataaagatttttgagcgagatggctgggtgtgccatctatgtggaaggaaaacgttaaaaagcaagcgtgggaccttacacaaaagagcgcctgagttagagcacattgtcgctcttgctgatggtggaactcatacatggggaaatttggcttgtgcctgctcgtcctgcaaccgaagaaaagggccgacgtcgtttggacagctaggactagaaatagctgtataa

SEQ ID NO: 354162 - DNA, 1518 bp, Pseudomonas aeruginosa
atggcaggtcgaaaacgactaactcgtggcgagcgaaatattcagtggatcgaacatcactgctgcatcccggaagggcgcctggtggggaagccggtccggctgaccaagcaccagaagaagtggatcaaacgcatctacgactcgccgacacggatgttcatcctgtcgatggcgaggaagaacgcgaagacggccctatcggcattccttctgcttcttcacttgtgtggcccagaagctcggcctaactcgcagctatacagtgcagcacagtcgcgtgaccaggccgcaatcctgttcgaactggcggccaaagtcgtgcgcatgagccctgacttgtcgcagtacgtgaacatccgtgacacggccaaggaactgctctgcggagaactgggaaccttctacaaggcgctgagtgcggatgccgcgactaagttcggccttagccccgcgttggtgatccatgacgaattgggccaggtggtcgggccgcgctcgcagctatacgaagcacttgaaaccgcttcggccgcacaggacagtccgctgtcgatcatcatcagcacgcaagcgccgaccgatgcagacctgctcagcctgctgattgacgatgcgctgtccggtgccgatccgcgaaacaaggtggaactgtgtactgcctcgctggaccttgaccctttcagcgaagaagccatccgggcggcgaacccgcacttcgatgacttcatgaacaaggatgaagtgttccgccaagcggcggatgccaagcgactgcctagccgcgagccagcctaccgcaacctgatcctaaatcagcgagtggaggcgcgcacgccatttgtcagccgctcggtctggcaagagaacggagctaaccccgacagcctggacggccagcgggtgtacggcggccttgacctgtccagcgtcaatgacctgactggcctggtgctggtgggggatgagggtgacgtggaatcgaccttctggctgccaggcgatggccttgcggagaaggcgcgtaacgacagggttccttatgacctgtgggcgcgcgatggttatctggaaactactccggggcgttccattgagtacgagttcgttgctgagtacctgagaactgtctttgaccgttgtgacgtgcagtgcatcaacttcgaccgctacaacatgcgctttctgaagccttggctagagcgcgtcggcttcaccgaagaagagataagcagattcaaggagttcggacagggctttgtgagcatgtcgccggcgcttcgcgaactggagtcgcggctgctggcgaagaagctgcgccacggcaatcacccggtcctgactatgtgtgctgcaaatgccattaccgtcgccgatccagcgggcaaccggaaattcacgaaatccaaagcaactggtcgaattgacggaatggttgctttggcaatggcggtaagtggtgcagcagctaatgaggttgagcctgaacgaacctatcaaatgttcgtgctcggctga

SEQ ID NO: 354163 - DNA, 294 bp, Pseudomonas aeruginosa
atgacagctgaactccagggcgtcctaatcttcacctcagctttcgcccaggtcttcctcctcgggctgaacagcaagctccttcgtgacgacaagatcgccgccggcttcgtagtgtcctggatgatcacactagcccagttcggctacatctgggccgtcgcgcactcgcgcatcgataccgtccctttcctggtgatctctggcttcggaggttccatcggtatcacctccgcgcagtacttctaccgctggtacgacaagacttttcatcgcaaaggggagagcgcatga

SEQ ID NO: 354164 - DNA, 240 bp, Pseudomonas aeruginosa
atgaaagacggaagtgacttcttttgcttgctcgcattgtgtggagtgattggcggccttgtctggtacaacgctgagccacgcgtctatccccaatcggttgaattcgcaatgacctcatgcgcctccaatggcggatggaagtacatcgaagagggtcgtagtgctggctcttcggtgaaatgcaagaacggcgctgagttctcctacaactgggaagagttggggaaagctaaatga

SEQ ID NO: 354165 - DNA, 507 bp, Pseudomonas aeruginosa
atgagcagagacttcgtgatcgtcatcgaggcggacaacaagcgcgcgctcgctgcttacctgaagggccttgccgatctggaactgatctggccgcagatcattacctatgcgaagtccatcgacgatgctgagagagcgattctcgaagaggaggacgccaagtatcagcgagaaatggccgcatacgatgaggcctatgcgaagttccaggatgacctgaaggcttgggaggatcgcatcggcttttttgctaagcccaagccggtgttttaccaatctccgccttatcccttcatggcaccgcggtatctctgcaacgccgtgaagcattacgagagtgttcgcgccgaacttaggcgcatggccgatgtagctggtgccgctctcggtccatatcggatgactgagcaccaagtagaagagatggtcggctgggaagacgggagccgcatcgagagcatcaaagccaagatcgcaaagtttgagcagcgaggtgcagcatga

SEQ ID NO: 354166 - DNA, 228 bp, Pseudomonas aeruginosa
atgagcctgatggagaacgtgtcacccgtgtacgaggccgaagacggccgccgcgttgaggcaatcgcgcagaccctgatgtccgagctctttcagcgcgagctgaccgaagaagccgccgagcgctccacgctgcgcgccatggcgaacagaggcgagccgcgagcccgccagtgtgtgaacgtggccgccgtgctggtcaactacctgcgcgaagaactggagtaa

SEQ ID NO: 354167 - DNA, 186 bp, Pseudomonas aeruginosa
atgagacagaagatgaccgtgcgcgagtacatcgaactgcgtgttgctgagcttgaaaggttcgcggacgactgggaaaagaaccaatacgataacggcgaagacgattggccgctgcatctcgacactgacgattggattcagcaagaagacgcctacaacgagtgcgccagagagaaggcctga

SEQ ID NO: 354168 - DNA, 270 bp, Pseudomonas aeruginosa
gtgcctgacatgagagaagagtttgaagcttggcatcacgctgagttcggctacgtaatcgcagaggaggacgatccagcacaagacggccagtgcgcagagcgctggaagacatggaaagccagccgcgcggctctgagggtggagctgccggatgctcttgtgccggagaacaacgtctccagcaagctcatcatcggtgcgtacaacgctctgctagagcacgtgaccgaagccctccagcaagccggaatcgaggtggcgccatga

SEQ ID NO: 354169 - DNA, 327 bp, Pseudomonas aeruginosa
atgaacgaccgcgaactactcgaactggcggcgcgggcggcggggtacaaactgagctggtcctatgacaaccactgctgctggataaatgagatgcggcacgacttcgatgtcacttggaacccgcttaccgacgacggcgacgcgctgaggctggctgtgaagctaggcctccttgttgatatatgcagggaccacacttgcgtgtgcagcgaaacggtagatccaatcttacaagttcagggtaaggagagatgggaagcaacccgccgcgccatcgtccgcgccgcagccgagatcggcaagtctatgggaggtgtggagtga

SEQ ID NO: 354170 - DNA, 801 bp, Pseudomonas aeruginosa
atggactccacatcccttctcgaccagctctccgggtactggtcggcgctcgaccaacaccctatcctgcacgccggcctggccttcggcctgctgctggtgggcgccctgatcctcggccgggtggcccgctacatcgtcctctacgccgccaacctgctcgcccgccagcccgcgctgcactggctcggcgacctgatccgcaacaaggtgttccagcgcctggcgcagaccacgccctcgctgctggtgcaattcggcctgccatggatcccggagatgccggacaaggccgcgcacttcctcggcaacctggcactggccttcaccgtgctgttcctgatcctcgccctcaccgcgctgctgaatgccctgctggacatctacgcgcgtaccgagcacgcccgcacccgctcgatcaagggctacgtgcaactggcgaagatcgccgtgttcgtgttcggcgcgatcatcatcgtctcgatcatcatcgaccgctcgccgctcctgctgctgtccggcctcggcgcgatgtcggcggtcctcctgctggtctacaaggacaccctgatgtccttcgtcgccagcgtgcagctcaccagcaacgacatgctgcgagtcggcgactggatcgagatgccgcaggtcggcgccgacggcgacgtggtggacatcaccctgtacaccgtgaaggtgcagaacttcgacaagaccatcgtctcggtgccgacctggcgcctgatgtcggagtcgttcaagaactatcgccagtccagatggaaaccctactatcaaatctga

SEQ ID NO: 354171 - DNA, 1269 bp, Pseudomonas aeruginosa
gtgcagccattgaaggaacaagaaaagacgcagctctggctcgaccagttcgatcagtctaacgaccgtcagttggcggaaattctgctggactcaatcaactactgccctctcaatgaattcaagaacagcctaactaagctgattaaaactgagctcccactcaaacagccttcagcactctttattgaacgcgagcttcagaaaacaaaggcagcactgcctcccccaatttataaggaaaggctaaccttaaagtccgagtctaagtcagtccctaagaggagacacctcagagcccatggttctgcgatgcaggctgttcaatctctgacctacacaacgcaggatgtgggcagcgaaggagtcgtagctttcattggcaatacggtatgtcgttccaacacgaaccgctttttacttcaacccacagcggacaatgtaagaatatcgaaggtacgcaatttcgtgattctgactgatttcatcgggagtgggaaacgggctttcgacatgcttaacgcgatgtggaacgtagcctcaatcagaagctggcattcgtttaaattcgtgaaattctgggtgctcgcttacagcggaactcagcagggcatcactagggttcagaagcaccggttcgctccgaaagtccgggttgtgaccgagtgccctactctcttcaatagtttcgatgaagacctggatgaaatggttgagctctgtgaaacctatggagctcatagttcgaacccgctgggttgggaaaacaccgcagccctgctgacctttgagcatggtgcgcccaataacatgccggccattttcgtatcagaaaagaacacgggcaataaaaggtgggctccactttttcccaaacgcgtaactgaaaacctttggcactcgaccgaaatcgacttgggtcgcatcacccggaacgcattggaggccctgcagctcagcgagatatccaggtcacgccggttccggaatgcaagcgatgagaccagatcagcaatgatcgtgctgctcgcctactcccaggggaaacgacgaattgctgagcttcgacgcgttctgccgctatcactcgactcgctcctcagcgccaaatatcttgctcagaaacgaggttggctaaccgacacaggggcgctgactgcagcagggcaaaagactatccgtaccctgcgccgcgaagggcggaaactttttatagccgactatcccttcgcttcgtattatccgcagcagctgagggctccgcagtag

SEQ ID NO: 354172 - DNA, 1167 bp, Pseudomonas aeruginosa
atgaatcgctggagccctcagctctatctcaaagcaggccgccaggaaggcgtgcctgagacgactctgcagaatgctgtcaaaacagcgaagcagatgaagcacggctgcccgccgatcttcagcctgaatcacctctctcatctgactggcaccacgtacacgtttttgcatgaaacggtcagccgggataatgaggaagaggcgtacaaggtcttcagactcagaaagccaaatgtgggccatagcccagatcggttcaggtggatatgcgcaccgacagaagatctactgagggtgcaacggtggatcaatgcccacattctgtccaagatcgagccccacgaggccagctacgcctatgacaatcgccatggcgtacttgaggcagcagagctgcactgcgaggcgcgctggctgatcaagctcgacctgaccaactttttcgaatcgatcctagagccgcgcgtctatgagcttttcaggtcattcggttaccagccattggtggcattcgagcttgccagactttgcactcgcttgagaacaagcggcaatcctgatcaacgatacaagaacaagacgcctccccaaggacttccttataccggcgactctcgcattggccacctaccccaaggtgccgcctcgtcccctaggatcgcgaacctggtgatgcaatcactggatgagaatctgcaggcctacgcgacggagaacgatctggcctactcgcgctatgcggacgatttggtgttttcttcaaaaggggcatttgatcggtcagaggccacccagcacatcaaatcgatcaacaactgcctgcttgatgaagggttttggctcaacaaggccaagaccaagatcgttacgccaggcactcgcaagatcgtgttgggcctgttggttgacgggaagaagccccgacttccgaaatcgtacaagaagtacgtcagcgatcacctttactacctgtcccaccctacgattgatgccaaggcccatgcggagagtcggggttttcagtctgtccaggggctgatcaaccatgtcagtggaaaaatcgcctacggcttcagcattgagccagtttggggtaaggagcaaggcgaccgcctcagacgagtttgcagggagcttgacctcgaccacgtgatctttccctag

SEQ ID NO: 354173 - DNA, 2808 bp, Pseudomonas aeruginosa
ttgagtagttaccaaggaatgcggtggttcaaggctgactttcaagtacagacccctgaggacagcaaaaattgggacgatgtggagctccgtttgggcaatcccagacgtcccaaggttgatggcgtgccctcgtcggcgggtatccaagagaaagcccaggtattcctgcggcggtgccatgagcttgaattgcagatcattggcctgaccgatcacaacttttcagagcaaactgatcccgaggattggttcttaacccacttgctcaggcagaataagtccgttgccaaagccctcggcaaagatccgatcgctttttttccaggctttgaagtggacatcggttaccacgttctttgcctgttcgagaccacgagcagcgtcgaggatttggtaagggctaacggtgtgctcaccaagctcgggctgccgtcgcacgagcgctttgatcgaggcgagcctttgcctctccggcatcggggtgggactgtcagccttgctgagctgatcgacattgttcagaaagagtatggtgggttggtgattcctgcgcatgctgatcaaaacgacggtttgtttgccgacgcagccaacaggctcgattaccaacaccccgacctcttggccgttgaggtcacccagtatcctcttaatgcaaagacctcaggtatcttgggcggtaaaaacccccattggtcgcgaccaggtcagcagccagcttacgtacgatcctcggatgccaagtctctcaagacggatgagcaaggggagccgaaagccaattcacttggctatcgccacacctggctgaaatgttcgaaaccgtctatcgaggcgctgaagcaggcattttttgatcccctttccaggatttgtcttgacgacactaggccaagtgattttgagcgacatccaagaattggctctataagcatctccaatacccgatacctggaagaccagaggatctgtttctctcccaatctgaatactgtgatcggagcgcggggttcaggtaagtccaccatccttgaactgctccggatgatgtttgcgcgcgcgcagggcgaatctctttcggagaagacggtagcgaaagccagtcgcgcccagcagacactacttgaaaacgcggaaattcaagtcgagtgggagggcgttccagggcaagtggatgtcttgtcgtactcgcccggaaaaggtgtgtctctgatccaagggcaagcccatgatctcgcgacctacctgcggcagatcccagtacagttctacagccagcagcagttgagtgacctcacggcgccggacggtcagccacagttgctgcgaatgcttgatgaagcctgcatcgatgatttgaataagctggcgggtgaagagcgtatcttgatcgcggagatcaagcggctcttcgctgctcgggatcaagctaaggcgatcaccgatcagatcgtctccctgactcaggagttgggtgagcttgagcgtcaatggcaggcgcgcaaggacgtccaggaagaggccgccgcctatcagcaagcccagcgagcaaagcgctttctccaggagaaacgtgatcgggtggatggcgatatcgggatccttcgatcttctcttgatgccctggacgccgtggaaggtaactcaaccgttgtcgccgatgtctggccccatgccgaatggattacagggcatgcgagagaggcggacgcgctacggcagcgtttcaaggagaagctttcggcggtgctgaatgagatgctcgcagagacagagacgctgtttggtcaaaatgttgagcggcatgaggtgatccagactctcgatgccgcgcgcacggcattcgtaaaggcgtgtgatgaaaagggaattcagccgcaggatgttagccgccttcaagagcttgaccgtagcaagcaggccaagcagtcagcgttggatgaaaagaaccgcgagtgcaatgccttgaatggtacagaggtttctctggagcagtcattggcccggttgttctccttgtgggcagaacagactgcgtgtcgcacggcagcggcttctgagcttactcaaaagaccggtggggccataagggtttcgataaggcctatggcttatcgggagcattttgagaagctttggatgaccattgagcctgatagacgcactcgtataggtagagaatggtggccgataggccaggcgctgctgaacagcttttccgaagctgcagagaggcatccttcgccttgggagcacatcgagtttgtattggctcagccagagaaggggccagaggtcttgcgacaattccaaggtgaaattggggactacctcttcaagcaaaccgacacctggcgggattttcgtttgagtcgcattcctgatgtcgtcgacatcgagctttaccgtgctgaccagaccttggtcggtaacttggaaggcggacagctttcggagggccagcgaaacaccgctattcttcacatgttgttggtgaagggggatggcccgatcgtgattgatcagcctgaagatgaggtcgatgcgagctttatttacaaagagcttgtccctcttttgcgccaagctaagcaaacgcgccaagtgatcctcgcaacccacaatgcgaatctccctgttaacgctgacgctgaactcgtggttgcgcttgaatcgcgccaagggaaagggtgtgttcttgcgcagggaggtctcgacaaaaaggacgcatcgcatgcggtgcttgagatcatggaagggtctgaggaggcgttccgccgcaggcgccagaaataccattactga

SEQ ID NO: 354174 - DNA, 1257 bp, Pseudomonas aeruginosa
atgcttaacaacatccgattcgatctatccgactacctcattcacttcttccgagacgtggatcagagcggctccgaacccatcctcttcccggagcatccccggttcaacaacattgcagaagccactgtgctggattcgctgttcctgatgcgctgcgcgctccggcacaacaagatctttgcaacctggtcgtttcgaaacgagaggccgaccatctacggcaggtcgccagcagtctgcttcacagacatgcccctggcggctttcgtccagtccagcaacgagcgcttggcccgaggcgagaatgtaggccgttacgccttcatgattccgaaggacaagatgttcagcgtaggcgctaggcctgtgatctatggcttaagccaaccggtctgggagcgcagagacgccgatccgtacagagtccttgaaaacgacgtgctgcccatcggtgagcaatatcgatatgtcgcgtacagcatcggtgatgaaagaactattgactggacgcatgagcgagagtggcggtggcgctaccaaggtgaagagtcgcatttcgagccaaatggggaggacttagtcgagaccctggcagagatgcccgggttaagtcttggaggctcggatatccatggaatgggggtactggttcaggatcaggaagatgtaccaaaaattgtctatgacatcctaaccttggtggacgctgggatcatcgatcagtcgatgattcgctttgtgatccccctatgcaaggtggagcagcatggaaacattcaggatccgagccgagtttccgagctgatcaacgagcacaccatcgacctctcgggctacttctctatcactgaggagcgggtcgaagaaatcaataacgaagtagatagcataattaggatcattaccacctcggggggtcatgagccaggtgatcgagatgacggctacgggaagtcctgggtctggattccggacaacggttcggaactggtcagagctctgcttgccgcagaccgcctaatcgtcagcactgaaggccgctaccttcttgatatcgcttcctttgagtcactccctgtaggcttcgaggagcattactgcaagagggttgccatgggcttggcaactgaatttgaggtcaatgtcacccacttcactgtccggaacagccaaagctgcgacggcgtcccctactacacggattttcacgacacagatcatcctttctacaactgcaccaaagggtgttattag

SEQ ID NO: 354175 - DNA, 678 bp, Pseudomonas aeruginosa
atgaaaatgccgcagcgtttgagtattgttggtgagcttgaaatggcggatcattattatttaacccctcaggataaatgttatttttggggggaatatacaccttatgagcatacaggtggtcagggttggaacttttctccaacgaatcaacttatttctaatctaaaaaagaaaatggataagaaaggggctccgggatgggggtataagcaaaaggcaattgaggttgtggggcgaagttttagcgagttctggaggtgggggaaattaattgagcttaagacggttcttgttcctattcctccgtctaagcttcgttctgatccgttgtatgatccaaggatgctgcaagttcttaatgttattaatggggctgttggtggagggttggatataagggactgtttgatttttaaagaagatcttggtgcaagtcatgaattaatggatcgtccctctcctgatgagctatataataaccttgagtttgatgacggtgcaggtcggtgtgatgatgtaccaggcgtggtttttttatttgatgatatgcttaccacgggggctcattatgtcgcatgcgcaagaaaattgaaggaagtttttccaagagtagatgtggttggaaattttgtgagtcgccgaagatttcccagttttgatggtgatgagttttaa

SEQ ID NO: 354176 - DNA, 885 bp, Pseudomonas aeruginosa
atgggatcttggcctgattttttgtcagataaagctgttgacgcaatgactgagattggcgcgtacgaatatctatggcagcagccaagctcaagtactaagaagcttgcggagctttttacctctaatccggggcgtcttccttctgagttagtggataaagaaattgctgagaaagtagcaaaagaagttaaagctgaactgtcgaagcgtggagtgacgaagttcggtgttcgtgtgtttggagtgcatgattatccggcacggttgagagatgctactgaacctgtagaaatactttattttatggggtcgtgggatttggtcgatgctccacggcgagttgctgttgtaggaactcgaaaggtttctccagcaggtattgcgcggactcgtcgtttagttagagagcttgttgaaaaagactttacgattgtctctggtttggctgctggggtcgatactgttgctcatgaaactgcgatagcggagggggggagaactatagcggtaataggtactcctatatcggagttctatccaaaggaaaactccgaactccaacggaaaattgcaactgattatttgcttgttagtcaggttccagtgttgaggtataaaaatcagagtcctcggtggaatagacttttctttcctgaaagaaacaaaactatgtcggcattgactgaggcaactattattgttgaggcgggtgagacttcaggtactttaattcaagctaaagcagctttagaacagggtagaaaagtatttattcttgaaagtaatttcaataatccctctattacttggccagaaaggcttgaaagttttggagcaatacgtgtgagggagacatctgatattttggaggctctctcatga

SEQ ID NO: 354177 - DNA, 957 bp, Pseudomonas aeruginosa
atgtctgatggttatattggatacatcaagtataagggggagttggttgctgatggggtgatggatgctagaaagcaagcacaggcccttttagggttggactcagctttgcgttattttgtagggaagtttgctcctgacttcaaagatgtggactacgaaataccggttaaggttaataaagggtcttgggaagctttaataccagagacgattggcggttgggttcaggcagggttgggggtggttgccactgcatatttttcacaagctgcacagaaaatggctgagaaagattttaaggactttgggtttagtgatgtttttcggaagtctattcagggagttaagtggtttgttaagatatctaagcacttgggaagtgcaacggtaaaaaagtttaataatgtgatgttttcgaaagatggaaaaagcgtagggattcctaacgatgatggagattttttatttgttccgaaggaaatgctggaattatacgtttctgcgagtcctttgctgatagagaaattagctgaaaatgtcgtttctggacgtgaactttatataggtactatatatcgtggtgtgagggatgaggtcgtcgttgatttaagggataagagtattttttgcaaggcggaggaagaggacgttgatgatattctttttcctgaattggttcatggggagtcggttgtccttgagggagaggttactagagagaataagacgactaactccatggggttcaagtataaagagcatatattgagttcctatccccagtctggaagtatagttccttataagcaactgctttttttgcgttgtcgtatatatgctgtggttagtagaatggatgaggatggtcgccctgtagcgagaaagccgaagctctatttttcacggattgagcctttatatgatgaacaacaagagaaagatctctttggttga

SEQ ID NO: 354178 - DNA, 195 bp, Pseudomonas aeruginosa
atggcttggtatcgtgacaacgagaacgttcaaagaactggcgataagtccaaagaaaaatacgcaaaaatttggaagcctgggcagaagcccgatttcccaggtatctacaagtgccaggtgtgtacctatgaggacgtcatcaaccgggagtgctcctccctgctcccatgcagtaactgcaaacccgaatag

SEQ ID NO: 354179 - DNA, 1248 bp, Pseudomonas aeruginosa
atggcttctagtgctcatcaagagcaggtttgttacacatgtgtgcacgatgcttacctgggccgccagatcaagcgtactggcacctccaccatctgcaccctgtgcagcgccactaagaaatgcatccccttatccagcgtcgtagcacgggtcgaggggatccttgatgcctacgtcattgagggcgagtactttcgtcgctttgctgattggggcgacagtcaagaaggggacagcctcgatacttgggtcagcgcgatcttcaactgtgacaacgtcgagccgatcgtggaggccgtgtgcgatcgcttggaaagctacagcctggacaccaactactccaagcggatttacaggctgggcgacatcggccaccagtggttcgaattccaggaagggatgaagcacgggcagcggttcttcaacaacagcgccaagacgttcttggactggatcttcaaagatctgtacaagtactcggcttcctccgatgaagaggcagttgtgcgcttgctcaccccggaggacgccccacctatctaccgggctcgcacctgtatgacctcaacggacattaacgggattaaggccaatccggggcgcaatctgggtgctccaccgaaggagagggctggggatggaaggatgaatcctgcgggcgtcccggcgttctatggcgcatttgagcgcgaaacgtgcattgccgaattgcgcccccctgtcggtggcaccgtcgttagcggcgagttcaggttgaacaggatggtgagggttttggatttcgggcggttcgagacggcagatcttggcccaccgccgagcttcttcgatccgaagcatcacgagaagactggacgccaggagcttctgaaatacctgcacaatgagatcactgtgccggtactgccaggggctgagcgggactatctgaccacgcaggtcatcgctgaatacctggcaacgcattgcaagccccggattgatggtgtgatcttcaagtcggtgcagcagagcgcgggtagtaatatcgtcctgttctcacacgtggcctgtcccattaagccttcaccgggttggctgcaagacaattatgctatcaatgcgaatcaggtttttcaggggccatgtgttgagtacgtcacgggcagcctcgttgagcacgctatttgtgaggtgaagtacaaagtagctgatgaacctctgagggagggaaaaccgactttcgtagtggagtccgacttctga

SEQ ID NO: 354180 - DNA, 327 bp, Pseudomonas aeruginosa
atgaaatttcttcagaacaacccgttcacgggctatcgcgacaatctcatcctgaccgctctggtggagatcgaccacttgaagcgcctcagctcatcatcgatgagcctctccaaagccctctcccccttcaaggagccagagggctttctggatctcgtcaatcagttcgcctatcacgcgatcagtcgccaggtaccggaggttttcgccgagtcggtagaggaagagctgcaagacattcccatcagcgctgacgaaattgaagaaattctcaaaagaccaataggctcggctttacagatgctggtgagccaacacgcgtag

SEQ ID NO: 354181 - DNA, 849 bp, Pseudomonas aeruginosa
ttgaacgtattcagcacacttcgaaacccgaccttcgcgtataccctgacgcagaagatttataacgacaaaacacgcagatctgcgccttacgttgttaatgacggaaagaagattcactcgtacgcgctgtgccccgcctgtcaaaatcctgtaaccctagttaacaggaatgtccccactaccgactcccagattttgtacgcaaaacacactggaagctctgtgccagggttggcggatcacaatcaaaccgcgtatgaagattgtccgctgcacaatcctgagaggtttgatagcaaaagtattcggaaaagtaattcccggaatgatgagatattagatgctttacgcaatcatttgcacttggtagtgaatgtccttgaaagagagacggggatgaaattcacagacgaactaatttctggcttgctcgacgattttaagtccaatcaaggtcacatttaccgctctgtgacgttgtataatttgccgtttggttttgcgtacatgaccgagggaagagatatctggggttgcgaagttgataacgtaactgcagatgctatcaatcgtaattctatcggttttgaagttgatggcttcatgaaggtgcggcgtaggaaggatgtcaaggcaaggaagattcatctgtacttcaataatcatcgagtaggcaatgaagattgcggcagtgatgtcgttgattttgtaattgcagatattgatactgcagccaatacctccaaagtgctttataaaaagtctttgggttttgactctggcttcttcttcaatacctacaagcgacgtgagcgcctacgcgtgttggctcaccagcatctgtaa

SEQ ID NO: 354182 - DNA, 1038 bp, Pseudomonas aeruginosa
  misc_feature (508)..(517): n is a, c, g, or t
atgagcgaacgccaatgcaccatagaaaagcttcttgggataataaaggactatcgaagcgggcaaattaagaatattgaccaagagcatattgagcgctggataagccagttcacacctgagcatcagacagaaatcctgaaagaaacgacaaacatccttgagaaaatgtatttctcgaaagagaagatctcaagcaacttcgccagtcttattaacaaccaagagctcaccaaaggaaatccaagagccttctggggttcagcatctctactcgacatccaaggaggcggaaatagccagcgcgaattagttcaactattctcggatctattgcgagactctttaggcatagaagccaatatcaacagcccaaactccagtgagtacttttatctagacgatgcaatttatactggaaatagattgcgtcacgaccttgaaaactggattgaagcctcagctccagcgaagtgcacagtacgaattgccacaatagcattacatnnnnnnnnnncattacatagagggggctactactttgtacgcgacaaattaaaggagaaaatccaagcatgcggcaaacaagtagaaatccagtggctaagagtatttgaagtagaagacagaaaaacatacatatttaactccgatgtactgcgaccaacatctgcgccagcaataccggaagtcaccgcatatattcaaaacatgcgatatgcgccgatcatgagaactccaggggggagtggagagctaaaaatattctcatccgaacaggccagaaacctcattgagcaagaatttctcacgaaaggcgtactcattcgagagcgctgcccaaatctaggaattagacaacgccctcttggaaatagcgttcttgagactctaggatttggagcaacatttgtttcataccgaaactgcccaaacaatgcaccactggttttttgggtaggtgacccatggtatccgttatttcccaggttcaccaatacggattcagccatacaacgcctatttgaagcactataa

SEQ ID NO: 354183 - DNA, 621 bp, Pseudomonas aeruginosa
atgcgaaagatccctaaccgccagtatctacgaagcagtagtgtagttttcctaaaaaccaaggagagctttggcggtctatcgaatatggctggcggttttccaattcatgtaaatggcgtacgaatatccacctctgaagcgctataccaagcgtgtaggtacccacaccttccggatattcaaagaattatcatagggcaagctagccctatgacagccaaaatgcgttcgaagccatatagagagaaaactcgcgaagattggctccaagttcgtgtaagaattatgcggtggtgtctgaaagcaaagctctaccagaactggcaatcgttctctgagctactcctgaaaaccgacaacctccctattgtggaagagtctcaaaaagacacattttggggagcaaaaccagtggatgcagagacactatttggtgcaaacgtcttgggtaggcttttaatggagctacgggaggaaatcaaaaaaaacaaaatccctgaagacgatcacctgccacctttaaatattcccaatttttctctagacggaaatcctatacaagcaataaaactatcgcgggaacgaaacttaccagtagcaaaggaccttttcgagtaa

SEQ ID NO: 354184 - DNA, 1047 bp, Pseudomonas aeruginosa
atgaagacccaggaagaaattttcgagatcgtaagaacagcacgccaacggatgaaggagctgccatccagaaggctaatcaagtcgaccgatgatggttatgtgcgcgaatacaaccgcatggttggcgatgagggggctaatccagagaagctatggtcagcgatctgcgcgactcaaagtaagtccacatatcggagaagagtggccgcaacagtacactgttgtcgcgttcagcttcaggaagcattgcggagccaagatgcggcccagcgtgcgggtgatatgagcgccctcagataccaagtggcagtgatcgaagaggtaatcggaatcctgaatgtcattgaagggcacaagggaagatgccctctccaaagtacagtaaggcggaagtcaaaaagatccgacttgaaatatctacctggcaattggcgggatcaattgcataaacaacttgagggaagcaagtacgaattggcatatctggtagaagcagtgtcgggatgccggccaggtgagatcgagaaaggtgtcaaagtgatttgttccaaagataagggactgttgacggtccggatcgataacggggtcaaggttactggccagaaagggcagccctggcgcgagatcacctatcgagtcgatcagagcccgttggttagggctctctttgaggtttgcagaaatgtttcgccgggtgcggagaggatcgagacagttgtcgacatcgagaaaactaccaactggcgtgcagcactgtcgtcggccggacagaagctatggccgagactgaaattcaggatctgcccctatcacctccgaaatgccgcagctagcgactggaagcgggtcgggctgagtgaagaggatatctcagccgcattaggccactgcgtaaacaagacctccagcaactatggtcagtttcagatcgggcagggagccggcggtttgagtcctgttgaggtaagagctgcacgtccggtcttgaatactcggactctatctccccacttgggccggccctccctgagccctaaatga

SEQ ID NO: 354185 - DNA, 270 bp, Pseudomonas aeruginosa
atgaacgcgctggtcgggcaggaagccaaggccaacttctctctgttgtggctcatccgcgacgagggtccggacgatggcggccgcaaggatggcggcgatttcgccagcacgggcgctggcgctcatctccgagggagatgcgagttcgaggttcttcatgacggctccgaggaattgcaaccgtcagggatagtgagcctgatcttccgaagcggatggcaacgcagggtaatcgtgcccgccagccatgaattcattgcgcgttaa

SEQ ID NO: 354186 - DNA, 813 bp, Pseudomonas aeruginosa
atggcggtactgactctcgactaccggtgctgcgaccggaagcgccccctgtacatcaagcacattgaggtcgaacgcatcgccgcgactgcgcgccagcaactggtcgcggacagcatcgatgctgtttctttcgacgcgctgcggcagatctccggcctgaagatcaacggcatcgacttcgcgctggaggtcagcaccgactacgccgtgcatgacgagcaaggcaatcacgtcttcggcgtctgtgaattcgaccccgctatgcccgacgccgcgatggtgtccatctcgcccgtgggtgaaagtctcagcaaactgctggccctcagcaccttggcccacgagctgggccacgccgtgttcgacgcccccggctgggttgtccagggcagtaagggccccgggttgttcgatgacatcgaaccgacgatgcaacgcgcctaccgcaccacgacgccggacagcgaccatctgtccaagtcactatcggcgaagccaacgacggaagaacacttcgccgagctgcgcgccaacgagttcatggggtccttgctggtgcctcgccaacgcatcatcgccgccgtcgaagagcttgcgccccaacacgacatcaccatccatcgccatccttcaaccgatcccgaccaccccggcactgccctgcgcatcaaggcgaacggcgacctgggagtcttggagatggatcgcttcgagaaagccttggcgacacgcttcggtgtcaatccacggttcatccaagtacgtctgaaccgatatggcctgaccactcaggaggccacgatgcgctga

SEQ ID NO: 354187 - DNA, 1425 bp, Pseudomonas aeruginosa
atgtcagctgaccaagcctcaacaacagagaaaagcaccgaggtggcgacgagccagcctgcgcctaaacgtgcgcgtgagcatcgctccgataacggcgcaaaaatcctaccgaacgcagagaacttcgtcagcctcgtgcgcaaggttgcgcgccccgggctcctggtggatctgctcgaacgcaccagcgcgacggcattgccggagctgagggcattggcggaagcggccaagggcaagttgccaatcgagtcgcggcaggcgttctttcatgcagtcggcaaattggcagcgaccgcccagtacagcatcgagtgtgccgccgagcgagtgatgctcctcgacgatgactacggggcacaggccgtcctctccgtgttgaacgaagagcgtgccgacgatgccgccgtgctggcaacgcccagcgaccgctacagccgcgcgttgtacctgcacctcttgcaggacttcccggcgcaaggcgctcgccgcgaagaacgcttcgaccaggcagagcatctgcaagtgatgcatcgccagtggaaaagcgaccactactccagccactacctgggccccaagggcgtcgtgccgaagactgggtccgacgttcaggaggtgttgcgcacacgcattgccgaactgttcccgaaggtgccgaaggatcaaatcctgatcgagcaattcacgcgccgcgatctttcatgcgaacagggtgatgacgatgattgcgaagcaggtcagtcggcgctgttgcacacgctgacggcgaccttcaatggcaagaccgcgacgttccagcaagtgacgaatgggcatgtcgtcgaccacgaggaacccgccgcgatgtcggcacgcttctcgtgggagccggagactggctcactcagcgtgttctgcgaagaacgggaggcgcgccgcgagcttgccaccgtcttccgagatgttgccctggcgcatgacggcaagattgaggatatgcccatgcggcagttcgacctgctcggctttgcgacgtccaagatgctcgaccgcctgaaacgtgaccgggtcgcagggatcgacgacatctcgatcctgcagatcacggtggccaagccgttcgagcagacatcagagtacggcggacgtgatgtggtgcggcaactctccagcaagatgcaaatcacccgcgaccggcgcgacggccgcaacatctatcaggttgcttacgaggactactgcgccgaagacctgagccaatacgcacttgtgcaggtgaagctggtcatgaagatgtccaagacgcaacaccgcaaggcgcacaacgtcgcggtccagatcaccgcgccgaatgggctgaacgacaagagtaggacggatgacgaccgcaagcgcgtgcaggaacagctcatcaagatcggcgtactgagccagttctga

SEQ ID NO: 354188 - DNA, 939 bp, Pseudomonas aeruginosa
atgaagtcgccgcatctgagcttcttcctcgcgctggacaaccttccacggctcgacgcatcagtgctggccgataggctcgggcgcgactaccagcagtttcttcagcggcgctggatcgtgcccgcaggccatctcacccatgtgatggtgccgtttctcgattccgagcaggaggtcgaagtcgagatcaacgaagaagttggtcgctacacctaccgaagcccgcaaaacggcagaaccgtcgtacaaccgctggccgacatcgcggtgtattccatcctgatggatgtgtggttggcagatttggcgacgctgatcggcatcgaggatcgcaaacgctccagcaatctctgccgcacccccggccacctttggtatctcggcgatgtgcgcatcggcggaacgcacgacttcgcaccggtgttcgccggacgcgcgtggtcgggtgcgccgcaggacaagactgccgctgtccttgccgacgctgtatggcctcgtggcggcatcattctctgtccccggcgactcgatgcctcacttcctcgtgaccacgcccttcgcggcctcgacgagttcgtgcgcgtggccgatggcgcagatgcgttcgacaccgatgcctttgatcgtgtcctgcgcggctacgcaaccaacgcgggtgagccggagccggtgcagttcttcaatggcaagcggctcaagctcccgcacatggcgtcgtccatcgaactcactgaagcgcgcgccaagatcatcaagctgatgtgggggaccgaaggaaatgccccgcccgtgatgtcgtggaaagaagtgaatggtgccgtcaccgtcaacaccggcttccaatccttcgacgatgccttcggcgacaaggttgcgcgtgaggaggtgattgagctggtttcgcgcgggaaataccgggtgaggcgcaacacataa

SEQ ID NO: 354189 - DNA, 258 bp, Pseudomonas aeruginosa
atgcaaacccacttcaccaacgcaacatctggcccgatcacggccaaaaccggtgcgccacagcgcatcgcccttgacgaaaacgagctggccatccgctgggggctttccgtcaagaccctgcgccgctggcggcaggaacagctcggcccggtcttctgcaagctcggtgcccgcgtcacctacctgatctccgaggtcgaagccttcgagcgtcgcgtttcgcggcactcgaccttcactcgtgcataccagtga

SEQ ID NO: 354190 - DNA, 483 bp, Pseudomonas aeruginosa
atgagcgatctgaccatctttcccgccgacctcgctgccatgagcaccgcccagttggtggcgctgccgatcaccgatttcgtcgctgccgagcgcaatgtcgacgaggccacggcttacctcaagcagctgcgtgccaagctggatgccgccaagctccagcgctacggcgagcaggcccgtagcgcgctgcgggattccggccgcgactttggaaccgcccacgtcagcgacggtgcgctgcacgtgaagtacgagctccccaaaaaggtgacctggagccagaccatcctcaaggagatggccgagcgtattgccacctcgggcgacaaggtcgaggactacatcgacgtcaagttgtcggtgtccgagtcccgctacaacaactggcccacggcgctgcaggagcagttttcggctgcgcgcacggtcgaagaaggcaagccgactatcaccctgacgctcgatgggggtgccgcatga

SEQ ID NO: 354191 - DNA, 855 bp, Pseudomonas aeruginosa
atgaacgcatccatgctcactgccagccactacggggtcgtgcatttcggcgatctcgactgcgaggcggtcgttctcaccacaggcgagcgcggctacgtccgcaaggaactggccaagctcctcggttttcacgaatcgcacaagggtggccgtttcgcccgttttctggctgacattgcacctaactcattgtctctattggagaaatcatccgggccgattttgctgccatcgggacgccagacccagttcttccctgcaggcatcatcgcggacgtggctacttccgtggtggacgcggccatcgccgggacgctgcaccgcgctcgccagggcatcgtcggcaactgcctgacgatcatgcgggcgctggccaccactggcgaggtcgcgctgatcgacgaggccactggataccagcaccaccgcgcaccggacgcgctgcaggagctgatctcgaagctgctgcgccagtcctgcgcatcgtgggagcgccgcttccacccggactactaccgcgccatctatcggttgttcggctggaagtaccagggccacgaccagaaccctccgcatgtcgtcggccagatcacgctgcgctgggtctacgggcccgtgctgccagaggacttgctgggcgagatccgcaatcgcaagggcatctcgcagaagcaccaccagtggctgtccgatcagggactcgcgcatttggaatcgcagattcacgcagtcacggcgattgcgcgcagctcgatgagctatcccgacttcaagcgccgctgtgaggccgcctttgctggcgctgccctgcagttgggcctgctgctcgatgaactcgaggagggggcgtga

SEQ ID NO: 354192 - DNA, 246 bp, Pseudomonas aeruginosa
atgagcaacgacaagcaattcatcggagatgtcgagccaatgatcgacgccaagcaggccgctgccgcactgcgcctgccgtactactggttcgcagacccgcagatgcgcagcaagtacaagattccccactacctgatgggcggtctggtgcgctatcggccatccgaactgtctgcgtgggcagcccgcagcaccgtcgcgcaagggcgcaacggtgacgccgatggtgaggaggccgaatga

SEQ ID NO: 354193 - DNA, 417 bp, Pseudomonas aeruginosa
atggctgagtggacgattgaggatgtggcggcccgcttcgaggaggccgccagcaccggacgacgcctgccccctgtgcgtgtgcagggctacttcaacacatggcctgccatcgtgcgcaaggagtgggagacgttcgcagccgacgagcacgtctatcgaccgttcccacccgcacccgacgccatcgaccggatgctggagacgatgacgtgggtgcaatggctggagatcgagcagcgccaccttgtgtggatgcgcgccaagcgcttcggctggcgcgacatcacgatccgctttgcctgcgaccgcacgacagcatggcgtcgctggcagcgggcgctggagatcgtggccgagaagctcaacagcgatggcatccgtgtgccgtccaaaatcgtaggccaagcagggtaa

SEQ ID NO: 354194 - DNA, 420 bp, Pseudomonas aeruginosa
atgccgaatgatcccaaatatttcgtttcggagccggagggagactatgagtatgactcgttgtctaattattatgggccgcgcaattacttggatctgttcggccgcgactgggcaatcgacgacaacccacagtttgacgtcaacgtcggaacagtagacttccacgttgtcgtctcaaaccgagagactggttttcgtggttgcctaaaagtcaacgccatgtatgtgtcgggccacaaaatctcccttagtttcccgaatttcttggacttagaggagagcgcctgggaacatcgcaagaaatgggagaagtcggtgggcttgcgtgacccaaatgaacaagaccttcctcacaggaactacttccggagaatgatgctagaagagatgagggagatcgacgaaatgggggagtag

SEQ ID NO: 354195 - DNA, 585 bp, Pseudomonas aeruginosa
atgaccaccaccaacctgaccccggcccagcacgccatcctggccaaggccatcaacaccagcgacggcaagatcgactggttccccgacaacatcaaaggcggcgcgcgcaagaaggtgctcgacgggatgttcaaccgcgccctgatcaccaccgacggcaccgactggtttgtcgccgccgagggctacgacgccctgggcatgtcgcgccccggagtgaacaagaaggacatcggtcaattcgaagccaatctcgaccagatcatcgccaacgctgaaagcgcgccagccgccaccagcgatcccgaactggaagccgccgtaaccgccgccgaagcaacgtgggtcaagccgcgcacccgcgacaacagcaagcaagccgaagtgatccggatgctgcaacgccccgagggcgcgacggtccgccagatctgcgaagccaccggctggcaggcgcacacggtgcgcggcaccttcgccggcgccttcaagaagaagctcggtctgagcatcgtctccgagaaggcctgcggtggtgcgcgggtttaccgactgaaggaagccgccatgccgggagcctga

SEQ ID NO: 354196 - DNA, 207 bp, Pseudomonas aeruginosa
atgagccagatcgacaccatcctcaccctgatcgcccagaagcatctcggcatcgaaaccctgcaaacccgcaacgccgacagcctcgactttcacgacacggcggtgtggtgcctcaaggacgcgctggaagcggccttcaaggcgggtgtcgaatttggcgcatcgagcacgaaggccacggaagcggagatcgccaaagactga

SEQ ID NO: 354197 - DNA, 567 bp, Pseudomonas aeruginosa
atgggactctcgattcgcgcctacgcgcgccaccgtggcgtgtcgcacgtggccgtgaagaaggccatcgacaccgggcggatcaccgcactgcctgacggcacgattgatccggatgcggcggacgcccagtgggcacaaaacacattgcagccgcgccgcgccgctgcgcaggagaaggtcagcaccacaaaggcgcgacccgcgaccgcgaccgccgaagcaacaccgcagcgcgatgtcgccgacaccagcacagcaccgatatcggcaggcgggacctcgctcttgcaggcgcgcacggtcaacgaggtgctcaaggccaagctcaacaacctggagctggcacaccgcaagaaggaactggtggatcgggcgcaggccgtggcgcacgtcttcaagctcgcccgcatcgagcgcgacgcgtggttgaactggcctgcgcgcgtctccggccagatggcgtccacgctcggcatcgacgcgcaccagatgcacgtggccctggaagctgccgtgcgcgagcacctgatcgaactgggcgaactgcgcccgcgcgtggattga

SEQ ID NO: 354198 - DNA, 207 bp, Pseudomonas aeruginosa
gtgagttacaccaccacccaactcgatgcgctgaaacgtgccctcgccaccggcgagcggcgcgtgagcttcggcgacaagacggtcgagtaccgcagcatcgaagaactgcaggccgccatacgcacggtcgaggccgagatcgcgcgcaacgccggtgcgagcccgaagcgccagatccgcgtcacgacagcgaagggcttctga

SEQ ID NO: 354199 - DNA, 1143 bp, Pseudomonas aeruginosa
atggcttacgttaccggtgcgtcggcgaacatcaacacgctgctgaccgccatcaagaatttcgcggtcgccaacggctggacggccaatgccaccgacacattcacgctgacgtttccgacctactcgtcgaatggcaacgcgacccacgccggcacgatgtcgatgatttcctcggtgagcagctccgatgcgtacaggaaccagtcggaaacgagcctcgtcgcgaaccgggtcgtgctgaccaagaacggcgtgtcctaccaactgttcgcggtcaacaagaagctctacaagaacggcgtcaatggcacctacgcctgcctggaggcctgggcgtgcgacgggttttccgctggcgtggcggccaatctgcagaccaacaatcgtaagttcgtgatggtggggccgatggccacctcgctctatgcgtaccacctgttctcgaatggcgacttcatccatgtggtgatcgaggaaacaccggggcgcttccggcatctgtcgttcggcttcatcaacaagtacggcgccttcgccggggggcagtatctgacggcaggctgtcctgtcgagtcgttcacgaccacaccctatgcgttcaacacctcgaaccactcgattccgttcggcgcgaacgcgcagggaccgtcgcgggcgtcgcttgcgtcgaacggctaccctggcagctacgtccgggccgacatcgatggctggacagtcggctggcggctgctcacgaccggctactgggatacggccaacctcgatgtctgcggctgcgccacctatgcgaatgcaacgaacaatcgagcgggctacatcgggtccgggacccagaactccctcaacaccctggcacacgatctggcctaccactgctccccgcagagctacaacggcctggcgccgatgctgccgtgctacgtgggcgtcaatcgcactccgtatgtcggcacctggacgctgctcggcgagttccccgatgtgcgcttcctgaacatcgccaacttcaacccgggtgatgaactgcccctcggcaccgatgtgtggaaggtcttcccgctgtggaacaaggcctacacgctcggggcggaaccgatcagctacgactacggcctggcttaccgcaaggtggtttga

SEQ ID NO: 354200 - DNA, 354 bp, Pseudomonas aeruginosa
atggcagcattgcaaggcccgaatctgggcgtgaactacggctggaccgcccgagagtcgggctggaacaccgggatggataccaacctgaagctgctcgatgccgtgctgcagttgtcggtgaaatcgcgcacattggcagcgccgccagccacgccagcgaacggcgaccgctacatcgtggcggccagccctaccggtacgtgggccggaaaggccgggcagattgccgcgcgcgttgagggagcgtggtcgttctacgccccgaagatcggctggacctgcttcatcgaggacgagggcgtgctctcggcctacaaggtcacaggctggagcccagggctcgccatctga

SEQ ID NO: 354201 - DNA, 300 bp, Pseudomonas aeruginosa
atgaccgattccgaaaagcccgcgctcgttgagaacatgctcttgctgcgcaaagaggacttcgacgagttgctcgcccacgccgccgaacgcggtgccgagcgtgtgctgtcccaccttggcctggaaaacggccacgctgcgcgggacatcagcgaactacgtgacctgctggatgcgtggcgcgatgcccggcgcacagcgtggcagacgaccatcaaggtcatcaccaccggcatcctggccgcgctgctggtcggtgccgccatcaagctcaagctgatgggaggcggccaatga

SEQ ID NO: 354202 - DNA, 1569 bp, Pseudomonas aeruginosa
atgccagatacgattggagagcgtggcgaaattcagtgggaggctccgtcaaaccgaaaatctggaaaatttaaagacactcatcacagacggcgtgaatggtggcgtctaaaagctctctccattggaattgatccaaatacagatagcacttggatcagcaaaaccgcaaaagccatacacccattcggggtaaaaccctgtaagacttgcggaaaagagctggagatcgcgtacgcttatccgaatgagcacctgttcgctcgaattcgcaagctgccctacatagatgaaacgtttgagctatcggagatagagcacgtctgtgatctcttggctcgccttgatgagcgctttgggtcaaagatatacgaggatcttcccaagctctttgcaacaacgtctattactatcccacctctggcaaaggattttgacacctgggaaaacttcttaagggatgtctatatcccgcaagagccacgtatgctaagtcccggcgcgatgtcaaatcctccagaccggctcgacggatttcactcatttaaccgctgctgccgcgctacagctgacacaggtcggtcgaaggagaatctgaagtcttatgtaacagatcggcgagtgtttgagtattgggtggatggtgattgggttgcagcagaccgtttgatgggccaagtgagatccaatccaattttcgagcaagaaaattgctttaatgatgcgcaaggtggcgttcatcccaagccatgccaagctgaccatatcggtccaatatcactcggattcacgcaccgccctcaattccagctcctgtgcaaaacctgcaacagcggaaaaaataatcgaatgtacgccagtgatgtgagattactgattggcgttgaggcggctggggaaagcgttatctcgtggttcgccaaagagatctgggatcgccgaaaggccgctgttgtggacgcagaaaccgctcttcgtctcagcaaacttctccgggacaatcgccatacctatatgtcccttctgaaggaactcttggatcgtggcttctacacatttctcgctagcctcctgcacttggaagcagcggactttgatccagagtttgttggcttgagagcaaggaatcatcttacatattttgactccataacaaaaaagccaagaaccacaaaatacgcgaccgaacagaaagctcggcggattcggattgcttttacatccctgaccgattatcacagaaaagagaatcgaagcgcattcgttatttcaaacgatcgctccgcagttgagttctctgcaggttttgcggaacttgagaagctgagatccgttacaaacgatctcgatagaaaaattgctgaaatcgtgggtgaggccaaattatctgaggctgatcttcgagcgttggcaaagtctcttcccgatatcctgtctgccaacagtgcgccgttttcctcagttcgagatcatttcgctcgcggtatggccgaagtgggcaaggagctagatgaaatgtggagcgccgaccgttatgtacggtcggctcctggcgaaattatcgagtga

SEQ ID NO: 354203 - DNA, 1266 bp, Pseudomonas aeruginosa
atgctcgaagagcattcccctggtgacgtttcggagatcaaaagagcaatggcacttgaccgacagacgtcaaaaattgaattaatgcgaattgaaaatcattacgcctcgacccttagtgagctggacttgcgcatctgtcgctctgttccacccggaggaaactggaaagacatccctgaagatattccttccgagcggataaaaaatatccgtatcagcttcgccaaaggggaaggaagccgatcaacttattatggacgcttacacccagataggccgtcgtacacgatcaacacctatttcactagacctggaaatgggtgccacatccattacgattacagcggggcacagcatagaaccctttctcaccgagaggcggctcgactgcaatcctttcctgacaattttgtcttcaaaggtaacaaggggtctgtaactacgcaaattggaaatgccgtccctccgttactggcatttcaggttgctcggcacttgaatatagtcggccaagccgtagacctttttgccggagctggcggactagggctaggatttggatgggcaggatggacaacgcttgtcggaaatgaattagaagcgagcttcgccgaaacttatcggacgaacgttcactcaaatattgttgtcggtgacattacagatgacagcgtaaaaaatcagattttaaaagaagtgaagggagcaaggaacaaagatttgccgctttgtgttcttggtgggcctccatgtcaaggcttttcgaccgcaggtaacaagcgctctatggatgacgaaagaaattggctctttagagactactgcggactacttgcggcactaaaacccgacgtttttgtatttgaaaatgttacggggttgctcaacatggagggcgggcgcgtcttcgaaatggttaaagatgaactttcgaagcacgcgaagaggcttattgtgtggaagctacactccgaaaactatgcaatcccacagaggcgcagcagagtgattatcgttggcgataacactggaaaagctcctgaatctcccccgccaatgctctcgagcttgtccgccagcgacctagttagtgacctgccacggccgccgtccgtaaaggacgctctagacgacctgccagctcttctgccagggcaagatggtggcgacctcggctatcgtcatagagcgatgacaccttaccaagcacttatgcgcggcgaaattaccgccgcacaatatctcgctaaggtcactcgataa

SEQ ID NO: 354204 - DNA, 1014 bp, Pseudomonas aeruginosa
atgaaacgcccgaattccctgcaccgcctggtggcagccctggcctttgccagcctttctgtcgccgcccaggccgccgacatcacggtcggctaccagaccggcatcgacccgaccaaggtgccccaggccgatggcctgtacgagaaagccatcggcgagaagatcgactggcgccgcttcaacagcggtccggaagtgatcgccgcgctcgcctccggagacctgcaactcggcaacatcgggtccagcccgctggcagcggcgacctcgcggaagctgccgatcgtcgccttcatcgtttccgcgcagatcaacgccgccgaggcgctggtggtgcgcaatggaagcgggatcgggaaacccgaggacctggccggcaagaccatcgctaccccgttcgtttcaacctcccactacagcctgctcggcgccctcaagcactggcagatcgatccgtccaaggtgaagatcgtcaacctcaacccggccgagatcgctgccgcctggcgtcgcggcgacatcgacggggccttcgtctggtcgccggcgctgggcgagatcaagaaaagcggcaaggtcctcaccgacgccgccgaagtcggccagtggggtgcgccgacattcgaggtgtgggtggcgcgcaaggacttcgccgagaagcatcctgaaatcgtcgcccgcttcgcccgcgtcagcctcgattccttcgccgactacaacgcgcacaaggccgaatggaccgccgactccgagccggtgaagaagatcgcccggctgaccggcgccgatcccagggacgtccccgaactgctggccggctcgaccttcccggaaagccaggcgcaactgtccgccgacctgctcggcggcggcaccgccaaggctatcgccggcactgccgaattcctcaaggaacagaagcgcgtgccggccgtcctcggcgactactcgccctacgtcagcgctgacttcgtgcgccaggcggagcaggtccaggtcggccagcgctga

SEQ ID NO: 354205 - DNA, 1497 bp, Pseudomonas aeruginosa
atggagcaaaaaatctacattgccatagtcaaggaatgtgaaaagctcattcttagacaccacagctatcacaataagcttcatgttgactgggttcgtaataccaagcgaatttcagatgcgccgcccaaggtagttgagaccccagaatattggagtgtagatagaaggttcaatcccttttacgtaaagtccaatgcaaaagccatagcgcgctcaatagcgaaaaagatatcaaacagaacgtatgttcctgcggagccatttcgaaaatcaattccaaagtctggtggtgggactcgggaactaacgatctaccaaataccagatgcagctgtctctcagtacttctatggtaggctccttgctaagaataggcataggttcagctctttttcatatgcctatcggaatgataggaatgtgcattttgctattcaagatatagcagtcgatatttcccgagatgcaagaacctttattgctgaattcgatttctcagatttcttcggatctattgatcatgactatttatacggtcagttacatgagaacggattttatgtcagcgaggaagaggaagctgtaattaggtcttttttagccgcgcgcgccaaaggtattccgcaggggacttcgatatcgctatttctggcgaacctagtgtgctggaagatcgataagacgctagaaaaatctggtcttaagtttgctaggtatgcagatgacactgttatctggagtccagattacgcagccatatgtaagtcgtttacgataattaacgatttttccaaagaagctggcgtgccgattaatgcaaaaaaatctgacggtataagtttgttggcgcgcgagggcttgccggcagaaattgcatcgaaaaattattttaatttcctaggctactcaataggagttggcaaagtctctattagagaggcatcgcagaagagaatcaagaagcagatatcttatttgctttatcggtctatgattcagccgttgaaatcgagtccactgagggggcttgttataccccataataaccgagataaggccctgctggttgccattatgcaggtgcgtcgctatatgtatggcgggctgtcaaatcgagatattacagattatatttctggtcgtaaaaggcatcttcactttaagggtgtgatgagtttttatcctctgcttaacgatgaagttcaacttaaagagttggatgggtggcttgtctcaacgctctatagatgtattcagttacgatctaagctattaatatcgcatgggtacgatagaagtttggcttttcctttttgcatcaagcatgcggatctggtcagccaactggcgcgccggcgaatcaagggaaagcgtctgctagaggttccaagcttcatgctgatttatcgggccctacagcgtggtttacgtgaaaccggtattgagcgggttatgcatccagagtctgtcaagtacgaatatagggggctttaa

SEQ ID NO: 354206 - DNA, 711 bp, Pseudomonas aeruginosa
atgcctgtcttgcaatacggccaaacgaccatcgagtggtatttccagctcgatgctagcctcaagcgccactacgtgacagtggaacgtggtcggcctgttctgctgcgcgggccgcaggtggatgaatcagagcaagaagcgttggttctgcgccgtgcacgctggattcgggagaagctggcgcaggtaaatcagcctctggcaagcgagcctatcgtgacgggcagccgcctacgctatgccgggcgcaccttttacaccgaggttcgccatgttccagacgccctcaagcctcgattggccttcacggcatcgcgttttatcgtcgttaaccctgatggtgtgagtatccatcctgatgcgttgatgcccttgctggagcggttctaccgggaacgtgctcacgagaagttgtcattccgggttcgccattggcagcgcgaaaccggccttcaagcagcgggtatccgcatccgtcacttccaaagtcgctgggccagctgcgacgcgaacaacgttctggagtttcatccacgggtgatggaactgccagccagcgtgcaggactacgtaatcgttcatgagctgtgccatacggtggaaaagaaccataccaaggccttctgggcgctggtggctagtcacatgccgggttggcagcggcagcatcaggtactggagcgggcggtgtttggggatgcagtatga

SEQ ID NO: 354207 - DNA, 3282 bp, Pseudomonas aeruginosa
atgagccagtcaccggagaaggtcggagtcgagcagcctgccatcaattggttgatcaagctgggttacacccatctacttggtaaccagatatcagtagagcatcgtcacctagctccggtactggaggatgtattgcaggctcgactgctgatccttaatccatggcttgcgagtgcgcccggtggtatcagtgctgcattgatcgagctacggaaacgagtcactgatgagctgttgcccgccaacaaggcgttctgggagcaggtgctgaaccgttcggatatccaggtgaaggacgccgaaggtaagcctcgtagtgtgcgtttcttcgatgtccgcgatgccagtaacaacgacttccatgtggttgatcagtatgtcgggcgcaacgcggatggcgaggtttttcgtcctgacttgttgctgttcgtcaatggtctgcctctggccatcgtcgaatgcaaagctagccaccatcgtctggatgaggcgttggggcagctggatggttatcagaacagctttcccgaccagtttgttttcaaccaggtattggtcgggctgaaccggcggcaggggttatacggtgctctctttaccaaaccagcgtattacgctcgctatcggttacaggagcaggagaccgctactgtatctgccttgctgggtgataatccgagtgagcaggaaagcttgctgtgggcattgttcgagccgagccgcttcctgcaactgatctcgcactttgtattgttcgaaacgcgcgaaggcaagacggtgaagaaactgccgcgctatcagcaatggcgagccgtatgcaaaacggtggatcgcctgtgcgcgcagaagccaatgggcggggttgtctggcatacccagggtagtggcaagtcactgactatggccctgcttgcgcgtatgctgcgtgccgatagcacaggtttgaacaaccccaccgtcttggtgctgaccgaccgcaaagacctcgacaaacagatcttcgataccttccactcagtgggcattcatgccattcaggccgtgtcggttgatggtttgctgaagatgttgtccaacgattacggcagcgtcttcaccagtacggtgcagaagtttcaggagaacgaaaagccctgcgagcagtctgctgatgttcctgacgaagaagatgatgcgttgcaagcgacccggcacaggcggattcgcgaggagaaggatttcttcatcgtgcatgagcgcaatgtccaccacctagaggtggatgaggtcggcgtaccggtgaagccgaagtgggaagaaatcagccgggaaaaggtgcatttccgggtactcagcaccaagcccaatttctacgtgctggtcgatgaggcccaccgtagccagtacgacttcctcgcggcattcatgcgcgccagtttgcccaacgccaagttcatcgcctttaccggcacaccgctgctgcaagaggacaaacacacgctgggcgagttcggcggtggtgagtacatcgacgaatatcgcctgcatgaagcggtggcggatggcgccactctgcccatcaaataccaggatgcctgggtggctctttctgccaatgctgagctggatacagcgttcaaagagcagtttgcagaacagacagaatttcggcagcaggatatcaagcgagagctgctgcgtcgttggcgtcaggccagtgatcgcatggaacaggtcgccgagcatctagttgagcacttcctcagtcacgtaaaagctaaggaactgaaggccatgctggtctgcgatggccgtgatatggcggtgcgttacaaggatctgctcgacgcaataatggttgagcgagccgcaaagggactaccaaccttcgacagtaaggtggtgatttccctggccagtatcacctcttcccgaaccggggcctctctcaaggaacaggcggcggagtaccaagtagagctcgacagaatccagagcatcgaagagcggatcaaggctgagctgaaggccgggaagactcctgtggccatgccatccgagcagattggcaactttgtcagcaagctgttccccctgctctacggggaggaaacttccgagctggatggtcagccaaaggcgaacaacgtcggattgatcattgtgtccgacatgctactgactgggtgggatgcaccgattgtcggcaccatgtacctggataagccgcttaaggaacacaccctcttgcaggctattgcacgggtgaaccgcaccctgcctggcaagaatgccggttacattgtggactatcatggggtggtcgagcaccttgaccatgcgttgaagatctatggcggcgaagtgacgccttcgcaggtttgggagggtgttgaaaccgaactgcccaagctgcaagccacgctcgaccgcatactcaagctgctgccgaaaaaacatgacccggtggcgcagcgtgaagcatacaaggatgacgccgagcgcttcctcgatcctgccaccaggctggatatggtcgaagagtttcttgacttggtgaagcagttcaaccgatctgtagacatcatcctaccggatgtccgtggtgtacccttcaagcccttctttaccctgtttggtgagattcggctgatgctgcgcgacaagctaccaggcaatgccaaggagcggatcaccaagctggagtctgcgctgcttcaacaactactggatgagtacatcgttgccagcccggccaaaagcctgctgggccatgaagtctcgattctggatgccagcgatatggaacgcctaaagcaactggccagccccggtagtcgagccctggtgatgaaaaaccagctgaagcacaccatcgcgaccggcaaggacaaggatccaggatttttcggaaagatcgccgaggagctggaaaaactgttggaagaggaaaaggcggggcgtatcagccaggtcaagttcctggagcagttagagctattcagccagcgtattcaggagaaggacaacaccggcttcgccaagtcttcgcattcagcggtgtaccactaccttgtcgcgttgctggacgagagcacggccagggtcgcgacgagcaagctgttcgaagacgaagagctgagccgcacgactgccaccgagaactggaagaagatgccagatctgcatccggacatcagagaccatctgcgtggcctgctgatgcccttggccggctgggagcgctcgacggcgcgcgatcacgcgaagcgaatcttggatatcctgctgaaaaactaa

SEQ ID NO: 354208 - DNA, 873 bp, Pseudomonas aeruginosa
atggacgaaactactaccctgccctcgaatcttgtgcctgatttgcaacgcaccgtgcagcgcaagcttgggcgctgcatgttgcagttgcagcagtatgagcggctgctcaaggcgatggttgcccatagcgagctaagcggcccagctgaacgacttcaggaactccgtgacgagaaggtcgcttgcgtccataagaagaccttgggcaccttggtggggatgctgaccgagagttatttgaagctgccggatttacccgatgagtcagagcatgctgagcgcagtgatcggatatggtttagcttccgttatcaaatggagctccccgaagagcgctatgtcgagaccaaggctgcactcaaggaactggttgatctgcgcaatgaactggtacatcactttcttcaacgcttcgacctttggagtgcggaaggctgcgtagccgcagaggcgtatctcgatgaaagctacgaaaccatcgacggccattacctgacgttgcgtgactgggctaaatccatggatgaagcccggcagctgatggcttcgtttatgcagacccaagaatttaaggatgccgttttcgacggcatttgggtggatggcaccgtacactggcccagcagtgggataaccgcttgcttgcacgaagcggaaaacaagttggcgcaggtaggttggacgcctcttttcgaggctattcgctggattgccaagacctatcccgagcagacgccgaagcgttatggctgcggcagttggcggcatgtgatccatgagtcgcagcagtttgaaattcgcaagcaaaaccaagccgagggcggccctacggtggtttggtatcgcagtcgttccagggaacaggagtaa

SEQ ID NO: 354209 - DNA, 1347 bp, Pseudomonas aeruginosa
atgacaggggtgcgtaaagaaactgtcattggtcacgtgcctgcctcctgggacattaagtcccttgcagaagtctcagacttcattacgaagggtggaacaccaacgacctatggttttgattgggccgatgaaagtaatggtattccattctttcgcagtgagtgtgtgacggatgaagggtttaacccgaaggggatgaacttcattccagccgaggctcaccatcaaatgagtcgttcggagataaagcctggtgacttgctaatgaccattacgggcaacgttggacgtgtagcaaaagcaccggaacgattccctgcagcaaacattaatcagcacattgctcggatcagggtattaatcgatgcgcacgtagaagcagactttgtctatcaatgtctcaagcaccaagcgtacgctatctattacagagcaattcttactgggcaagcctaccctcaaattagcctcgaacaggttcggagaactccagtcgcattccccccgcttcctgaacagaagaaaatcgccgcgatccttacggcggtagacgacaagctggacgtgattgcccgccagattgaagccacccagactctcaaacggggcctgacgaaaaccctgctcagtcgtggcgtaggtacccaagatgccaatagccgttgggtgccgcataccgagttcgaggacagtgaactgggggagataccgcaggcttgggaggtcgtcccactaggtagtctgattcagaagctgatggacttccgtggtcgcactccaaagaagcttggcatggattggggcggcggagatattcccgccttatcagcaaacaacgtacgtatgggctacatcgactttgaccgggagtgctaccttgggtcgaatgagctttattcagcttggatggttcacggagataccaagcaaaacgatttggtattcacgatggaagctccgctgggtaacgtcgcagtcattcctgatgataggaagtacatactgagccagcgagttattcttatgcgacccaacgaacgggcttctcatagctacctgttccagtatctgcggagcgatgcattcgcaaagattcttgatgtgaatgcaactggaaccaccgcgaagggcattcagcagaaaaggctggtaaagcttccggttgtgctccccccacttgaagagcaaggcaggatagctaacgtgcttggtgtagttgatgcaaagttggatgccctaagtgcaaagcaagctaactatgaaactctcaaacgtggtctgatgcagaagttgcttccaggcgaatggcgcgtaaagttagatagccctgccggcataggctga

SEQ ID NO: 354210 - DNA, 1602 bp, Pseudomonas aeruginosa
atggctgacaagctgtcactcgaaacgctggagtcctggctctgggaatccgcgaacatcctgcgtggctccatcgactcctctgacttcaagaactacatcttcggtctgctctttctcaagcgctacaacgacgtcttcgatgagcgtgtcaaaaagctgatggaggaggaaaacctgagctatggcgaagctcaggaggaaatcgaggacaagtggggcaagtatccgatcagcgcccgctggtttgatctgatctcacgcaccgaaaacatcggtgaggccctggatagggcgttcgcggcgatcgaggctaataaccccgaactgcaacacgtactgaccgccacgcagtacggtgacaagcgtgtgctgtcggacgccaccttgcaacgcctgctgcgtcatttcaaccagtacaagctgggcaatgacgacctgtacaaggcagacatgctgggcgatgcctatgaatacctgatcaaacagtttgccgacgatgccggtaagaaaggaggcgagttctatacgcccaagggggtggtgcagcttgtggtggagctgatcaatccacagccgggtcatagcgtatacgatcccacctgtggcagtggtggcatgttagtggaaagtgcccaccatgtgtcccgtctgcccaacggcacgctgatgggtaagcccaatgtgttgctctacggccaggagaagaacctaggcacctgggcaatcgccaagctcaacctttatctgcacaacatgcatgcggcaatagagcgtggcgacaccttggtggagccgaagcacctcgacggcgattacctgaagacctttgaccgggtgattgccaatccgccgttctcggccaaatcctggtggactccactcgagttgagtaacgaaagggagcaggagaacggcaaaaaggcgaaggcgcccaactacaagcaggtcaacgactcttacgggcgactagtctatggcatcccgccacgggggtatgctgaccttgcctttgctcagcatatgctggcgagcctcaaggccggcggtcgcatgggtgtcatcctgccccatggtgtgctgttccgcagtggcgaggaaggcaagattcgcgaggggttgttgttcggtaccgacgccgccagcggcaaccaaccgggcgaccttatcgaagccattgtcggcctgcccgcggccctgttctacaacaccggcatcccggcctgcgtgctgatactcaataagcagaaaccggcgaccctcaagggcaaggtcatcatcatcgacgctagtcgtgactacctcgaaggcaaggcgcagaacagcctgcgggttgaagacatcaagcgcattgtctgtgcccacaaggcggcattcgagcggcaggccgagtttgaaaactattgccgggtggtgacgctggacgaaatccgcagtaacgacggcaacctcaatattgcccgctatatcgacaacggtgagaccgaagagactgtcgatgtgtctactaccttggcgcaactggcaactctggccgaggaagaagcgcagattgatgcgcggctgaatcgctatctagctgagttggggttgacccaatga

SEQ ID NO: 354211 - DNA, 2268 bp, Pseudomonas aeruginosa
atggaaaagcgtttcgcggcaagcctgagtcggtcgcaaggccggagcgcgtgggcggtgatatttcggcatccggtgcgggtcgacccgaacaccggtaacccgggcctgagggtccgtcaggggctcgggacctccgacgaagccgaggcgaacgaactgaaagaacagctcaaccagttgctggcggaggacgccttctggagcctgccggcccgcgccgaagctgagaagcggttccaccgccgcgtggtggagatcttctatcacggcatggagccggagcagaacgacttcggtgcgatccgcgagtcgatcatcccgctgccaacgtccaaggactccgattaccggcgagcgctgctcctcgggaccaccggcgccgggaagacgacgctgctgcggcagttgatcggcaccgaccccgaggccgagcgctttccgtccacatcgacggcaaagaccacggtacacgaaacggaggtcgtgctggccgagggcccgtaccaggccgtggtcacgttcttccccatcgacgaggtccgcgagcacctgaacgagtgcatctccgaagccgtgctgtccgcctaccgtggcgacagcgacggagaagtcctgcgcaagctgctgatgcacgtgaaccagcggttccgcttcagctacgtgctcggcaacggacctcaggccggtgacgctgacgacgaggaggacgacgaagacgacgtcgcggagcctgccgaggagactgccgctgacagcgccatcgatctcgaggccaccaacgcgttgttgaccaagacgctgaccgcgctgcgcaccatcgccgtccgccacggcgatctgcttaaggccgagcttggtgccatcgacgaaaaggatcagcgtgtcgtcgacgagctcttcgaggaggagctggatcgtcggctgcgcgaggacgacgagttccaccgcatcagcgacgagctcatggacgagatcgagcttcgtttctcgctgctaaccgatggcacggtacgccgcaacaagcaaggctggccgcaatcgtggtcatgggagacggacgaccgagcgaccttcatcaagaccgtcacgcgcttctccagcaaccacgccccgcgcttcggacgcctgctgacgccgctggtgaacggagtccgcgtgtcaggtgcgttcctgccagcgtggaacggtgggcagcagcccaagctcgtgcttctcgacggtgaaggattggggcacacacccaagtcggtcgcggccatctcgacttcgctgacacggcgtatcgagtcgacggatgccatcgtgctcgtcgataacgccgtgcagccgatgcaggccgcgccagttgcagccatgaaggagatgatcacctcgggcagctccagcaagctgctgctcgtattcacgcacttcgacgaggtcaagggcgataacctgcgcaacgcggcagatcgggagcagcacgtcttggcttccgccgagaacgttctcgcctccatcggggaggagcttggcccgttcgcggaacgggcgcttcgcggccgcttgaaggatgcctgcttcttcgtcggcgggatcgacgaagacctggatgccacgaagaaagcccacaagcggaccattgctcagttgcaggcgctgctagccgccattgatgccattgtcgagaagcccgagcctgtgctcgcgaagccggtgtacgaccgcatgaatctcgtcctagccgtcaagaacgccgccgagagcttccacgatgcgtggtggccgcgcctgggcctcgcttacaagcccggcgtgggcaaggagcactggaagcgcatctgggcattgagtcggcgcctcagcacgccgggcctcggagacgagtacgacaacctcaagccggtcgcggacctccgtaagcagcttcaggatcggctgtatatgttgctgcagaacccgctccggtgggaccccgcagagccgactgacgacgcgcacaagcagcaggtttttgacggcctggccaacgctttgtccgccaagacgctggacctcgccacccgccgcgttcgtgccgaacggatgtcggaatggcagtcggcgttcaaccagtcggggcgtgggtccagctatgcacgcgcctcgatcatcggcgaacgcatctacgaacgcgcggcgccgattccggatgtgactccctcgccggaccggaattccttcctgcacgaagtggcggcagttgtggaaaccgtctgcgaggaggtcggcgccaagcttgcgtag

SEQ ID NO: 354212 - DNA, 729 bp, Pseudomonas aeruginosa
atgccggcacgtgcaaaggagctcatcccgcatttgctgtcagtgactggcgcgcgtccgcgcgtgccgaccaaggccgaactcgaccggattcgctacacgccgatcactgcgggctttgcgcccatcgccgaactctctcggcagattgcgaaccgcagaggccttgccgccgacattgatgccagtggcgaaaccaagggggtcctgcttgacgtggccgagctgtgggagatgtacgtgctcagcgtgctgcgaaaggccgccgcaccgcttaccgtgactcacggcacccgggagaaggccgccaccaagaagctgctccacagtgacatcacgggccagggtttgggcacgttgatcccagatgcgatcctccatgccggaggcaaggtccaaggggtggccgacgcaaagtacaaatcgctgcacccgtccgcaagcgcgccgaatggtccacagcgcgaggacctgtaccagatggccgcgtacctcggccggttcgttcatccagagggtaggatgtcctggggtgtgctggcgtaccccctggaccctgctcggccgtcgatcccacaggctgagcagcttagcccctggagtttggacagtggcaggaaggtcgtcttcacctccctgccgcatgtcgcatctgacgcagtcaccaagctccgcgcgttgattggcccgatgaccccggagcgagatgtctggcgagtgcaagcctag

SEQ ID NO: 354213 - DNA, 1791 bp, Pseudomonas aeruginosa
atggcgcggtactcggaacaggatacagacaagatctataaggccgccgaggccttccgtgctaactgcctgatgcgcgacggctcgctgctattcgacgaagcggcggtttggagcccagcggtgcttgaccgcatccacaaggcgttcgttgccacccccgacgagggcgaccgatccttcatcgtcaagttcaaggatcagatcggccaagctggacaggaggtgatccgccttgcggcagagatcctgtgcgtctacttcctgttcccgtccagcgtgggcggcgtgcgcaagcgacaggtcgtgaatgaggttcttggctgggctggtgacagcctgcctgagtcccatccggttttcggtgccttctcgagcgggatcggtagcggcggccagggctacaacacccgccgtccattcgagatcgcgttcctgatcgaactcgccatcgtatggaagaagctgccacaggaccggcaagctgaggcggcgacagatccgtggctctttcaggagatcgtagacagcatcgaggatgcggagtccaagcagctacggcacatgctgctgcacctgctgttcccagaccacttcgagcgcatcgcgagtggcaatcacaagcgtagggtcatcaaggcattctccggcttggttgacgctgagccagaggacgacgaccgcgcaatcctggccatccgacgcgagcttgaaaagctgttgccgaacgagcaactcgacttctactggtcgccgctcgtagaggcttggtacgacgacagcgaaggtgcgtctgaaggcgcgccactggagatcattcagcacaagaagcagattgtgctctatggccctccgggcactggcaagacgttccgtgcgaagaggctggcggaacgggtcatccgatccgccgcgttgagcaaaatggggcctgctcggtacttccagtcccagcccatcgttgctgcggcaatccaggacaacgtccaccgattgcagttgcacccggcgtacagctacgaggacttcatccgggcccttcacatttccaacggcgggggtactgagtaccgcgcgggctacctgcctcggctgattgaggacatcgagcagaagtctcgctcggagcgactgccacacgtcctgatcctcgacgagatgaaccggaccgacttgagccggatgcttggtgagtgcttctcgttgctggaggaccgcaaccagaccattgaacttccggcgcgtgacggggatggggctgccatgaagctgcgcattccggacgatctgttcgtgatcggcacgatgaatctgatcgaccagtccatagagcagatcgatttcgcgctgcgccgccgcttcctgtggttgctgtgcccgtttgacgccgaggctctcgtcggtgccgccgaagccaagtggagagatctgaagtcgggcctcgactgggatcgcattgaaccggacttccgcaagttggccgcagcagcggcggcgttgaacagggagatccacgacagcccgctgctcggcgcgcagtacgaaatcgggcacacatatctgctcgatgtggtcgtgttcttgcgcaacttcctcggcccacggcctacgcgcaagcagaactacctctggaacaagaagggcgaagcccttgagcccgttttgcaggtgtggaacctgtcccttcgcccgttgctggagcagtacctcgccgggttggatgcaaccgcccgcaacgcggagcttgaccggctatcgaaggttctcctcaagcccacggtgaccgagtga

SEQ ID NO: 354214 - DNA, 834 bp, Pseudomonas aeruginosa
  misc_feature (793)..(802): n is a, c, g, or t
atgtttgcttcgaatttgaatcaactcctcgaagttacctcgggagtggaaacaacttacaaagtaggaaaaaacctagagcagcgattaactggccggttctatacgcatgccagaattggaaaggcaatggcgattgatattgccagacgccttgagttgtctgcagatttaaaaattatcgacccgttctgcggcgatggaaggctgctgtgttggctcgttgaagccatgtacgaacaagggaaaattccgtcaagatcccttcaaatctcagcctgggattgtgatgcattggcggtcgaggtggccaaaaagtcactctccgaaaagctaaaagctcttaatatttctttcgctcgcgtagacgcacaagcaattgactcttttgagcacgcgctgaaaaatatacagtcctttaatgtctgtgtaacgaacccaccctgggaaacgatcaagcctgatagcagagaactggccgagcttgagcaagaagccaaagatacatatgtttctcttctgaaagagaaagtattccgacttgagaagtcttacccttattccaaaccatcaagaaaattttctggatggggtgccaatttggctcgctgtggcattgaagcttcggtgagattgattacgccaggagggtactttgccatcgttgcccccgctactattcttggcgaccaaatttctgcgcctttgcgggcctggttgttttcgcaaaatgccgtagatgccattcatcactaccctgcggaagcaaggctttttgaaggagttgaccagnnnnnnnnnnggggcaacaagagaaaagagcactcgaagtga

SEQ ID NO: 354215 - DNA, 912 bp, Pseudomonas aeruginosa
atgctaggcggaatctttgatgttttttctaggcgagaaaagaagatttctaaaaaacccttaacgaaggagtttagaaatagagtagtaatgttactaaaggagatacttgatagtaattttaatttcttcttgggagacttgcagaaacgattggcatacttgcatgggcgtcctgttttaatggaatcgcttcgtccagattctatcatagacgatgtattaaattttctattctcatgtagcgacgaacactttctagatgcggttgagtacttttttcagttgccgaacaatcatgacttatccatggcggaagaggtggtgatagaacagattaacgaatttttatcgattgataatttgccatattatataacaaaaaaagtatggatagactatgaagggaccgataggtttgggaatgaatcaaaattcagaaagctaggggaacccgttagagtagtatgtaaggagaacgagattctacatcagaacgcaattatccccacgctaagccttttaaagggggaagggttgaacaatgctaactctgagtttcttggtgcgttaaaagactatagacatggaaattatagggatgcactaaccaaaagcaatagcgctcttgagagtatgatgaagataatttgctcaaaaagaaaatacaaatactccgagcatgatccatccagcaaacttcttaaagcgattatggaaaattctgatcttgatgcattttgggaacagccaattcaaataattgcaaccatcagaaatcgttacagcacatcccacggggccggcaccaaatcaaaagaagcttcagagaatgtctgtaaatttgtaataaacatgacggcctctgtaatgctttttttagatgaagaattcctgaagagcaagaaataa

SEQ ID NO: 354216 - DNA, 1332 bp, Pseudomonas aeruginosa
atgctcgccgcccttggcgcgcttgatgtattcgccccattcgtaggtgacgatcttcgccttgataccgatcttcgcccaatcgttctgcagcatttccgccatcagcttggcgttggggttgtaggggcgttgtaccggcatggcccacagggtgatctcggtgccctcggcgacgccggccttcttcagcagctccctggccttggccggatcgtagggcgcgtccttgatggtctcgtcgtaggaccactgggtcggtggcatgccgttgctcgccaactggccggcgccctggtagacggcgtcgatgatggccttcttgttcaccgccatgtccagcgcctggcgtacttccagcttgtcgaacggcttgtgggtgacgttgtaggcgatgtagccgaggttgaagccggcctgcgacggcaggttcaggttcgggtccttcttcagcgcgtcgaggtcggcggggcgcgggttgagggtgatctggcactcgccggccttgagcttctgcgcgcgcaccgaggcgtcggtgttaatggcgaagatcaggttgtcgaccttcacctcgtccggcttccagtagtccttgttgcccttgaagcggatctgcgcatccttctggtagcggctgaacacgaacgggccggtgccgatcggcttctggttgatgtcgctggccttgccctgcttgagcagttgcgcggcgtattcggcggactggatcgatgggaagggcatcgccaggttctggatgaaggccgcgtcgacctcgttgagggtgaacttcaccgtatgctcgtcgagcttctcgaccctggcgatgttcttgtccaggcccatgtcggtgaagtagggaaactcggtggggtaggccttgcggaacggatgatccttgtcgagcatgcgttcgaaggtgaacagcacgtcgtcggcattgaattcgcgggtcggcttgaagtagtcggtactgtggaacttcacgcccttgcgcaggtggaaggtataggtcttgccgtcgtcgctgacgtcccagctttccgcgaggccgggaaggaccttggtgccgccgcgctcgaactgggtcaggcggttgaagacggtttccgccgcggcgtcgaaatcggtaccggtggtgtactgggcgggatcgaagccggccgggctgccttccgagcagaagatcaggttgctggcgaaggcctggggaacggcggcgaccagcgctgcgccgagcagcgagggaatgatcgcggagcggatgacggcgtttctacgcatggagtgacctctggttattttgattgtctgcgagggacagcctcgtga

SEQ ID NO: 354217 - DNA, 1962 bp, Pseudomonas aeruginosa
atgaatcccccggtgttctacggtgcggcgatcctgatcctgctgttcgccgcagtggtcatcggcttcccccagcgcgccggcgaatggctgctggccgcgcagacctgggcctcgcagaccgtcggctggtactacctgctggcgatgacgctgtacctgatcttcgtggtggtcaccgcgctttccggctacggcaagatcaagctcggtgccgaccacgacgagccggaattcagctacctgtcctgggccggcatgctgttcgccgccggcatcagcatcaccctgttcttcttctgcgtatccgaaccgctgacccacttcctccagccgccgcaaggcgaggccggtacccaggaagccgcgcggcaggccatggaactgctgttcctgcactggggcctgcacggctggggcgtattcgccctggtggcgatggcgctggcctacttcgcctaccgccacaacctgccgctggccctgcgttcggcgctctacccgttgatcggcaagcgtatcaacgggccgatcggctacacggtggactgcttcggcatcatcgccacggtgttcggcctcggcgccgacatgggcttcggcgtgctccagctcaattccgggctggactacctgtacgccataccgcatacccatgcggtgcagatggtgctcatcgtgctgatgatgggcgcggcgatctcggtggcggtctccggggtcgacaagggcatccgcatcctctccgacatcaacatgctgctggcttgcagcctgttgctgttcgtgctgttcgccggtccgacccagcacctgctcaacaccctggtgcagaacgtcggcgactacctcggccacctgccgggcaagagcttcgacctctacgcctacggcggccccagcgactggctgggctcgtggacggtgttctactgggcctggtggatcgcctgggcgcccttcgtcggcctgttcatcgcgcgcatctcgcgcggccggacgatccgcgaattcgtcttcggcgtgctgttcatcccgctcggcttcaccctggcgtggatgtcgatcttcggcaacagcgccctggagcaggccctcggcggcgccagcgaactcggccgggtggccatcgagcagccgtcgatggccctctaccagatgctccagaactacccctggagccgcgcggtgatcaccgtcacggtgctggtcagcttcgtcttcttcgtcacctcggcggactccggcaccgtggtcctctccaccctctccgcccacggcggcagcgccgacgacgacgggccgaagtggctgcgggtgttctggggctcggtcaccgcgctggtcaccggcgggctgctgttcgccggcagcatcgacgcgctgaagtcggcggtggtgctgacctccctgcccttctcgctgatcctgctattgatgatgtggggcctgcacaaggccttctacatggagtcgcagcgccagcgggcgcggagccactccctggcgccgctgatgagcggcaacggcaagcgctccggcggctggaagcgacgcctgtcgcaggccgtgcacttcccctcgcgggacgaggtgtaccgcttcatgaacgacgtggtgcgcccggcgatcagcgaggtttccgaggtgttccgcgagaagggcctggcggtggacgcccagctcgacccgggcaacgcctcgctgagcctggagatcggtcatggcgagcagcatcggttcctctaccaggtgctgatgcgcggctacttcacgccgtccttcgcgcgtgccggcatgggcggcctgcacctgaagaatcgccgctacttccgtgccgaggtgcatctcgccgaaggtagccaggactacgatctgatgggctacaccaaggagcagatcatcaacgacatgctcgaccagtacgagcggcacctgcagttcctgcacctggtgcgttga

SEQ ID NO: 354218 - DNA, 912 bp, Pseudomonas aeruginosa
gtgcggggctggccacggggcgcctggagggcgtgctgcagccgttgctgcatgcgccgggggcggtggcgctggtcttgccgggggcgctcgagcgcgccccggcggcgccacggcataccggctggccagcgctgggcgcggcgtgccccggcgactgcgtggatggctggaccttgcaggcagcttgcgcgttcggcccgcccgggcggctattccgcgcctgcgacgagcaaggacgcgaggcgttgctgctgctcgcggcggtcgatgccgacgaagcgttctggcagcgcgaatgggcattgcggcgctgccgtgcggagagcctgccgcgagtattgtcgtcgccccggttgcgtcgtcatgccttccagttgttcgctccgccgcgctggccgatgcgcagcctgctggattgggcgccagcgcacctgccgctggaaccgcaatgcgcgctggtcctcctggagcaacttatcgatgcggttcgcgccttgcagcggcgcggcgtacagggcttgtggctggcgccgcggcagatcctgctggacgagggcgggcgcctgctgttcctccccgaggcggcggcgatcctgccgggggtggcgcgccaggcgctgcctgcggacagcgtgccgctggcgccggagttgcgtcgcggcgaggcgctcgatggccgggccgaccagttcgccctggcggcgctgttctattggctgctctgtggtcgctggccgtcgatcgcctgcccggagagcgacggcggatgccgctacgagcccctgggcgagcgtcaggcggacctgccggtcggctgggatggggtattggcgcgggccctggcgccgcgtccggaggcgcgcttcgaagcgttgtcggaattctggctggccttgcagaagccgctag

SEQ ID NO: 354219 - DNA, 891 bp, Pseudomonas aeruginosa
atggctaactgccttatgggtatgatcagcttgagatttaatactgctacggagaggaacatgaggaaagggataatcgtagggctagctatattgctcatcgctggatgcgagcaaggtgacgccaagagatctgcccaggttcaggagcaagtagagcagctccaatctcaagttaaaactttacagactgccttagatgaagagcgaaatgggccgcttcgattgctggccaaaggtcgtcaacaactacaggatggcgatcttccagcagccaaacagacattagagagacttatcaaaaagtaccctgagagggcggaagcagagcaggcccgaccaataatttctgaagctaatcgtagattggctgaggtggaaacgcagaagaagctcgagcaatctcgtaaagctgaagaggagcgacaggctttagcacggctcgataagaatcttactaaaagtacagatgaaatccgcgagattacttgggtctctcataaaacagagcccattcttagcaagaaaatgtctctatatttcggaaccaggaaggggaatgctgctgggatgccgttgcggttgaagtttcagtactatgatgatgactggctttttgtcagggggctaaccatcaaggctgatgataaggtgtttactctgccaggggttgagtttaaaagagataacggcagcggaagtatatgggagtggagcgatgagccagttagtgactttgcaatgctagatgcagtcttggccgctaagaaagttattattcgatttgaggggcagcagtactacagcgattttgtccttccgaatgctcagaaggtagcaatgaaggaggtgctattggcttgggaacgctacggaggggttcgcaaatag

SEQ ID NO: 354220 - DNA, 966 bp, Pseudomonas aeruginosa
atggccagcgcagacgcagcaggcgacgccaaggatccaaagggtagttcaggcgatagcgcgaatttcaccgtaacgacgcattaccactttcggtatacaaccgaggaacctgttccaattccggatgtgatcgaaagcctaaagtcgatggagcgtatcattaagcgcactccgacttttgttgagcatcgtttcgactctgtgaaagtcaccgaaacccaagttttcgttgagcgtctggagagcggaagtcttgaccttgacttcatcatcaagttcgtctgcagaaccgatgagcgcgccgagcgtgctaaacagttgatcaaggaacttaccgaggataaaggcgtggtaagagacattgttgccgtcggggttggcagtcttttgaccattggtgcatttcaagttctatcgccaggaaagactgacccttcgagcaccatcactgcctaccaaagcgtggttatacaagctggccaagatattggcttcaccgaagaccagattaaagctgcaatcaagaagatacctgaacagaaaaccttgggaaaagacgctttcaacgttataaaacccgcgacccaagaccccaaagctaccattgacgttccagaaatgccccaactgagtattgcccgggacattattgacaaaatgcctgaggactacgaaccaccagcacccacggaaaaaactgcgagttatgactctgtaaaggttactgtggatgccagcgacaggcacaacaatgaaaagggatgggccggttcaatcaacggactagttgatcaccgggtccgattcattctggatgagttcattgatcctgcgacattacacgggaagacctctttctgggcgaatataaccatcatagaacgatacatcccatcaagaaagagatatgagattaaagaagttcagatcaacgatatagttgacgctccatcgagtaactga

SEQ ID NO: 354221 - DNA, 243 bp, Pseudomonas aeruginosa
atgaggcagtcggtagctgcggcagttatctacttgaatggcaaaatccttattactcgccgagccccgggcgagaagttatcgggcatgtgggagtttctaggcagcaagcttgaagctgacgaaaccccgcaagcttgcattgtccgtgagttgcgcgaagaacttggcaacgagaacgtgagtcaatcgcgagtttcgtcacacgacgaaggaatgcatcaaacccggcaacatcattga

SEQ ID NO: 354222 - DNA, 1590 bp, Pseudomonas aeruginosa
atgcaaaaattaatatcatttggtgttcggcagctaagaagctttggggcaaaccatcaaaaaatcccaattaaaccaataaatatactagtaggaaaaaatagctgcggaaaaagtacattcctcaggacttttcctttattaagacagtccgtacaggccaataccaaatctcctatattatggtttggcgatttagtagactttggtgatttctctacagccttacacgacggtgcggatacaatttcattcgattttgagatgatcttagatgtggagtcggaagaagacttatgggagttctccatatctgacggtgatatcttcgaaacaggaaatcgcttcaattatccggtaaacgcgtgtgtaacaatctcaagaaatgcgcccaaccagctagtaacaaaactaacttttgaaatttattcatctctaatcgagatagtatatagcggtgacaatgtcgaaaacgtcacggccagatctggcgataaggaatttgaatttccgctaaaaattataattgagcatggcgcgttttttccgctggagcttcggggacttcgtgcaattaaaggcagcaatagtactgttagaagatttagcattataaataatttaaattctgtagcatcgacgtatctgacggagtttctcagtgggtatcatcatgcttcaaaaagagaggagaaaataagagaagaggttgatgcgctaaaattcaaaccaaagatgcagattctcgatcagcttcaaagacgctttgcaaaggagcgtttctttcaaaagaatctaacagattcgggagaccatatagctgaggtggcatttactctactgttggcaagaagcttgccgcgactattgcgttctgcagacaaactttttaaagatttttatgaaggggtaaggtatcaagcaccactccgggcggcaggtgagagattttaccgatatcaagacctacgaatagatgaaattgatcataccggcagcaacttgccaatggtcataaattcgctggataaatggcgacagcaacagcttagtacttggatcagtgaaaatttcggctttgagcttaacttaaaatcaaatggacttcattacgagctacttattaaggaagctgaggacaaaaaatttcacaacattagcgatatggggtttggttactctcagatattacctgtcatagtttccatttggctggaagtagtggcagatattaaaacaagaaaatatgcaattaccaaaaataaaggaccacgaattatcgtacttgagcagccggagcttcaccttcatcccgccctgcaatataagtttggcttagcgattgccaaggtactgaaaagcgctaagaaacaagacttatattttgtgatagaaacgcacagtaagcatttgatagatgcgttgggcgaggcgattagagaccaacagatccccgaagaaatagtaaatattgcgctatttgaaaaatcggagagcggggtaacgcaaacgaagatatcaggctttaattcggaaggatatcttattaattggcctattggtttcctgtctcctgaatatgattattaa

SEQ ID NO: 354223 - DNA, 1017 bp, Pseudomonas aeruginosa
atgattattaagctaccaaaactaactgagatagtcggtgacaaacaagactttttggtctcgattgataatttgctgaaatcgcatggcgagggcaagcaccatttgtggatgccaatagagactgtaaaatttttatcgaccatggatgggctttgcatattttcaaagcaagttctaatagctctaatgagtcaggttgtagaggaggcaggcctctttaaggagttttcattttatgccgatgttaactttgaagacaaacacatcctaaactaccgggaaggagttttacgtataggatatggtcacttcttagatagcaccgccatccaagaaagcatacttctttctgaaaacggtttagatggtgaggcatatctatggggggcaaatgtatacctggctctagctggtatacgagggatgcgagtgaacatggagattcaacctggaggcgggaatactacttatgatcaatttgaaagactagaaaacagtaaaagattttttgcatgcatcgttgatagtgatcaagatcatcccaacgctccgctcggcgaaactgcaagaagattcaatcgcgtagaaaaaggtttctcaaaacggaggtactttgaagttcttaactgccatgagcttgaaaacattctcccattaaaaattgtcaaggaactatttgaagatatttgcggtactagtttggttcagtctaacaaatacattaaataccgagtctatccagatcacaaagcaggactttgcattaagcaggccagattagatgatgcaaaatacaaagccaactactggtctatctttgaagacttggaagaggaggctttggtttgtgctagatttggaaataacatgctgaaaagctgtattgatttcatgaaaccgttaagtcctaagaaggcagcaagctatattgatagcaatgtcgatttagaatggattagaattagtaagatgatagcatcttggggtgtggggggcagaggcctcagaagttaa

SEQ ID NO: 354224 - DNA, 897 bp, Pseudomonas aeruginosa
atggctgaaaagctcaggaaatacgcgatcgatttcttcacggggcaactcggcccagtgaaccacaacgtaactctcagtaccttcctccggcacctgacacaaactggctgccaccacgtcgaaggactgacttacgacatcgaaatcaggaatctgcaggagccagatcctggagtattccaaggtgtcttcgcgaagatccgaaaggatgaactcccacatgccggccgcgccggtcaccctgacagggaactaggtctcgccgacgatgaaggcctggtagacaagaaccactttgtctactttcaggacaacgaactgctcgtaatgcaggcaaatcggcatgccgggactgctgtcgcactgggcaagtaccttaccgatctcaatggccagcacgcggtatccttcaatccagtaattcagccagatgccactcgccgtctaatgcgcgatgacctcacgccgatcagcatcgaggcgagttttgctcggccgacaaatcccgatatgtaccctgacgatgactggtccccacaactactggacaccctcgcgcagatcggtggtggtaacgtgaagctgagcatctcacgagacaagaagcgcgtagccgaaggagccgatcgactttcggacagggctcgaagagctgcccaggcattcatgcagatgccaacggtgcggaaaatcaaaatcgacatggaagacgaaaacggcatcgtctatcctatcgatctcatagcggatcgtcttaaggtcaagattgagatactagtcaacgggcgctatccgaatgaagcagccatgtacagggctcttcgaggagcaaaggatgaccagcgcgacaatctccaacagatcttcggggttcccggtgcggctcttaattag

SEQ ID NO: 354225 - DNA, 156 bp, Pseudomonas aeruginosa
atgcttctggcgctcattgcctgcctggtggcgctgacgctcagtgacaaatatgccgtctactcaatcgcagttagctttagcttcctctccgttgctgcttttgacctaatcgactgcaccacgaaattaatgaaggtcatggcccgtatttag

SEQ ID NO: 354226 - DNA, 222 bp, Pseudomonas aeruginosa
atggcctgggcgaatgagcgcgccgagggcgtgatcgaggaagcaatcgtcgctatgcgtcggtcggtgatcccgcgccacgaccagttggtatggcgcggccagatcgagatggcctacacgctggacgccatcggcacccggcaatacgacgacatgcgccgccggctcgacgccgcagcggatgcgagacagcaagaactgaggagcatcgacctatga

SEQ ID NO: 354227 - DNA, 723 bp, Pseudomonas aeruginosa
atgactggcataacctcaattggcggccaggccgtcaccatgaccagccgcgagatcgcggagcttaccgggaagcagcacaagcacgtgatccgtgacatccgggaaatgcttgatgcgctggaaaaagatggtccagttttgggccatgtccgggaggagaaggacagccgtggttacacggagaatttccacctcgaccgcgagctgaccgaaaccctggtcaccggctatagcatccctctgcggcacaaagtgatccgccgcctacatcagctcgaagaacaggtagcccaaccagccattccacaaaccctccccgaggcactgcgcctcgccgctgacctggcagagaaatgccagcagctcgccgccgagcgcgaccacgccatcgccaccaaggcgcagatcggcagccgccgggaggcccaggctatggctgccgcgtcctccgctgttcgccaggtgcgtcgacttgaaaatgagttgggccgcggcactcgcttcgccacggtcacggctgtcgagatcgccaccggcaccaagtacccgttcaacgcctatgtccaccttcgcaagtggtgcaaggccaatggcgttcagcccgagatcgtccccgaccgccgttttggcgaagtcaaggcgtggcctgcgggagcttgggcagccgtttatcaaatcgatctggcgaccttgttcggcgcctctggagcaaaagcatga

SEQ ID NO: 354228 - DNA, 597 bp, Pseudomonas aeruginosa
atgtttaagaaagctgtggccatgatggcccttcctgtcgcccttggaatcactttccacgctcaagcggccggcttatccaccaaggctgaccccgtggcactagaggtttgtacggcctccctcggcgttctgagcggtaaccgtgcccttgttcgctacatccgtgccaaaactccccattggctgatcatggaagcggttagcgcttcccgtggaaaggtacagtcctgggagtgcttgcacgacgctccagagaagaaggtcactttccgcaacccttattctcaggaaactgacccggttttcgcaacgtattcagacgctccaacgggccctgcttacatgatccgggatgcagtaggtaattggggtatttatgaaagccccggcatagttgcggacctaggcccttttagctacaccgaccccgctcaacaaaggtgccaggccctggctgccaagaagttcggcgtgccggctttcactgttgagatagggaaaagggatgaggagttgtctgatagcatggccacttaccgcctcaagggtcgcgttctcctccgcacttgtagcggcctgctcaacggtctatag

SEQ ID NO: 354229 - DNA, 657 bp, Pseudomonas aeruginosa
atggggcttagtgaagaagaggatagcctgctgtgtgccgttatagcgcatgaatcgatcttatgcgataaggcgtatagggagttcctgtatacggaattccgtttggctcatggaggtaacgatgtcaaggagatacttcttgcgcacggtgcttttcaagcttttgtacaccatctgtacgagctttgtattgcgctaactcagcgtgagctaaagaatattaagcaaataaaatacgaagtcgcagataggcacatcagcgtgatggtggagaaaatttggaacgttgagcggaggaagtcaggctcttccctatctgggatgactgaagcggaatttcgcgacggttataatgacttttctaagcactttagaagggcaagaaacaactcggctcatgcattaataggtagggcaaggggtgggcagtcgctggacgaattttattctaagtattgggtgatgttaaagttgctttttgaatattccactaaatggtggcgggccatagatgtagagggggtgaattggcatgacattggaaaattcaatattcgtcagattgcactacagagtgtgcatgaacatttgctgtccctcggcaagcaggggctgcctgtgccctccaataagaaggagtcccccgctggctag

SEQ ID NO: 354230 - DNA, 1698 bp, Pseudomonas aeruginosa
atgctcaacggtggaccgctcaatagtgctgcgctgaactcggccgctcactccgctgtgcctggtcctgagccggtcatccctggctacgctttcacatggcgcccaatcgtgcgcgttggcgatgacgacgttacgccgctcctgaccggggagatcgaggtcgatcgtgaagagggggcggctggcgtcgcgtccttttcgatctatctcggcgacggacctgttgtccctactgactggatcggtcgaaccgtaaccatcgactacgcaacggagaccgcgggtgaactgagtcaggggcgacggtttacggggagagttacccagccagcctggaatcctgttcggcgcgtcctggacatcagttgcacggaccagttgcagcagcgtgtagaggccatggagattgcggccgtcgacgccctggtcggcggtgcctggtccgccgatgtgttcgagccggtcgatggacgctcgcggtgggactacgcccaggagcgtttgaccagcgtcaccgggagcttggactgctcgccatatggtgctctccgcgtcacatcatggcttgctgtggcgcctgccttcgagttcggcccaggctctacggtgtacggaacgcttgcagtcgagctggccgacctgagttcgcagacgaacagggtcgagatcgagtgcgactaccgattcagccggctctggcagttgaacgcctcgtatggttggcagcaccccggcacggggaacgcggtcggcgaggcggggttctgtaattggcgcggcgacgacaccgagttacctgatgtcgagatgatcacatcggcgaccgaaagcagcggccagacgttgttctatgcaacttggtatccgctgccacccactggggtctactgcaatccgccggcggcatgggtcaacaacttcaccgaattgctgctcggcggaaattggattgctggccggcgatgggtgcagtccgtaaccgagcgctaccggctggtcatggaagttcagccgagcgtgacggcgaccggcccgattgtcggtcggcagcgtgcctcgttcgagatcgagtcggacagggccgagcgctgggaaagcgagccgatcaccggcggcagcaccggccacgacgacgagaaggatggcaaccggcgtttgtccgcgctgaactgcctgctcgctcagggagcaacgacgctcatcgcagcgcaccgtgggacgactgtgacgtgggacgtgcctaccagcatggttttaccgatcgacctggtgcatacgctccgcctcgatgatcagggcgcgcgtgcggtgggcaagtgtcggcgcattgtcgaccggctcgacctcgcatccggaagcgccctgaccacgatctctatcgcggtgatgcgaggcggcgctggcgcagcagatccccttgttccgccggctggctcgtccgatcccgccagcccaccgtcgggcggtggccaacttacgacgcagctcggaggtcgcaacggaagtcccgcgtatgacgatgaagcggatggtttctcgggcaactggagcaatcgcgatcccggcgccgaactgttcccgcggcgcttctcggtgactgcaaacgatattccggagacctaccgggacgaacatgcgccggagatcgcagccacttaccgagtagctgtacctgatgacgtactggagatgtag

SEQ ID NO: 354231 - DNA, 546 bp, Pseudomonas aeruginosa
atggcaactgttacgcacgtcctgtccggcgccggggagccgctcgatccgccccccagcatcggcgctcactacgtgaacacgaacaacggcgcgctatacctggcgaagggcaccgcgagcggtgccgattgggtgaagctgggtagtggcggtggcagcgctccgagcgaggtgctgcatgtcaataccgatggccagttccttctcgagcctcaacactcatttgttgaggcccgtctgttcgcaattcccgagctcggcactgcagcaattggaatcgatcccagcacatcccgacagttcgacctgaatctcagaaccgcggctccgagcgggcaacaactgcagatcagagttacatcgggtgaattgcccggaggtatgtcgatcgtgggcacctcgaggcagtgggcggttcaggagtcgtatggattcgtgatcaatgcaaatgacctcaacggcgaggtgtgggcgcgcgtctatttcgatgctgacgagctcaccctgtcgatgcttgtgttcagcgatgtgccgaacgcgtag

SEQ ID NO: 354232 - DNA, 348 bp, Pseudomonas aeruginosa
  misc_feature (310)..(319): n is a, c, g, or t
atgcgcaaccctatcgctttctttaaattcctgccagtctgcggatatataatcagcagccatcttcaattcattcacctcttcttgggtgaatgtaaagccattggtcgtttgacgattatccacatagtaatggaggatgcccatggcgatcaggtttttgacctgcgcatcatctgggtattccctaagaaactcttgagccagctctctccaaccttcaactcgctgcgacgccaacaggtggatatgcgcaatacgaacaccctgattcaatcggaggcgttcgctgaactgctcaaatggatcnnnnnnnnnnttctgatattttatacgagcagcttgtaa

SEQ ID NO: 354233 - DNA, 588 bp, Pseudomonas aeruginosa
atgacgccggcctgtgtacccctgcgcattgaaaaaggggcgacgttccgcgacacgatgcggatcatgcaaccgagcctggtctaccggccgatcactcagatcgcgccgaccgctcccgtccggctgaccatccctgggcacggattgcctggcacgtggctggcctggatcgatggcgtccagggcatgtccgaactgaaccgcgctcggcttcggcaattgcctcaccgggtagtgtccattgacgacgacacgatcgagatcaacctgctgtcagccgttgggctggcgcctttgggtgggcaactgatctatcagccaccggttgaccttactggcgccgaggtgcggatgcagatccgcgccgagccaggcgggactgtgctgatgacgctggcgctcggatccggccttgagatcgccggcgctggaacgatctcgcgggagatatcggcctccgctaccgcggcgctgatgtggtcgtcggcggtctacgacctggacgtgacatacccggatggaacggtccaccgctattacagcgggccgatcagtgtgagccgcgggggagggtgcgatggatga

SEQ ID NO: 354234 - DNA, 369 bp, Pseudomonas aeruginosa
atgaacgaccgcacactactcgaactggcggcgcgggcggcggggatgaacattcagcggagcaggctagacgacccgctacatcgtgattttttgatgaatggcgaaggggtaaggaatccaggtcagtgcagcttcccgtggaacccgctcaccgacgacggtgacgcgctgaggctggcggtgaagctgagattcgaggtccagtgctacccaggcatggcaagcgttatctatgacgatggctcgccagatggcgattacctgcaacagaaccccgagaagggccaaagcgatgaacaggcaacgcgccgcgccatcgtccgcgccgccgccgagatcggcaagtctatgggaggtggggagtga

SEQ ID NO: 354235 - DNA, 1179 bp, Pseudomonas aeruginosa
atgagcgctttgcacatacttataatcccgtcgtggtatccagaatatccaggcgatatcaacggtagttttttcaaggaacaggctgaagcgttagcgaagcacggatgcaaggttggggttatctaccctcagctccgatccttgaggaactggcgtggagtgttgaaaggcgaatccggtctttctcacgaagtggagaacgggattcctacatacagatggcacggcgtgaactggttcccgaggatagccaagctgaacgggtggctatgggagctacacggagcaaagctgtacgaaaagtacgttgatgagcacggtaagccggacataatccatgcccactctctactttacgctgggcacctggccagcaagatttcagaaaaatcaggaatcccgttcgttgttactgagcatagttctgcttatgcaagggggctgtataacaaatcacaaatagcacttgctcagactgtagccccaaaggctggagcaaggatcgcagtaagcactgagttcactaagcttttgagcaagctattcacttgcgagaacaatgattgggagtacattccaaacattgtcaatcaagacttctttgacagaagtcttgatcagaagaatgaagatgaagacagtttcgttttcttgaatgtagctatgcttgacaggaacaaagatcaggcaacccttctaaaggccttctcaaaagcatacgccaacaacgataaacttcgcctcagaataggaggagacgggccttgccgagaggagctagagagcctatcagaggaactaggtatatcagatagtgtaacgttccttggaaagctgagccgatcccaggtaattgacgaaatccaagcatcagatgcttttgtcctttcaagcatatatgaaacgtttggcgttgtcgtggttgaggcaatggcacttggcaagccggtaatatcgacatcctgcggaggtccagagtcaatagtttctaaggagactggtattctggtacctaccacatacgcagataaactcggacacgccatgatttcactattccataatcgacataagtacgatcagcaatccataaggaactactgctacagcagattcagtgaggaatctgttgtcagctcattgaagggcgtctatcagagcctggttaagacgtga

SEQ ID NO: 354236 - DNA, 198 bp, Pseudomonas aeruginosa
atgtgcagtgcctgcggtccagtgaaatacagcgatggaaagccgaccaagttcggcaaatggcacgatcagttcgaacgcgtcttcttgccgctggggatgttcgtcaccaactgccgcgggaatttggagcatcacgaaactggtgatgagaactaccgagcctacgcaatcaagtcggaggtgtcccatggctga

SEQ ID NO: 354237 - DNA, 318 bp, Pseudomonas aeruginosa
atgaacgaagacattctgaagtgggtgaagcgcaataaccgcaaggacgctcgcctgatctcctacaaagacggcgtttacgatctcgtctacttcgacaagggcaaggttcgcattggcaccctcaaggatggaatgtactgccgctacggcatcaactgccgtggcgcaatgcactcggaagaccctatgagcctatggcagtcgagcggtggggcctgttccagcaatgacgtgaagatcatgcaggcctatctctctggaggctgcacgctgccggtgttcgacttctcgcagatcaaggggctgaaatggtaa

SEQ ID NO: 354238 - DNA, 387 bp, Pseudomonas aeruginosa
atgacgtcccgccgaccagcgacagccaagaaggcccgcagggttcccctcaatagcgcggcctggaagcgtctccgcgccgaggtgctggccgatgagccgctgtgccgtgcctgcgcctcccgtggtctggtagtcccggccacggacattgaccacatcatcaacggtgagggtgactacagcgacgacaacagccgcgccaaccttcaacccttgtgccatgaatgccactcgctcaagaccgcacgcgaccaaggcaagagcgtgacactcggctgtgacgtgtccggcctgcccatcgatcccgcacacccgtggaaccgcgaaagatcaccagcaaccgaggacgggaacaccgcgcccgacctgctctcttatcgctaa

SEQ ID NO: 354239 - DNA, 303 bp, Pseudomonas aeruginosa
atgaaagcggtgaactggaacgacctgctcaacagcgtgcgtgatttcgagcacctgcccgatgaccagaaagagcgcgcgaacgaggccgcaaccaattacatcacccagctggcggctggcatctcaggcattggcagcctgttggcctgtgcagcctccaatggcgtaaccgggctgaccgacgaagcggccaccgatgttggctggatgctgaaaaacgtcggcgatttgattgtcaggctcagtgatatcgcggtagcgactgtgcctgaagggcgtgacaaggagagcgcgcagtga

SEQ ID NO: 354240 - DNA, 663 bp, Pseudomonas aeruginosa
atgcctgttgatagcttgcttggtatgattcatcctcagcgcatcaggaggtgccagatggccaagaaagaacccgccccgaagaaaaccgagacgctgacattgcgcctcgatccgaaaactaagttcgcgatagagctgctcgccagggagcagaaaagaactcttgcgggcgtgattgagtgggctgttcagagggcaatgagcaatcagacggttgtaaccggggcaggcaaaggctcgatgcagcaattggttgacaaggtttggagccctgatgatctagagaaaacaatatatttagggcttcacgcggagcatttgcttagttacgaagagtattgtgtttggactgttgttaaatctaatccattgcttatagagatctatgagacggataaagaagggcgtatagcaaggttcaagcttaatagggctagaatcgcttacgctagggatttgatttaccaaaagtccgaagagcttgccgagaagggaagcgttgttcctatcactttggaggacattcagaacgttagcggtggtgctttccagatatgggagcttctagctaagaagcttggcgaggatgatggtgaaacatcctttgaagaaatcaccgaagctgtgaaagttctaaaacttcaaaatgctctcaaatga

SEQ ID NO: 354241 - DNA, 2124 bp, Pseudomonas aeruginosa
atgattcgtggcgtgcaggaagagatcaaaaaatccacgaacactgcattggccaatgtggggtcgattgtcgatggcgaactggcgtatctcgcaagccagaaaaaggaaaaattaaatcctgccgaggcgacacccttgcagatggcctctgctgaaaaagccgcggcggtggaactgctggcgtccaaacagaaggaactggctgacgcacgcaccattgcaaatgcattctttggctatgaccctctcatggtcaattatgtcaatgtaatgaacgaaatctatggccgccgcgaagataaagatttcagtttcgacaactggtcgaagtcttattccgccgcacaaaagatccgcttgatcgaagcggaaatcagcgtcctcaatagccgctcctccgccctggatagcaaggtcgccgaactgacccggcttcagcggctggaggacgcacagcgcgccgcagaggcagcccggcagactgaagcggaacgcttagcgcaagagcaacgtcaagctgaagcccgacggcaggccgaagaggctcgtcgccaggccgaggctcagcgaaaagccgaactgcaacgcctggccgaagcagaggccaagcgagtcgccgaggcggagaaaaagcgtcaagacgaaatcaatgcgcggtttcaggccattgccgtatcggaaagtgaggccaagcgtatcgaggagatctacaagcgcctggaagagcaggacaaaatcagcactcccaccatcacgacaccttccgcagtcaataccgactctcgcgtcgaagacgcactcggccatactggaaccaacgtgactcctggaggagaaactggagcaacgggcggcaccggccgggatgtcgatactggtactggacaaggaggcatcacagcgcgcccggtcgatgttggcagtgtttcaatccctgaccggcgtgacccgacaatccccgaccaaccagggagggatcttggctcgctggttcctacttttcccgatttccccaccttccctagttttccaggcgtcggcgtaccggtagcgcccaaaccgctggccccggcagggggtggtgccgccagcgtttccaggactctcaagaccgcagtggatttgctttcggtggcccgcaagacccctggtgcaatgttggggcaggtagccgctgtcgtcgccaccatggccgtcagttccttctggccgaagctgaacaacggtgaacggcaagcatccttcgccattccggtctcggaactcgcaccgcccctggcggttgactggcaagccattgccgccgccaaaggaacggtggacctgccttaccggctgaaaaccctcaatgtcgatgggtcgattcaaatcatcgcagtaccggccgagccgggtagtgcggcagtccccgtcagggcactgaccctggactccgcctcggggacctacaaatacacggctaccgggcctggcggcggtaccatcctggttaccccggatactccacctggccagatcgatccgtcgtcttcgacgccggcagtgccccgtggtccgctgatcatgtccggtaccctgctgattcccaaggaaccgcagatcgagtcctatccagaacttgaccaacgcgagttcaacgacggtatctacgtctacccagaagacaccggtattccgccgctctatattgtttatcgagatccgcgcgacgaaccgggcgttgctaccggtaatggccagccggtcactgggaactggctggccggtgcctcacaaggtgacggagtgccgattccgagccaaatcgccgatcagttgcgcggcaaggaattcaagagttggcgggattttcgggagcagttttgggtggccgttagtaaagacccattaattatcgaaaacctctcccccagtaataggtactttgtcagtcagggccttgctccttatgctgtgccagaggagcatctgggtagcaaagaaaagtttgaaattcaccatgtagtccctttggaaagcggcggtgctctttacaatatagacaatcttgttatcgtcactccgaaacgccacagtgaaattcataaagaactgaagtctaaacgcaaggagaagcaataa

SEQ ID NO: 354242 - DNA, 273 bp, Pseudomonas aeruginosa; identical to SEQ ID NO: 336099

SEQ ID NO: 354243 - DNA, 642 bp, Pseudomonas aeruginosa
  misc_feature (330)..(339): n is a, c, g, or t
atggtcgcacctattgcactttctgttcggcgtatagagcatggtgatggctttcatgcttatatgttgcgtagttcacaaggcttgctggatccctttcttggggtagaccatgcttggatgagtgcccctacttttgcacctcacactcatgctggcttttctgctgtatcatatctctttcttgactccgagacaggggtccataatagagactctatcggaacagacaatataattagaccgggtggggtacattggactactgctggtaaagggatagttcatgaggagattccttctgagtcgaataaaacagtacattccttnnnnnnnnnncgaatacctataggtagttttcacggtgttaagtctcctctagatccacctaccgatgtaacgttgcttgacataactttgggtgaaaatagctatcttaccatcccagttgaagcaggaaaaatagcgtttgttattccggtctttggtgaggttgaaattggtggtgagttatatggtggttgtgacgttaaagttgctttcttgtcgaggagtatggagtcgtatactgtagagttgaagtcgaataatggacgtgcgggggttgtagtatttgttggtgaaccgattcatgctaagtaa

SEQ ID NO: 354244 - DNA, 1632 bp, Pseudomonas aeruginosa
atgtcagccactgctaagaagccaactgtcatagctggcaatcgtgattcgcgcgatattgtagaaagaattcagtccaggaaatcggaagagctagttgttgcatttgctggagctgtaggctgtaacctttctgaggttattcgatccgttaagactcattttgaagagtacggatacttagctaaggttgttaaagttagtgatcttattcgagagcacttctcggaaaatcctgcggaacttccagcaaaatacctaagctgcgatttagctaatctcacgggccttgatcgctatactgctttgcaggacttgggtgatgagctgcgctccacctatggaacaaaggctcttgctgcattatccatgttaactatttccactagccgcgagatggagatcgaagctagaggtgacgataagccaccgagggcggtttatttagtagatcagttaaaaaacccagctgaggttgagctctttaagctcgtctatgggaatctcttttatcttgttggtgtgctaagtcctcaagatgttcgtttgaatcagctggtgcgcagtgagcgaatggaacctgctgatgcccaggctcttattagtcgcgatcgcaacgacaataagaagcatggccaacgcttagagaagacgattcagcttgctgattattttgtacggaataatcacgataatatttctaatttgacaaagccttgcgctaggtttgtagaactcgttcatgggaaaaacggcattactccaaccagtgatgaatctggtatgtacgctgctttttctgcttcgttgaagtctgcgtgtcttagtaggcaagtcggcgcagcgatttctgatcagaatagaaatattatttcattgggctggaatgatgtaccaaaatttggtggtggtctttacagttccaatgatgaaggcggcgatcagcgctgtttctatcatggtggaaagtgttataacgacctttataagtcccgcctgatcacggatattttagcgattgtcgagaagcaggttgctttgagccctgagaataaaactgctctgggggcgctgattcttgaagaaactcgtgcaggctctattattgagtactctagggcgattcacgctgaaatggaagccattctcgggcttgctaggcatcagggagtctcttcacacggatgcactttgtatactacaacttacccttgtcataattgtgcccgccatataattgcagcgggtatcgcgagagttgtgtttattgaaccttatgagaagagtttggcaatggagttgcatgaggatgcaatttcttcggattcacaggtgaaaaataaaactactttcgataattttgaaggggttgctccaagaaagtattcttcattcttcttcagcaggggggatcgaaaggatgagcaaggatcagctatcgatatcgtaaaacaggatgctcgtcatataggtgttgaatttcttgactcctatcagattattgaggctcgggttgttaaggatatgtgggaccggctgcatcctggctctggttcaaatcctcctggtatccagtccgtcgcttctcctgtagcaacagttgtcgatccagacgacactcctgctgcttga

SEQ ID NO: 354245 - DNA, 810 bp, Pseudomonas aeruginosa
atggatgccaatcaaataattagctcaataatttccggagcagtaggtgccggactttccgcaggaataatataccgattcggagaaagcatattattcaaacatctagaccacaaatacagcgaaagactcgccattaaaaacaatgaacttcaaaaacaactagaagaaaagaaaaacaatctgagccactctttgcagcaatcccttgtagactacaaggcaaatattgatgtacttattggagaaagagcaaaattcctagaaagaaaaatcaactacatactagaaataaacaaagcgcatgtagaggcagctcgccaattgagaatattttccgactgggcgctaggcggactaaaagaaaactacgaactactatcgtcaatgtcagagcgtgaagcaagaaaagctacagcacctattgaatttaaatttcgaatgaatttactaggagaaaaattaggaaatgtggagactaagctaatctcctatcatgaccaaatagttttcaatctcccaatcctaccggttgagtatacgagaaaagaaatagccctgctcaacgagatgtcatccaatcttgaaataaccaattctgcgtatgggagaatggctggaattcttggagagcttgcagagccagaggaaggcttcacatacatagagcttcttaatgagctcaaagaaaacctagacaatacggagaaaagcaacaaattctttgtaaagatagataacggaattttagaaaaatctatagaggggcaaaaattaatagaagcgcttcttcaagaagaaaagaattga

SEQ ID NO: 354246 - DNA, 699 bp, Pseudomonas aeruginosa
atgaaagcagattgggacgacgcgccgcagcacctgaagcgtaaacgccacagcgctagcaaatgggctgccgcaatcactataggcgtcgccttcaccgctctggctgcctacgtagccgaccacaaactcccctttccacccaagccttcggtcactcaatccaggcccgctgaaaactacacaccggcatacgaattccacgagccaactaaccagccaacagcgacgccagagcaactgttctggaacgacgtcaacgaacgcaaccgccagcaggcccaaccgaagcagaccgtctacaacgacaccaactacatccccaaaggcgcaacgaatgttgtcgacatggaggcagtccgccaatccgaggcataccggaatcccactgccgcaacgagcagagtgtcacaaaataacgtcgagcagtctggtgcatgggtcgataaatggagcggtggcgctcattactatgcagagtggacagtgctcaataattacatagacgacacctctgtctgcgccaatcacaaacgcggatcgatcgactatcgcgaatgcagaaagggagctaagcagttcttcaaggaggaatgccgctcttgggaaggtcgatggcagagcgaccgaaaggcgaacagtgaaataatgaggcaacgcttctgctccgctgcaagcagctttaaccccatgggttag

SEQ ID NO: 354247 - DNA, 324 bp, Pseudomonas aeruginosa
atgaccaagccaaagcatcaagtccgtgtcacggttaagtccgctggcgaaatttacgagtcgcctgaggggcgcctgttcttcgacgacaagctggccaagttcactgatctgtccggcgtgcgcctgctgcgctgcggcgtggatacggtccgtcagttgtacaacggcatgatccgattggaagtgatggcgctgttcgatgagccggaagacatcgtggagttcgctggccaccagtgggtcaagggcagagtagggcgcgacttgggctaccagtaccgcctgcagaacgccaacacgggcctaattatcacaacgtga

SEQ ID NO: 354248 - DNA, 192 bp, Pseudomonas aeruginosa
atgatgaatggcgggaacatcctgacgctgcaaaagatactcggccacgcctcgctcaacatgaccatgcgttatgcgcacctcgcgccggatcatctcttggacgtgctgacgctgggaccgatcagggactttcgacacttcttcgacaccgacgaagaaccgtcttcccgggctgagccgagagcctag

SEQ ID NO: 354249 - DNA, 159 bp, Pseudomonas aeruginosa
atgaacgcaactggatggatcaacgccgtcggcctgctggtactggccttcgtcctgtgggcacggtgggcgcagttccatcagccggtttacccggtctgctggctcggttgggaaggctcggcctgctggtcgttggccgcgcccaccggacggtag

SEQ ID NO: 354250 - DNA, 378 bp, Pseudomonas aeruginosa
atgcataacgaacgtgtgatcctggatgctcaaagctcgctgcgttacctgggcgaaaccgtgctggtggaactgggctgggaagactaccccgaaaccgtgtggcgcctgctgcgcatcatcggcgtggtgctactggccgagggcgtgcgtgacgaaccgcacttcatgacggtgcccgtcggcgtgaccgacgaattcgcgaatgagaccttctgggacaccatccgcacgatcagggtgatgcgaaaccgctccggcaacgtactgggccgcatcgcccactctgcaacgtcccggtcaggggccgcgctcccggctcgtcggaacagctccaccgttccggcgaacggaagcacgggcgcagcgcacccttga

SEQ ID NO: 354251 - DNA, 1536 bp, Pseudomonas aeruginosa
atgttacaagaagatcaaatggaaaggctcagggaagtgatttctgagaatcttagggttcagcgtgataatgagccgatagactatataagcataggtactgcgctccaagacgcaaaagcaaagcagaatcacgcgatttttgcgcgtcgcggttgcggtaaaactctattgcttcatcactcgagcagaactcttaagtccgagcttaaaagcatctatctgaattgtgaagactttaagagacactctttcccgaatgttcttattgagattctttcgtcaatatttagggagttggagaagaatataaccgcgtggtttggtaagcggataaagctgaaaaggattgttgctgatatattgcagagcttgaatagactgcatgttcaagctgatcagcaggatgaagacgttagaagtcgtacagctcgagaggaaagtctcggctttgatgcaggctttagctttgatgaagttaaagttggtataagcggttctcaaaaagatgagcaagaagttgagcgctcatttaaagttcaccgagacaagctccaggagcttgatcgttggctgcctcggctgaaggaaaggattcgagagctgtttgatgcgtcgagtatagttaagggtttgcttctgcaaattgatgatctttaccatttgaagaagacagaccaagctttcgtagtggattacattcaccgcctttgtaaggatgttcctatttattttaagatcgccacgcttaggcactcgtccacattatatgttgatcgtgacggccaacctatcggtgcccaagagaggcatgattatcagcctataaatattgattatacttttagtcattttccgaaaacattgcagcagaataaagcaattcttttgcagttcggtaagacggctggaattgaagaggccgatttattggctttattcaagggggaaggttttgagcggctggtgatggccggtggcggtgttccaagggatgttctttcattgtttctccagttgctcgatgaagttgtgcagtcaaacaacgctcgaatcggaaaagacgatgttcgtttgctctctcggaataattttgagcgaaagatagaagagcttaaacaagactctaaagacgatgagcaagatgatctaattaagggtatttatataattaagagtttctgtctcgaaaagaaaataaatatattcttgatcgaagagaagttgcttcagcaaaatgatgtttggcgcgctctgatatataggcttctggattataggattatccacagttgcgcaacggcgctaacgcacaaatcttctgaaggaacgtatcaggcttttgctgtagatattggatgttatgcccatttccgtaagctggatgggcggtttacggaggttgatatatcagatgttaatgcaaaagagcgtatgcgctcttctcctattctagatgagaagaagctgaactctatcctcaatagtgtcccggtaaatgctgaggtttcgctacttgagccggtgcaagaataa

SEQ ID NO: 354252 - DNA, 174 bp, Pseudomonas aeruginosa; identical to SEQ ID NO: 330002

SEQ ID NO: 354253 - DNA, 690 bp, Pseudomonas aeruginosa; identical to SEQ ID NO: 335380

SEQ ID NO: 354254 - DNA, 462 bp, Pseudomonas aeruginosa
gtgaagaactacgccgcctggctgtcgaagaagaccggcaagcactaccgcatgctcagcgaggccgagcgcgagtacggcgcccgcgccggcagcgccggccccttccccttcccgttcgacgaaggcaaggaatacagcatcgccaagcacgccaacacctacggcgccagcgatggctacaacttcacctcgccggtgggcagcttcccgcccaacgccttcggcgtctacgacatgcacggcaacgtctacgagtgggtcgccgactgctggcacgaccactacaacggcgcgccgagcgacggcagcgcgtggatggaggacaagtgcgagctggtgcagatccgcggcaacgactggggcgagccgccgatcttctcgcgctcgggcaaccgcaacaatgcctaccccgacgcccgtggcgactggataggtttccgcgtggcccgcgaactctga

SEQ ID NO: 354255 - DNA, 1299 bp, Pseudomonas aeruginosa; identical to SEQ ID NO: 336048

SEQ ID NO: 354256 - DNA, 324 bp, Pseudomonas aeruginosa
atgcccttccagcatgtcctgcggcgttacgaccatggtgatgcacagcagcgtgtcctcgggcattcgatcgaacagggcgttgaggccatcgcctttgagcgtctcgccggtgaagtggcctgtcagcggcgccttgttcaactggtcgaccacgatcactcggtgcggcatggcatcgaagagccatacgccctgggtggcatcggaaacaggctgccgatagaacaggttctgggagaagtcagtgccgtcggccagtggcaattcatcctgcaggatcggttcgtccggacggcataccagttcgtagaagcgacgtag

SEQ ID NO: 354257 - DNA, 291 bp, Pseudomonas aeruginosa
atgaacgtggtccagcagttctaccagctcctgcagtcagagctgcagacgctgcgcgcgctccccagcgcacagggcgacccgcgagcaagctctaccgccagcgctccctcggcgccggccagtgacttcctctgcggcaagtgcggtctgcccctggtccaccgaaagaaagccggcaagggcggcttcgacttctggggttgcagcggctatcgcagcaccggctgcaaagtcagctaccccaccaaggacggccaacctgacttcgacaacccgcgcgggctatag

SEQ ID NO: 354258 - DNA, 507 bp, Pseudomonas aeruginosa
atgaacaagaacgtttataccggcggagaattgagagggggaaagctcagctccgaaggtagaacgaccgtcggcgagtaccttcagatcaatggtttggcggcagaaaatgcaggatgcgcccccaatggcctggtaggcagagacaacagcggccccctattctgcaccgatgggctgtggaaacggcccagtggcgtgaatatcgccacccctgtggtgctggcacagtatcccgccgataaccgaccccgcacccactgccaagcggtatccagggacgcgctgatcaatggctccggccccggcgttctgcgcctggaagtcgatggcgtgatcgttggtcaagcgcgctccaccgctgggcgaaacgctgacgtagttgaagacgcctcgatctccgccatggtgaaagccggacaccggttctgcctttacagcaccgttgtgctcgcaggattcggcaactccgccggcatgcgtgtgacggccacctacctcaactag

SEQ ID NO: 354259 - DNA, 489 bp, Pseudomonas aeruginosa
atgagcgacagcacctgggtgcgctcctggatgaacaagaacgtctacaccggcggcgagatgaaggcgggcaaactcaccgccgagggccggacggaagtcggcgaatacctacagctcaaaggcgtggccaccgaaggggccgactgctcgccgaacgggctcgccggcattaccagcaccggactctggttgtcctgccagaacggaaagtgggggcgaaccgccgcctccatgcgcatgaataccactgcgggcgtgatcaaggactggtgtacgttgcacggccaggacagcggcatgatgtactacgactatgtccgctacgcgatcacctgcggcggccgattctgcgcggtgggcttcaaccagacctttggcaccaactactcgttcggcctgatcaccgagatcggcccgggcttcaactatccggagccctacaagacccccgactcgaccaacgtcaccgttacctgcgtgaactag

SEQ ID NO: 354260 - DNA, 1101 bp, Pseudomonas aeruginosa
atgaccatatcgcatgagatacgggtcggggattgcctggacgctctccgggcaatgcccgaccagtcgtttcactgctgcataaccagcccgccctatttcggcctgcgcgactacggcatggccagccagatcggcctggagcagacgcccgacgagttcgtgtcgcgcctggtcgaagtcttccgcgaagtcttccgcgaagtccgccgcgtgctgcgcgatgacggcacgctgtggctgaacatcggggacagttatgcgggcggtggcggcggcaactacaccaaaggcgcacgcaacacggctggccgtcagaacatcaccaacgtgcggaaccgtccgggctggatcgacgcagccggcgtcaagtcgaaagacctgattggcattccatggcgcctggcattcgctcttcaggatgacggttggtacctgcgccaagacatcatctggcacaagccgaacccgatgccggagagcgtgcgagaccgctgcactaaggcgcacgagtacctattcctgctcagcaagtcgcctcgatatcacttcgaccaagatgccatcgccgaacccctggcgccggcatcggttgcacggctggctcagggcggatgggatgaccagcacggttcggacagggttccgggaaagaccaacggtgcgatgaaggccgtcggcggccgacggagcaagcgcaacagcttcgcacgcgaaaccaagagcagcgccggcacccacggacagaaggcacagcaccggcctgaccgccccgacatcgactacagcgccacgcggaacaagcgcagcgtctggaccgtgcccacagccggtttcaagggtgcgcacttcgctactttcccgcccgacctgatccgaccatgcgtactcgccggcgcgccgcggggaggcctggtccttgatcccttcggcggcgccggcaccaccgccctcgtcgccatgcaggaaggtcgtcggtcggtgctcatcgaactcaacccggagtacgccgccatcgctagaaaccgattggatacggcctggctggaaggggccgctcaacttgatctactccacgaccagaaggagtccgtcgcatga

SEQ ID NO: 354261 - DNA, 546 bp, Pseudomonas aeruginosa
atgagcaaaaacgaaacaaccaagcagcgcggatggttgaacaagtccgagatggccgcgagcctcggaatttctccgcaagcctttgataaatggggcgttcagccaatcgagcgaataggtcgagaggccttctacacggtggcggatgtggtcgaaaaccgcatccagcacgccgctcggaaacaacaaccagaaggtgttgacggtgagaccatcgaccccctcgccgagtacaagctgacactcgagcggacccgacttacagcggcccaggcatatggccaggaactgaaaaaccgtgtgcaggacaagctgctcgttcctgtgcctttcgcaaccttcgccctagcaaagatcgccgccaagatcggctcgaagctggagaccgtctgcaagaccgtgaggagcaagcacccggacgccgacccattgctgatggactccttcgagcgggagattgcgcttgcgcgaaatctttcatccagcttcgccgacgacctgccaggaatccacgatgagtacctttcaaccctggatgactga

SEQ ID NO: 354262 - DNA, 1983 bp, Pseudomonas aeruginosa
atgagtacctttcaaccctggatgactgaccttgctttggcggtcaagcgtgggctggaggggatgtacaaagagccgcctatgacggcggtggagtgggccgataagcacttctacatgtcggccgagtcctcctacaacgaaggggagtggaagaccgctccgttccaggtcgccattcttaacgcaatgggaaatgacctgatccggttcgtcaatttcgtgaagtcggcacggatcggctacaccaagctgctgatggcgaacatcggttacaagatccagcacaagcgccgcaacgtcatgatgtggtcgccgaccgatcctgacgcggaatccatcagcaagaagcacgtgatgggcttggtgcgggatgtcccggtgatgctcgccttggcgccctggtacggcaagaagcacagtgataacaccctggacaacaaggtgttctcgaaccgccggaacctatggattctcggcggaaaggctgcgcggaactacagggagaagtcgcccgacgaggtgatctacgacgagttgtcgaagttcgacgctgacgttgagggcgagggctcaccgacctttcttggcgataagcgtctggatggtgcgatctatcccaagtccatacgcggatccacgccgaagacgtccggtagttgccagatcaccaaggcagcggaggaatcgccgcatcgtctgcactaccacatagcctgcccgcactgccgccgggaacagtccctgaaatggggaggcaaggattgtgagtttgggttgaagtggcgcaagaacgcgctcggtgaggctgaggaagcctggtacgtctgcgaacactgtaaggcctgctttatccatcgggacatggtggcggcctcggagtcaggtcgctggatctgcgatgtcactggcatctggacgcgcgatgccatcgattggtttggtccgaacgatgagccaatccgaacgccccgctcgatcagcttctactgctgggcgatctatagcacgtggaaggactggctttcgctggccgacgagtggctgaaggtgaaaggtgatcgcgagaagctgattgccttcatcaacacaacgcgcggagaagtctgggaggaagaccagggcgagcgcgtggagtgggaggtgctctatggtcgccgcgagatctacccatgtaccgattacgtgccggactgggtgttggggctgtttggcggaatagatactcaggacgaccgcctagagggccgcgtttggggtgtcggtgctggcgaggagaagtggctgattcgccgcttcatcctcaacggagatccggcaagcgtcgagcttctccgtaaggtcggcatggagattaatcgggagttcaagcgttctgacggcactcctatgcgggtggagcgttggtgttgggacgccggtggacactactccgacgaagtggccaaggaaagcatcaggcatggcgttcgttgggttatcccggtcttcggcgccagtgcctatggcaagccaatagctaatttcccgcgccggcggaagaacaatatctacaagacagaggtcggcaccgataacgcgaaggagctgatctacgggcgcctgcgcatcgatgtgccacagccgtggagtccaacccctggctgcattcacttgcccttggtcgactggtgcgatgaggacgaactgaaacagctcaccgccgagcggaagaagccggtgatggtgaaggggaagcgcgaacttcgttgggattcaggcggccggcgcaacgaggcgctcgactgtctggtttacgccttggccgctttgcgcattagccagcagcgttttgggtttgatctcgaagcactggaggctgccaggctggccgcggccaaaacggtcgctgccgatgtgatcgagaaacatacctccaatcaatctgcgcaggacgtgaccaacgcgttcctgggtacaacaggtggcagtccatggctatga

SEQ ID NO: 354263 - DNA, 597 bp, Pseudomonas aeruginosa
atgcgccggccggcaggaagccgagccgcgcacggtgcgcgtagaagtgcccgttgctgtgctgtgcggtgctgtgctgtgccgagtgccggcggcggatcggttacgaagcgcacctgctggcagccaacagggcctgtaagaattaggagtagactacggccttttcctacggaacttggtgatgctggtgattcgattggcggggaagtggacgctgaagctcgatcggcagataggcagttccggaaaacacgggatatgggcattccactgctcggaaagcacgttcgcgccgtcctcaaacgacctccggcgtactgcggcaatcctgcctgccgagcccaaggaaggccagacggtggaagtatcgatctgcgacaccgcgcactcgccggatggatggatcgccgtcggctcaggcgccgcggcttacgaagccgagcgctgatctcgcgccggtcagtatgtaccaattcctgtaccaaggcggcggggttgtgcggggttatatggggatttgtacagtataaacggggctggaagccccgttatatcgtcatctgcgccccatgcgctccccaaacaacctcataa

SEQ ID NO: 354264 - DNA, 651 bp, Pseudomonas aeruginosa
  misc_feature (41)..(41): n is a, c, g, or t
atgaaaaagccccgcggggcggggctcttcaggggggctcngaccagctcggcccagaggtcgtactcgtcggcatcggtgatgcgcacgcggaccttgtcgcccggcttcagctcgtcgctgtcgacgaacacgttgccgtcgatttccggagcgtcggcccaggagcggccgaccgcgccctgttcgtcgacttcgtcgatcagcacttcgatttccttgcccaccttgagctgcaggcgagcggcggaaatcgcctgctggtgggccatgaagcgttcccagcggtcctgcttgacctcgtccggcaccggctccaggcccagctcgttggccggagcgccttcgacgggggagtactggaagcagccgacgcggtcgagctgggcttccgtcagccagtcgagcaggtactggaagtcttcttcggtttcgcccgggaagccgacgatgaaggtcgagcggatggtcagttccgggcagatctcgcgccactgcttgatccgggccagggtcttgtcctcgaaggccgggcgcttcatggccttgagcaccttcgggctggcgtgctggaaggggatgtcgaggtacggcaggagcttgccggcggccatcagcgggatcacgtcgtcgacgttggggtacgggtag

SEQ ID NO: 354265 - DNA, 1191 bp, Pseudomonas aeruginosa
atgatttatattcgcactggaaagccgggtcacggtaaaacgcttaatactattcgtgagattgacgaaaaggcatttgctgaaagtagggtggtttactatcacaacattccggaacttaagaccgataagttaaaggcgtcctggttcgaatttgaggacccttataagtggtttgagttgcccaatgacgcgattatcgtcgttgacgaggcgcaaggttggttcggtgtgcgcgatccgcgccagaagccgccagagcatgtaagccgcttcgaactgattcggcatcagggccatgaaatgcacttggttacgcaggacccgcgattcatcgatgtgcatatccggcgtttggcgaatgggcatgttcacttctggcgggtgttcaagtcccagcaactgttgaggttcgagtccgatacggtcattgatgcggtcgagaagaaaaccagcttcaaggatgcggacaagaccacgatcaagctcgataagaagtacttcggcatgtaccggagtacgcagggcaagcaccatttcaaagtgcaactgccgaagaagttcattgcggcatgcgtggtcctggtcgttgcggcgttcctggtctaccgggcatatgagcgttaccaggaagaacagcagcaagctgcggcggaagcagctcctggtgcggcatccgtggtcgactcggtgacggacaaggtcggttcgatcctgaacccggtttcggcggcaggtggcggcggccaggaaaaggtgttgacggaagcgcagtacctggagcttcgcaagccgcgtgtgccggacttgccggcgtcggcgccgatctacgacgagttgaccaagccggtgacgtacccgaagccgttctgtgtgtcgtcgcgtaatgaggacctagtgcgccgcaacgcttcgaagatggagttggggtatcgtgatggcgtgttgaacgggtgtcgctgcaacacgcagcaaggcacgcggattcggctgtcgttctcggcttgcatgaactatgtggagaacggggcgttcgatccggcgattcctgatcgctcgatcgatcagcgcatggttcagcctcagccggcatcgcagcagttccaggtgcagcaggtgcagccgcgggatgcgttctcgacacgagtaaccatcgtgccggatagcagcaggacgcccaggacgctatga

SEQ ID NO: 354266 - DNA, 327 bp, Pseudomonas aeruginosa; identical to SEQ ID NO: 347604

SEQ ID NO: 354267 - DNA, 987 bp, Pseudomonas aeruginosa
atgtgtaagcccgatgaaaaccagtgtcgagataaggcagggcaaactacgtcatggtctttgattcgcccggacttgaatggtctcggctcgattgaaaacgtctgcaaacagggctgccgggtcgccctgggcgcttcgacgtgtggcccgatgaataccgacccgacgaagggattttgttctggcacgggcacattcaccggcgatgaatgttcacccacggatgagagttcgggtggcaacaatccggaccccacagacccgactgaccccaccgatcctacggacccgactgaccctaacaagcccgacgagcacggttgtatcccgcctgcgaagtggtctggcacgacgtgcgtgatgcctgatccgggcgatggtggagacggtggggacggtgatggcgatggcaacggtaatggaggaggggacggcaatggagatggcggtggcgatggagacggcaatgggaacggtgatggggacggtaatggcgatggagacggcaacggcaacggcaacggcgacggggatgaggatggcaagtgtgacccggccaaggaccccagttgcaagccgtcttcggtctctggtgaggcgtgcgaaaccccgttgcagtgcgaaggcgacgccattcagtgcgccatcttgcgacagcagaaacaggcgcgttgtgacgctcaggaaatgaatgatttcgagaagaacaaagagaagatttcgaagttgttccacggcgaagagttcaaagaacagcctgaccaggaagtggaaatcccctcgttcatttcgcagtctggtcggtttctaccgtcgggttgtccgcctgataaacagttcagtctatctactggtggcggtcactccttcacgttctcttataagccgctgtgtgcgtttgcttctgacctgggcgtgctgattgttgtggcggcaagtatttttgcgacgctctatgtcggtcgcggttttggaggtgagtga

SEQ ID NO: 354268 - DNA, 363 bp, Pseudomonas aeruginosa
atgctcgctctcatcggcctgtgccagggctattactgcgaaacccgcaccgtcaacggccagaacggccagcagcaaatcaccgagcattcagtgcttgtccaggtcgagcagccgaacaagttcggtctgatcgaacagaaaattatcgccgtgcggatatccaagcggcacatggatggcggcttgaacaacgcctggaatcagcagaagggcaagacggtttccgtgccggtgttcgtccaggcctgggcgagcagggcgggtaacgccggcttcgacttctggttgtcgggtgatggcctgccgctccaactccaggccgtccagccggccgcgccgaaggcagcagcttcggcatga

SEQ ID NO: 354269 - DNA, 459 bp, Pseudomonas aeruginosa
  misc_feature (336)..(336): n is a, c, g, or t
atgatcgacccaacagacaagcaaacccaagccctccccctggagcagccgaagcgcgggcgcggtcggccagccaccggcaaagcgctgtccgacgcagagcgggcgcggcgataccgagcgaacaagaaaaatcgtgacgcccaaccgtcacgaaaagaggccccatcgatccccactgatggcgtaaaggaaatcctcgacggctggcagcgcacccaagaggaactcgaccaggcactgcaacgaattgccgagctggaagccgaattagcgtcacgcgtcacgaaaaaagaagaagccgaggcgaagacttgggcaattcaagagcgcaanggcaaagcgcgctggcagaccatcagcaagggcctgacccggaaggccggcgagcgccagttcgacaagctgctgtcgggcctgacagatccgcgctacacctaccgcatgattgaagaataa

SEQ ID NO: 354270 - DNA, 1272 bp, Pseudomonas aeruginosa
atgaataagttttccgaagatgatgttcacaagcatctccacgctacgggcttggaggctgtcattgtcgactgccctctatttgacgtggatgaggttgagccgtgcgccgaggagcctgatttccaactctggcgaatcatcaagtctcgcgcacttgcgaagctggaacgccttcacggaacaattcgctacgggaccttcgtcggaaccaaaatcaagctccccactgatcacaccaagccgatggaactcgacttgctcggcacccatgaggacggcctgttcgtcttggagctaaaaatcgaccgatctgcagaacgcaatgcgttctccgagctgttcgcttacagcaattacattgccggtattttcgctctatcaggacaccaagacatcaccaatgtcttggtcgcaaatctcgacaacaagataaccaaacaggcttttctttatgatctcctgatcaacgagagggatattatcgtctatcgcccaagcttccccggcggaaacctagagagcttgcagctcgacctctacctgccaagcgacgatgactttcgtcacttcaccaacgagctgttgtcacacgacgcgatgagttgtgtggtgatttccttccacgacctcgatggttggttcgatagcgaagagagtgggggagggcttaacgattggactaccgagcacctgtcggggctcagcggctatgccgcccagttaatggaggccgagcgactgcacggattctgtttcattcgaaaaccttggcgtgagattccctgccactatcgcaacagcctttttatatgcgcgctcaacccctttagaatcgcggagccaaaccgtgctaattcgatcctatcgcaactggatgagagcgagcacgagtcatttctggagacgccagagctggcttttgaggggcgactgatccgactagcgcagcggactatcaaggattgccttaccgacgattacagtgcggaagtggtgaccccctactggggggagatcgttactgacagccaagaggtcgtcttcacccataacttcgcattccggccgacgggtattatgcgtgaggcctactctggcttcctcaatgaacgctacgcccgcgaagcatcaggccagggttggggcggggatatctccattctaaagatcaacgagatccacaactggctacgcgcttggatgtttatggagggctgcgggtttaaggccggtgagacgctagatgacgaggcggatggcgacacctga

SEQ ID NO: 354271 - DNA, 390 bp, Pseudomonas aeruginosa
atgaacgaccgcgaactactcgaactggcggcgcgggcggcggggatcaaggcacgctggttccgagtaaaacaatggcgacaagtcggtggttataggatgcaaacagggcaggaagatgtttttggaactcatcatagcaagccttggaacccgctcaccgacgacggcgacgcgctgaggctggcggttgttctcggactaactgttgaatgcgatttcaacgacagcgatacgtgcacgacaagcgaaacgcgaggcgagattcttgctgacgagtcgtcgggaatgcttggcgagcttgtgggagagccagaattcgcagcaacccgccgcgccatcgtccgcgccgcagccgagatcggcaagtctatgggaggtggggagtga

SEQ ID NO: 354272 - DNA, 315 bp, Pseudomonas aeruginosa
atgaccgaccacgcagagctgcggaggctggctgagcaggctagcagcggaaactggtatggcgaagacagccaggttttgatcggcaagcatgccgtcgcatactgcaaccacaaagtggatgcgcagttcatagggaaagccaaccccaagactgtcctggccctcctggacgagatcgacaggctcaaggcggagaacgaggagttgcggggagcgctacaggccgtagtggatgatccaacctggcgcagtaacgacaacaccctgtggccgaagatcatcaaggcaatggacaaaggagccaagcaatga

SEQ ID NO: 354273 - DNA, 648 bp, Pseudomonas aeruginosa
atgccgggattccggcatcgactcccaacaacgaaaccaacgcatccgccccccggagaaccaaccgtgtccatatttcatcgctacttccgcgtaacaagcggcgctcttgtagaccgactccatgaactcaaagcagcgacagaggctgcattggaaaaatacaccagcttgcgtgacgaagtaggcgcagagcagatccatgcgtggtctgacggctcctttgcaggattcaccttcaagcaccctgacagaagtacttatcgagaaagccgcggcgcctggctacctaagaaaaactgcgctgaaggtaaagccctgtgggcaagaatcaatgaacttccagaggccccaggcccgcagttagcgcttaaagacttcggattgtacggtgacgtgccatgccttttcggcgatggatatggctggcgaacaactctatgtggcttctatgacagcaacatctggttcgtgaaggttccatggaaggatgccgaccaagacgagttgaaagagtacatggctgagcgaaagaaaacgcgattctgcgctgactttgaacatctcctttggacccctccggctgattggaaagaaatcaaggagtgggaattcctcaaagagtgggaagaactcaatcagaaatag

SEQ ID NO: 354274 - DNA, 201 bp, Pseudomonas aeruginosa
atgagcgaattctactcaaccgatgagttcatagaagcggcagttaacggcgaactggctgacgtctctgtggttgtcgacaacgacaatgtttcagcctatcgcggcgatgagcaggtatgtgacttcaacgatgccgggcctcagcaggcccttcttgaggtgcttaccgcgctcggcgttaaggctgaatacccctga

SEQ ID NO: 354275 - DNA, 204 bp, Pseudomonas aeruginosa
atggctgattgtgtggatatcgccaacgactacgccgagcgtgaactcgctgaacgcctgtactcgcgagtcaagtacgtcggcgagagcctgcacgagtgtgaagactgcggtgaggagatcccgctagcgcggcgctcgatcatcccaggtattcgtaaatgcagggactgtgcggaactggctgagcggaggaatgtgtga

SEQ ID NO: 354276 - DNA, 228 bp, Pseudomonas aeruginosa
atgagtttcatcttcggtttcatcgctggcgcatgggcgctcctgatcttctcgatcctctgcaagagcggcgagcgcgacagcactgacggcctgcataagcgttctgggatgacgatccatacggatcatctgactggcttgcagtacctcggtactgggcgcggcggcctaactcctcgacttgaccagaacggcgctcagatgcgcgcggaggacgaccaatga

SEQ ID NO: 354277 - DNA, 1035 bp, Pseudomonas aeruginosa
gtgccctcactgcgtgagcttgaggcccaggcaaaggccttggccccgatcatgaccggaatcgtggccggtgtgcgcgacgagctgcgcaaggagttcgccagtcagttgcagtcgcgtgacgaccgcatcgccgatcttcagaaagccctggacgagcgtccagaccttgaagcaatcgccaagcaggctgccgcgctgatcccagagccgaaggacggcgagccaggacgcgatgcgaacatggatgcgctcaaggagtatctggccgaactggtgaaggccatccctgcgccggcggatgggcaaagcgtgaccgtggaagatgtggctccgctgatccgtgaggaagtggccaaggcagttgccgaggtgccgccggcgaaggatggcgagtcggtcacggctgacgatgttcgcccaatactaactgagctggtggattccgcagtgaagttgttgccaccggcagcgcccggcaaagacgccaacatgggcgagctgaaagatcatctcgccgaactcgtgaagggcatccagctgccatctgttccgactgcggaagaggtagccggcctgttcgagcgtcgattctctgatctgaccttgcactgggagcgctccgtccgcgaagaaacaagcaaagctctggatcgaatccctgcgccgaaggatggccgcgatgcgctgccgctggaatcgttcgagcttgagcttggcgatgatggccgcaccgtcaccattaagatgcaggccggagatgttgttcttgagaagtctgtgaagattgcttcggtgatcgatcgcggcgtttacagcgctgataagtcctacgagcagggcgatggcaccacttacggcggctgctactggatcgcgcagaaggacgcgccgacaggcgttccgggtggttctgatgattggcgtctagctgtgaagaaaggccgcgacggaaaggacctgcgcgatagcgcgtccaggcacgatccgagcaagggcgtgaagattcgcaaggacgaggatgacgacaaatga

SEQ ID NO: 354278 - DNA, 864 bp, Pseudomonas aeruginosa
atggatgacctgacccacgacctgcagcaactctgccgccgcaatcgcgacggcagccatgctacccaggacgatcgcaagcactcgctgacgttagccgcccaacaactgcgcgaagctggctttcggcagatgcgggccatgtcgctcaagggtaaacacgtggaggcgttattggctcgctggcaacgggagggcctggcggtgggaaccatcaagaaccgcctcgcgcacctgcgctggtgggcggagaagatcgacaaggccggcctgttaccgaaggacaacacccagttgggcatcgctgaccgacgctatgtgaccaacatcagcaaggcagtggaactggggcctgagttgggtcgcatcagcgatcctcatgtgcgcatgagtcttcaactgcaggcggcatttgggttgcggcgggaggaggcgatcaagttccggcccagctatgccgaccggggcgatcatcttgtgctcaagggctcctggaccaagggtgggcgcgagcgcagcatcccgatcaccacacccgaacaacgcctcgtgctccaggcagtccaccagctagcgggcgcgggatccttgattccggcacacaagagctacgtccagcagcgcaatgtttacgacggccagtgcaagtcggcaggcatcagtcacatgcatgggctgcgtcatcaatacgcccaggctcgataccggacgttgaccggctggaaggcccctgcggaaggaggcccatccggcaatgcgctgacgccggaggagcgggtgcgggacaccgaggctcggcaagtcatcagccgggaactggggcatgaacggacgcaggttaccgccgtttaccttgggcggtaa

SEQ ID NO: 354279 - DNA, 282 bp, Pseudomonas aeruginosa
atggtggacgtgatccttcggagtgaaaccaaggagtcgcacctgaagcgcttctatgaggcggacatggccatgcacctcatgagaatggcgcgcgaaggctatggaatcagttggttgccggagtcggcggtcgaggaggaaatcgccgctggcaagctggttcgatccggtggcaaggaatggagcgctgaacttgaaatctggtcattcaagtcggtcagcaacaccaaccagaccatgctcgagctgtggaagtctttggaaaaggacgtgcgctag

SEQ ID NO: 354280 - DNA, 1428 bp, Pseudomonas aeruginosa
atgaacaactactccagcatttccgcctttcgcattgagtatgacctgattggtgatcgcgagatccccgcgaacgcctactacggcattcacacactgcgtgcactggaaaacttccccatcaccggtgagccgatttccaggtaccccgccatcatcgtcgcccacgcggatatcaagcaggccgccgcgttggccaaccgggatctcggtcttctcgaccaggaacgttgtgcagccatcatcgaggcctgccagagcattcgggccggcgaactactggatcagtttcccatcgacctgattcaaggcggtgcgggcacctcgaccaacatgaatgccaacgaggtgatctgcaacaaggcactggagattctcgggcgttcgctgggggactatgacttcctgcacccgaatgaacacgtcaatctcagtcagtccacgaatgacgtgtatcccaccgcgttgaagatggcgacctatcgcagcggccgggatctgctacacgccatgggccatttgcagatggccttcgaggccaaagcggtagagtttcgggacatgctgaaagtgggccggactcagctgcaagacgccgtgccgatgacgctgggccaagagttccgcacctacgccgtcatgattggtgaggatcgccagcgactccaggaagccctgcaattggtccgtgagatcaacatgggggcgaccgccatcggtaccggcatcaattcgcctgccgactatgtgaatcgagttcgcgagcacctgtgcgccatttccggcctacctctcgtcacggcgccgaacttgattgaagccacccaggacgtcggctccttcgtgcagatctccggcgtcctcaagcggatcgccaccaaactctcaaaggtatgcaacgacctgcgtctgctttccagcggtccccgcgccggttttggtgagatcaatctcccggccgtacaagcgggctccagcatcatgcccggcaaggtcaatccggtgattcccgaggtcgtcaaccaggtggcgttcgaagtgatcggcaacgacgtcaccatcagcttcgccgccgaagcgggccaattgcagctgaatgcgttcgaaccggtgattgcctattcgatgttccgcagcatgactcacctcacgcatgcctgctcggtgttggaacagaagtgcattcgcggcatcaccgcgaacccacgtcgcatgctggacctggtggagaactccatcattctcgtgaccgcactcaatccctacatcggttaccgcaacgccacccgagtcgcaaaggaagcactggtctccgggcgtaaggtcgctgacatcgtcatcggccaaggacttttaaccgaggcccagctggaacagatcctgaagcccgacgcgctgacaggcccccgcgataccaactccctttaa

SEQ ID NO: 354281 - DNA, 1296 bp, Pseudomonas aeruginosa
atgaacaacaagaaattacccaagtacatcgcaattgccattcttcttggcatcgtcgtgggttggggctgcaacaaatacgctgctgatacggaatcggcgaaggagatcgccggctacttcagcctggtcactgatatcttcctgcgcatgatcaagatgatcattgcgccgctggtcttcgcgaccctggtgggcggcatcagcagtctggggaactccagttcggtaggccggatcggcctgcgctcgatggcctggtttgtgagtgcgtccgtcttttcgctggcactcggcatgttgctggtcaacatcttccaaccgggcgtagacctgaacatgagcattcctgaatcaccgactgctgcagtagcggtcaataccggtgacttcagcctgaaaacgttcattggccatgtgttcccacgcagcatcgccgaagcgatgaccaacaatgaaatcctacagatcgtcgttttctcgatcttcttcggtctggccctggcgatcatcaaacgacaaggccacgacgctatcggcaacctcgtcgacgagctggccaaggtcatgttccgtattaccgactacgtgatgatgttcgctccggtcggtgtcttcgcggccctcgccgccgcaatcaccactcaaggtatcggattgcttttcgactacggcaagctgatcggacagtactacctcggcatcctgattctctggaccgtgcttttcgccgtcggctacttcttcctggggcgcccggtcttcacccttggcaagctcatccgcgaaccggtgcttctggcgttctccacggccagcagtgaatcggcctatccgaaaaccatcgatgctctggaaaagttcggtgctcccaagcgggtctccagcttcgtgcttccgctgggttactcgttcaatctggacggctccatgatgtatcaggcattcgcgatcatgtttattgcgcaggcctacaacatcgagctgagcttcactcagcaagtgctgatcctgctgaccctgatggtcaccagtaaagggatggccggcgtcgctcgcgcctctgtcgtagtcgtcgcagccaccttgccgatgttccacctccccgaagcgggtctgctgctgatcctggccgtcgaccagttcctggacatgggccgcacggcaaccaacgtggtaggcaacagcatcgccacggcggtgattgccaacttggaagacaagaacaaggacaacgccgaggagccgcgcaccccgcctcagccggcgtcacaggccagcgatcaaaatggctga

SEQ ID NO: 354282 - DNA, 1464 bp, Pseudomonas aeruginosa
atgaaacagtctagaagcaagaataccggacggacgttgggcatcattggcgggctgggctcgctggccggaggggatctgttcctgaagctgttaaagagcgagccggtgctcgctgaccaaggtcgctaccacctgctcttcgaacaacacccgttcaaagacttggcgttgccgctgagtcgcgaagccagcatgacctctaggaagctttatgtattccaggtctgccagggctacgccgagagcggtgctgatgcggtgctgatcccgtgcttcgccagccacacgttcatggacgaattacaggccgagctggacattcccatcgtggacatgatggccgcgctgaagcgacacgtgaatctggtcgccgaacctggcgctcgcctaggcatcctggcctcggattacgtgcgtgcggcgggcttgttcgagcgccatttcggggctgggttcgagctggtgtacccctcagaggtcaatcaggcggctctcatggaggctgtctacgggcccgccggcattaaggcaggtcatctggatggggtctccattgagctactgcatcaggcttgtctcgacttgcacagtcagggcgcgacactgcttcttcccggcatgaccgagctgtcgctggtcgcgtctgatttgcatcgccgcggggtcagctgtgtcgacgtgaatcaggtttacgccgactatgcgacttccagtgaatctgctcgtaacacgccccaattcaagctggggattgttggcggtgttggccctgcggcaacggtcgatttcatggggaaagtggtgaagaacaccccggccgggcgagaccaagaccacatcaaaatggtcgtggagcagaacccgcagattccggaccggacggccaatatactgtacaaggacaccgatcccacggttgcgatgtatgccacctgcaagcgattggagtgtgaaggggcgaacgccatcgctatcccctgcaatactgcccatgcctacgttgagcgcattcaagggtacctgggcattcccatcatcaacatgttgaccgagaccatcgacttcattcggcaggcctacggtagtgagcgcaaggtcggactgctcgctacttcgggaaccatccagagccgcgtctaccatcacgcggctgaacgtgttggcctgtcactattggttccggacgaagtcgaacaggccctcgttatgagcgccatttatggcgaatcgggagtaaaggccgggcataccagtggccaatgtcgcgatgagctgctcaccgccgtttcccatctggtcaagcagggagccacggtactcatccttggttgtaccgagctcccgctcatcttgccgcaagacgatgattttcagattgatggtgtaagcgtgtcgctcgtcgatccaaccaatgtgcttgcgcagcggtgcgttgcacttgccagatccatcaccaactga

SEQ ID NO: 354283 - DNA, 696 bp, Pseudomonas aeruginosa
atgctcagtgtcaaatccaaccagtcgtggcctgccggctacctcatcaatccccccgcacctatgttggacgttgaatggctggaagccttccgtgggatgccgagcgcaatcgtcagtgattgccttggacgtaacgtcggcgggctaggcctcaaacccttccacggcgcccgacacatgtgcggtggtgcactcaccgttagagttcgacccggtgacaacctcatgattctgaaggccatccaaatggcaaggccaggcgatgtgctagtcgtcgatggcagcggtgatcagacccgcgctgtcattggtggaatcatgcgagccatggctctgaaggcgggaatcgcaggtgtcgttgtaaatggggcgatccgcgatctggatgagtggatggaaggcgatcttccggtgtttgcgcttggctgcgtccatcgtggccccagcacagacagcgggggcgagatcaacgtaccgatatcctgtgccggcctggtagtgaacccgggagatctggtcattggcgattccgatggggtcgtggccgtatctcccacagaattggatacgcttttctcgagatgcggcgatttgctggaccgagaagcccgcctcatgcaatcgatagacgcaggcaccctcgatcccgcgcgcttcgatgatctgctgcgcagcaagggttgtcccatctga

SEQ ID NO: 354284 - DNA, 351 bp, Pseudomonas aeruginosa
atgcacgacgaaatgcgtcgcgcattcgccctgctgtccggcaagtggaagctggaaattatgtggctgctcaatcagcggatttatcgcttcggggaactgcgaaaggcaattccgggcatcacccagcacatgttgaccgcgcagctccgtgagctagaagcggacggcctagtttcgcgcaccgttttcgcggaagtgcccccgcgagtcgagtatgcaatcactcaaaaggcccgtgggctcggtcctactatggaggcactgacagcttggtggcatgagtttggtaagagcgtgccggttaagccgacttcgcgcggccgcaaagccaaggagactaggtcgtag

SEQ ID NO: 354285 - DNA, 741 bp, Pseudomonas aeruginosa
gtggcgctacgcagccaagtcaaccagttgttcagccagagtcggggctcggccggcagccgcagcattctgggcatgctgcgcgaagagggcgtgaccatcggccgtttccgagtgcgtcggttgatgcgtgagctgggcctggtcagcaagcaaccgggctcgcacgcctacaaacaggccacggttgagcggccggatatcccgaatcggctgaaccgcaaattcgcgaccgagcatcccaatcaggtgtggtgtggcgacatcacctacgtctgggcgcaaggccgttggcactacctggccgcggtgctggatctgcatacccggcgggtgatcggctgggcgttctcggccaagccggatgccgaactggtgatcaaggccctggacatggcctacgaacagcgcggcaggccacagcaggtgctgttccattcagaccagggcagccagtacgccagccgcctgtttcggcaacggctctggcgctatcggatgcagcagagcatgagtcgccgagggaattgctgggataactcgccgatggagcgcctgttccgcagtctgaagtcggagtgggtcccgtcaacgggttacctgacggcgcaggaggcccaacgggacatcagtcattacttgatgcaccgctacaactggatcaggccgcatcaattcaacgacgggttaccacctgcggtggccgaagaaaaactcaacccactgtccgggatgggttga

SEQ ID NO: 354286 - DNA, 765 bp, Pseudomonas aeruginosa
atgagtgaaagataccgagtagagcagacaggaaaagggttctggccctattgcgtcatggccggaaatggcacgcgcgatctgtatgtggggcacaaaaagacctgtgaccgagttgcggcggaactgacaactgcgttcagggatggagaatttgttggcaagggactctacgacgccctcgccgccgaggcccaggcgctaagggaggaagtcgcagagtacgaggctctctgcaaccgtcaggccgagttgctgagccagtccattgtcgccattcgagggccagagcctgaactcacgcgctggggatatgccgacttaccactacgtgtaaagacgattgttgaggaagtcgcagcactgcgcgcaagggtggctgttgtgcctgatgcgagcacggtgtacgcggcgctcgatgctcgtgagcggttattcacaagtcctgagaacattcaggtagcgctggaagctcaatcgcgcatcaacggcaagactgtcagcgaggggcttttgctgggtatggccgcattcgcgcaggagatcatctgcggagccctcgatggcggaagcttcgattgggcaggcatacaggaaagcgctgaacgccatggactgatcgccaagcaggtgatgaacgagccatgccgcggcccagaagagtactgcgcatgcgcctggtctacctctttcccgactgaatgctaccggataacggcagagcttcgcgccctgctgagcgagcatgagggagggaagcaatga

SEQ ID NO: 354287 - DNA, 195 bp, Pseudomonas aeruginosa
atgagcaatatcgcaatgctctctgctggaggcgtcgtttctcgccagcagaaggaggcactcttcgagatggatcggaagatcgccgaagccatcgacgaagcgaagaaagctggagttccgcaaggcttcatcgtctcgacactagctggccatgcccatgtgcagacgcacaggatggtgacaaatgcgtga

SEQ ID NO: 354288 - DNA, 1533 bp, Pseudomonas aeruginosa
gtgcatcgccctgtccctggccggcatcctgttcctcaacccgatcgtcgccgcggcggcggggctggcgctggacaaggccgccggcggcaacaccggcctgggccaggcgggcaacggcgtgcccatcgtcaatatcgccacgcccaacggcgccgggctgtcgaacaaccatttccgcgactacaacgtcggcgccaacgggctgatcctcaacaacgccaccggcaagacccagggtacccagctcggcgggatcatcctaggcaaccccaacctcaagggccaggcggcgcaggtgatcctcaaccaggtcactggcggcaaccgcagcaccctggccggctacaccgaggtggccgggcagtcggcgcgggtgatcgtcgccaacccgcacggcatcacctgccagggctgcggcttcatcaacacgccgcgcgcgaccctcaccaccggcaagccgatcatggacggccagcgcctggagcgtttccaggtggacggcggcgacatcgtcgtcgaaggcgccgaactgaacgtcggcaacctcgaacagttcgacctgatcacccgcagcgccaagctcaacgccaagctctacgcgaagaacctcaacatcgtcaccggccgcaacgacgtccaggccgacagcctgcaggccacgccgcgcgccgccgatggcagcgagaagccacagctggcgatcgacagctcggcgctgggcgggatgtacgccggggcgatccgcctggtcggcaccgagcagggcgtgggggtgaagctggccggcgacatggccgccagcggcggcgacatccgcatcgacgccagcggcaagctgagcctggcccaggcctccagccagggcgacctgaagatcgcggcccaggccgtggagctgaacggcaagacctacgccggtggcagcgccgagatccgcagcgcggaggaactggtcaaccggcagagcctggcggcgcgcgaacgcatcgcgctggaggcggcgcatatcgacaacgccggggtgatcgaagccggcgtcgagccagacgagcgacgcaacgcgcgcggcgacctcgagctgcgcagcggcaccctgcgcaacgccggcagcctggtggccagccgcgcgctggaagcgaaggcgagccaggcgctggacaaccagggcggcagcctgaagggggcgaccgtccgggtcgacgccgggcacctggacaaccgtggcggcaagctgctcgccgagggcgaactgcgggtcgaggcgagcagcctggacaaccgccaggacggcctgttgcagagccgggaccgcgccgtggtcaagacccgtggcgatctcgacaaccgtggcggccaggtcgtcggtctgaacgaactgcaggtccaggctgccgcactggacaatcgcagtgccggtctcctttccagcaagggagacatggacatcgaggtcgctcgtctggacaacagtgcgggcggcaagctggtcagcgagcgccgtacgctcttgaaggcggatcggctcgataa

SEQ ID NO: 354289 - DNA, 753 bp, Pseudomonas aeruginosa
atgacggcacctttcaaggatcatttctccaccggttcggcgaactacgcagcacatcgtccgacctacccggcgcggctggtcgacgagctggccgcgctctgccccggcacccgcctggccctggactgcggctgcggcaccggacagctcacggtgctgttggccgagcgtttcgaacgggtggtcggtaccgacgccagcgccgcgcagatcgacaaggcgcaggctcgcgagcgggtcgagtatcgcgtgtccctggccgaggacagcgggctggcggcggccagcgccgacctggtgacggtcgcccaggccgcccactggctggacctgccgcgcttctacgaggaagtccggcgtgtggcccgcgcggacgccatcctggctctggttacctatggcgtattgcatgtcgacggacccatggaaccgctggtccagcacttctaccaccaggtcgtcggcccctactggcctgccgagcggcgccacgtggaggagggctaccgcaatctgccgttccccttcgaggagcgccgcctgccggacctggccatcgaggtggcctggaccctggacgaactgctgggctatgtcggtacctggtcggcggtgaaggaggccggcaaggcccttggccaggatccgggcgccgcgttcgtcgatgagctgcgcgaagcctggggcgacccgcagacgcgctatcgggtcagttggccgctgacggtgcgcgccggggtgatccgctga

SEQ ID NO: 354290 - DNA, 462 bp, Pseudomonas aeruginosa
atgccgctcgaacagggcgcgcatggcctggccgagttgcacgtcatgttggcgatcggcctgggtgacttcggccaggccgtggctggcgagaatcagttggcgggccgccgcgtcgcgggcgtagaccgccagcatgcgctcctcgacgatccgcgacaggtcgcgccagcagcgcaggcctgcatggtccaccggctgttcgaggcacgcgcggaaggcggcgtggacctcgccggtcagcccctggagcagggccggcacgctggggaagaagtggtagaccgacgatggtggcatttccgcgcgttcggccacgctatagatggtcaggccgccgatgccttcgtcggcgagcaggccgcgagcggcgtcgaggatcgcggcgatccgggcctggctgctggcgcggggcttgcgggtggacgaggtgggctgcatgtggcgggtctccgggcgtga

SEQ ID NO: 354291 - DNA, 657 bp, Pseudomonas aeruginosa
atgaaaccttcgcaatggacgcttcgctgggtgacgctctgtggctgcgggatgctggctgcttccgccgccgccgtggagttgccagggactgtacagccatcccagctcgatgaacgcttcaagccccgcagcgagccgcaagccaagcccgaggcgccgctggtggtgcccaagcaggtcgcgccgcaaggcagcgaacagatccgcttcgaactgcgcgagatacgcatcgaaggcaacacccgctatgacaaggcggtgctcgagtcctattaccagcatatgctcggcaagcaggtgtccctggccgaactggtcgacctggccaaccgcctcaccgccaagtaccgccaggacggctacctgttgacccaggtagtggtgccggagcagagcatcgagggcggcaaggtacgcctgcaggtgatcgagggttacctcgaacacgtgcagatcaagggaaccgtcgatgggccgcgggtgcgagtggaggaactgctcgcgccgctgaccgaaaaacgtccgctggatgccgataccctggagcgcggcctgctgctggtcggcgacctgccgggggtcaacgtgcagagcgtgctcagcccgggtcaggcgctgggctcgtcgaacctcgacgtggccttgcaacagtag

SEQ ID NO: 354292 - DNA, 231 bp, Pseudomonas aeruginosa
atgagccgtcgtgattggtacgagcagcgtatggataagcgtgcagcactgaacgcggctgaagaaagcggtctcgtggctgacagcaaagaattcagagccgaactggtagcgcgaatctacgccggcgaaatcacctgggagcaggcgcaggaggaacttcgcaaggtgaagcgtgacgccaggaagaatgggaagaaaacccgggctcaaatctggaggtcggcatga

SEQ ID NO: 354293 - DNA, 126 bp, Pseudomonas aeruginosa; identical to SEQ ID NO: 329847

SEQ ID NO: 354294 - DNA, 207 bp, Pseudomonas aeruginosa
atgccgatctacgcagtcaccgtacttgcaatgggaaccgttgtggttgaggccgagaacgaagatgaggccggcctgatggcgatgaatgaagttgatgccggcgatcttgaaaccatgagcggcgagatcgactgcgtaatccggcctgaagagcttgagcgctacaggcgtcacggaaacctcgtgctgatcgacgaagactga

SEQ ID NO: 354295 - DNA, 285 bp, Pseudomonas aeruginosa
atgacaacccctatcagtgatgaacggttggcggaagtagagaccctgtatataggcgaccgctccaggcttgattcaactgtaatcctgtgtggaacgctagctgacattatcgcccgcctgcgcgctgctgaggctgagctttccttatggcgcccaataatggacgaggttgagcgccgcgcagagaaagaatggtgcctgcaagacaagcgcgacttcacggtaactattcagtacgacgactacgtggacatcgacgccgccatggagcgcacgccatga

SEQ ID NO: 354296 - DNA, 552 bp, Pseudomonas aeruginosa
atgagtgaagtgaagcgctacgactgcaccaatggcggctttgccttctgccaagggtgctaccagatggaggaagatcctctcggcgactacgttagctcagaggactacgacgccctagtcgccaaactagccatggccgaggacgcagcagcaaagggagatgctgctcgccagcaatgcggcggaatggagatggagatcgaggaacttcgcgctgaactagcggaactgcgcgcaagggtggttgtgctccccagcgttgataacgtcatgaatatcgtcatgcgttaccagtggaacgagaagaccaacgtcaccggaactacgaactgggcggccaacctcggaatgaaggttgtcgaagaggtcaagcgcctcaacggcaagacggtcagcgcgtccgcgctcgataccctgcgccggttcgctaccggggaggttgggcacctgaacaacgggcattgccctgatgatctcgaaggccgcgaaacgcgcgatccggactgcctcgtgtgcaaagcgctgatcgatacggagaagagcaaatga

SEQ ID NO: 354297 - DNA, 1263 bp, Pseudomonas aeruginosa
atgacggttcgcgcgttcaccggcggtgctggttgtggaaagacccacatgctcatggcatcgctgtcagcgcatctggagggagcgcctctccaaagcgagcagaaagtcctggctctcaccttcatgcatggatctcgcaggcgcttggaagagcgccttgggttgcttcagaatctgaggggaaagaccgagtgcacgaccatcgacagcttcgcatggcgtctgttccgacgttggcgttcgctcgcttcagccctcggttttgtgaacatccaaccgagtgagtacgagcgcatatgcgaggccgcgagtgcactcgcacaggtcagagatgtccaaggctgggtggcttcgacgtttcctatccttgtcctggatgaggctcaggacatgacagcgcaccgcctaggcatggtggcaggcttggccaacaggttggaggtcttcgttgctgccgacgagtttcaatgcctgagcgaggagctacgccccaaccctgcctgcgcttggctggcccaggtatgcgcccctcaggagcttttacagcctcgtcggacaaacgttgatgagctactcaatgcagccagagcaattcgcgccggtgaggcgcccaagtcggagaagttcttcctcgttgcgcagacctccactgcgccgttggctggcgcatggatcaactccaatttgaactggtatggcggaggcaagagcgtcgccattatcaccccgacccttggaacgtttgccaaaggcgctttggcctgggctgctgccaacaagaccaagaaaggcgcaggcccgtatgaagtcgcatgggagcagtcagaggctaaagccgcaagcgagtacctcgccgcgatcaaacttgcggaccggaccgacgctccctccatcaacgccgtcctcgcggcggctggtgacgccagaacagccagggatgtgttcgaatggctagagactcaacgtcggacccgggcaaagctggagttctcaaaggatgagatcgtgaagtcgattgagcagtccttttcccagcgccgccaatctcgcagaaacgaggtgcgtgggtggaaagggatgacagttcatggcgccaagaaccgagagttcgacaacgtcatagttttgtggccagcggcggttggtggtagcgacgaccagaagagacgtttgctttataacgcagtgacgcgtgcgaaggaacgatgtgttgttcttgtgcaggcatccgcccatatgaaccggcctcctttcgcatga

SEQ ID NO: 354298 - DNA, 1791 bp, Pseudomonas aeruginosa; identical to SEQ ID NO: 206697

SEQ ID NO: 354299 - DNA, 1764 bp, Pseudomonas aeruginosa; identical to SEQ ID NO: 206698

SEQ ID NO: 354300 - DNA, 1146 bp, Pseudomonas aeruginosa
atgatagaaagtcaagggatgctgggggaagaattggatacagaaaatggatcgccaggtagaaaccctcttgccgcagcacagagggaaagagctggtgcgcaaacattcgaaaagtacgagtaccagtaccactgggctctctgccgaattcttggtgctcatgaaaactcggatgattacgttgtctttatcgagcttcatgaggacgtagtattggcgacttcgaccgatgaatctctcgcgcggtttgaattcaatcagatcaaaaacgtcaatgctacaccttggaatcagaagaaattgacttcgatcccaaagtccactaccaaaaaaaattcaaattcaattcttggaaaaatgctccaagggattcaaaaaaagccctttttcgaaaagctgaactcgctcgatttggtcgcgacctgtggctttaagctacctcctaaaaccgatggcttgaagctctcaattatttcaatcggcgatcttcatgatgagtgtctgaaagacatccaggctgcaatcgacaaagagcttggctcctaccctattcccagaaccttaaggttcatcacacctgatctagccaccaccggatttcaggatgtagctattggccgaatttccaaacttgtcaacattaaagctcccggagccatgtatgactcatcaacgatttatcgagtattaattgatgacttgcatcgcaagggaactgtagcctttgattttactgactggaaaaatcttataaagaacaaaggaaccactcatggcgatgttgagcgggttatatcgtcttatacggagaagaaggggctcgaggcattcgagaaagacttggacgatattctcaaggatcttgaactgaaatcgaataagcggattcaggtacgcagagcgtttgaacgctatcacaacgccgtgcgcctggagcgttcattgattgccattgacaaccaacaagcagttaaggatgcggttgaacacaactttgaagtattcgaaaaacaaggcgtgatggattttatgaatctgacacttgaaattttgccagaggcaaccaaaaagaatctggtgaacctggagtcaatccaagcagccatcatttacgaactattgagcaagtgtcatgaaaaatga

SEQ ID NO: 354301 - DNA, 1041 bp, Pseudomonas aeruginosa; identical to SEQ ID NO: 206700

SEQ ID NO: 354302 - DNA, 297 bp, Pseudomonas aeruginosa; identical to SEQ ID NO: 206701

SEQ ID NO: 354303 - DNA, 510 bp, Pseudomonas aeruginosa
atgagcaaggtcactcttcaccctgaatggcgccaagcagcgaaggacctcgccgtcgagttcgaatacggggacctgattaccctagagtggctacgcaatgccttccaactggaagagccgcggaccatagaagagttcaagtctcaccagttggacttcctcagttgcatggacgccctgcggcaagaactacttgtggagtatcagctctcgctgaagaacatccgaggtgcagggtacgaactggtcaatccgaacgaccaggtagtcgttgcctggcactcggcgttcggcaaggtgcggcgcgagctgggcaagcttgccggcgcgattcgctacatccgccatgacgaactcaccgatgagaagaggcgagagcatgccgatgcccaggcaaagctgtccggcatacacgccttcgtagctcgggagggatcacggaagctgggccaacccacggctgcggtcaaggcagtacgcagcgccgagcaagggggtgacctatga

SEQ ID NO: 354304 - DNA, 978 bp, Pseudomonas aeruginosa
  misc_feature (426)..(426): n is a, c, g, or t
atgcgagctgaagtgatgcagcactacgggctgagcacccccttgaatcaggcgggctatttcgaaaccgcccatcatcagcagttgatgagggacatccgcggcgccatcttcgaaggccgcctgatcgccctgtgtggcgtgatcggcagcggcaagacggtgatgctgcgccgcttgcagcaactgctggaggaggaaaagaaagtcacggtgtccagatcgatggccatcgagaagcacaacatcaagctggccaccttcatcgccgcgctcttctatgacctttccacccagaaacaggtacgcattcccacccagatcgaaaaacgggatcgcgaacggtacgagctggtgaagaagagcaagcgccccgtggccctgttcgttgatgaagcccatgacctcaatggccataccctgacnggtctgaagcgactgctcgaactggtcgaagacgacagtggccggcgacgtttgtccattgttctggccggccatcccaagctgcgtaacgatctacgtcgtcccacgatggaagagattggctaccgcaccgacattttctcgctcgacggcattgccgggagtcagcgtgagtatcttcattggttgttggacacctgcacagaaggacgtgccagggctgaagaaatcgtaaccgaagaagccctcgacctactggccagccggttgcgcacgcccctgcagatccagttacatcttggactggctctggaggccggttaccagaccggcgaaaagcctatttcggcagagctcgtccagtccgtactctctcggcaactggatgacttggaacccacactcacacgccacggctacaacgcgaaaagcctggcagagcagttcgatgccaaacctgccgaggttcgtgcgttgttcagcaatacgttagatccggcacgagcggctgagcttcgggagaagatgcaatcggccgggcttcccgtgtga

SEQ ID NO: 354305 - DNA, 774 bp, Pseudomonas aeruginosa
gtgaaggaagcccacgagactctgtaccacttccacaagccggaaaccgaagcccaggccaacgagtggctgttgcgctacctggtgcgcacctacaaccagcagacacatcgtgccgaaccccattcacggatcgaggactggatcgcccatgtgccaacagaggggatccgtgaaatgtgctcatgggatcagttctgccgctttgcccgagagcccgagcggcggaaggtcgggcctgatgcccgaatcaccatcgacggtaccgcgtacgagctggagcccgagatggccggcaactacgtcgtgctgctctgggggttgttcgacgatgagcttcatgccgagttcgatggcgagcggttcggtccttactacccggtgtccggacccattccattgcaccgctatcgggctttcaagcgcagcaaggcagacgagcgctcggctcgtatccgatctctcgcggaccagctggggctgccgatcgcggcgctttccggggaggatgtacgactagagcccagttctgccacctcgacgctccccatccggcccttcgatttcgagccccaggaatcccgattccccagcagcattgcggccaagctggctatcgccgaggaactggcaatgccgctggccaagctttcaatggatgaccgcgcctacatcgaccaggtgctgagcgagaccctggcgcggcgggtggtactggagcgcgtacgggactatttccgtcaccggaaaccaggagaagagcatgcgagctga

SEQ ID NO: 354306 - DNA, 558 bp, Pseudomonas aeruginosa
atgtccggtaccctgctgattcccaaggaaccgcagatcgagtcctatccagaacttgaccaacgcgagttcaacgacggtatctacgtctacccagaagacaccggtattccgccgctctatattgtttatcgagatccgcgcgacgaaccgggcgttgctaccggtaatggccagccggtcactgggaactggctggccggtgcctcacaaggtgacggagtgccgattccgagccaaatcgccgatcagttgcgcggcaaggaattcaagagttggcgggattttcgggagcagttttgggtggccgttagtaaagacccattaattatcgaaaacctctcccccagtaataggtactttgtcagtcagggccttgctccttatgctgtgccagaggagcatctgggtagcaaagaaaagtttgaaattcaccatgtagtccctttggaaagcggcggtgctctttacaatatagacaatcttgttatcgtcactccgaaacgccacagtgaaattcataaagaactgaagtctaaacgcaaggagaagcaataa

SEQ ID NO: 354307 - DNA, 303 bp, Pseudomonas aeruginosa
atgatcatcaagttgtcaccgtttgctccgctgccgcgacgcgacgagcgcctgtcactgagcagggctggcgatgtactcaccgtaaacggccaggaattcgacttcacaccgctcccggagggcggcgagttgccggccgaggctatcgggtcggagtggttcgctggtcccgtactgcgacgtgccggccggttggagctgatcctgcggttcccgcttgccgtcgatgccagcgccgccgcttgcttccctgaaccgttgctgatcgaggccgatggcccggtggagttgccgcgatga

SEQ ID NO: 354308 - DNA, 549 bp, Pseudomonas aeruginosa
atgatgcgccgcgtctacttgtccggccccatgaccggcatcgcagatttcaactaccccgcgttcaacgccgaggagaagcggatccgcgccctcggctatatcgtcgagaacccagccgccaacatggtctaccgcggatcgccgtgggcggcattcatgcgcgacgggatcaagcggctgatggactgcgacatcctggccctgcttccagggtgggagcggtcccgcggcgcgaacatcgaacgcaacctcgctatcacactcggcatgcacgtcgtcgacgccgaggccatcccggagcctgatttcgtctgcaagtgccgggcaatccaattcacctgctgctcgataccaagcgacaacgatccgttcgtgtgccggcgcctggcaggcatgcccgcctacaattccccagaggaccaactggcaaccgcacgtaaagccctcgagcagatcgcagcgctcaccgacgtctctaccggaggcatcgggatggacgtactccagatcgccacaaaggcgctattaaactgtgatcagttataa

SEQ ID NO: 354309 - DNA, 249 bp, Pseudomonas aeruginosa
atgcgcgactacacgcaagttcacgccgatgcgaaagccgaagcggagcgcatcgctgagcacgccgccgccaccaagggcggcccctatatcgccgccgaaaagatcatggcgcgccggacaactaaggggcttcagtcggctcttgttgcggcccttgccattacggcgctttacgagcgcgggcatcccgatgccgccgcgcaactgacgaaagaactggccttgatggccgacgagcgtctgtaa

SEQ ID NO: 354310 - DNA, 543 bp, Pseudomonas aeruginosa
atgactactatcccggctagccgcgtagcggcacaagaccagggcgccgccctggcacacgccacccacagcacccaagcccctgccgcgcaaaagcgcggcggcggcctggcacgtcgcatccaactgatcgccatcgcccagggccgccaaccgatgcccgagggtggcgctataaaaagccactgctgcgcagcagcaggcatattccaacccaaccttcagcacacgccgaaggcacgcataccccacgaaaggctgcgccggggcgcgaagcacatagccacgcttcgcttaatgactcgctcgcccgcgcagcttgtcgagggggggaaacgcccaccgaagcccaccgataacgcactgatccgcacgctgtgcgcgcagatccgcgagcagaatcaagagattgccgcgctgcgcatcgcgaacaccgacctcctccagcgcctggagaaagccgaaggaggtcagacaagcggcctcccgctgaccgtccaacaaaccacgcaaccactcgccaccaccgaggaaaagcaatga

SEQ ID NO: 354311 - DNA, 399 bp, Pseudomonas aeruginosa; identical to SEQ ID NO: 329980

SEQ ID NO: 354312 - DNA, 282 bp, Pseudomonas aeruginosa
atggccgtcctccagacccacaaggtcgtcgcgcaattgcctgcggtgctggagccgaacgcgatttacttcgtccgacgcggcaccggctacgaccagttcgtcaccaacggcgccggggtggtggtggcctatccgatgaacgtccgcatcccagcggctgttcctgggtatctcgccgacggctctatgttgcggctcgccatgaacccagacggccaattgccggcgtacaccgccgctggcgctcaactcaacattcaggtgctgttcaatggctga

SEQ ID NO: 354313 - DNA, 282 bp, Pseudomonas aeruginosa
atggctgtgctcaagacccacaaggtcgtcgcgcaactgcctgcctcgctggagccgaacgcgatctacttcgtccggcgcagcaccggatacgaccagttcgtgaccaacggcgcgggtgtggtggtggcctatccgatgaacgtccgcatccccgcggctgttcctgggtatctcgccgatggttccatgcttcggctcacgatgaaccctgacggccaattgccggcctataccgccggcggcgctcaactcaacctacaggtgctgttcaatggctga

SEQ ID NO: 354314 - DNA, 522 bp, Pseudomonas aeruginosa
atgatcattccgaacgtgatgctggggggcgtaccgatcgtgatacacggcggcgcccctcagtgtcagtaccaagctgtagatggcggcgtcgagcgattgaggctcagcggaggtgcggcagtacagatgacgcactggcgcaagacggcaatcaccatcagcggttcaggatggatcggtacggggatgcttgggctcgacttcgacagcccgctggagctgcgatgcaatgcgtcgcttggcatctcgggtcgtactgccgccgaccgagtattcaccatcccgggcgaggttcggccggacgccggtccatgggggctggcgctagtcggtcgtgagtgggtcagaacggacgtctcgtctgccggccaggtggtaactgtgtcggagatcccgggcgcgcaactctaccgcgtagagtggtggccgctgttccacgtcttcgcgtcggtccctcctgaagcgcttgattcttcgaacaacagccggacctggcaaattgtcgctgaggaaatctga

SEQ ID NO: 354315 - DNA, 1386 bp, Pseudomonas aeruginosa
ttgacaacactaattgaatatatcgaaatatacggcctctatggccataggaactataaggttgagctatcaaacaaccaactaatcttagttggggaaaatggaactggcaaaagcaccatagtttctatcttatactacacactcacggggcagtggcgaaaactctggaagtataaatttaacgccatcgccgtctgcattgatggtgttcggcatttaataacaaaggaagacttaaacaggttggtcgatgtagaattcccaacctcaaagaagcagcacgtcgcttaccgcttaaatgagctaggggtggatccagaagatgctttaaacgagttcggcccccctatctatagagaaataaattccgagataaatattggattgactccgagtgagcttcgaaaaatcctccaggaactttccagtccccaaagcagcatgtttgatgattcgcctccaagcatagcgagctttcaacagagccttaattttcacttcctctatcttccgacatatcgccgaatcgagcgcgacctgcaggttatttttcctgggcttgaagatgacgttaagaaatttaacaatcgaaacaggaaattctcggggataagaaagcatcttgagctcgtagagtttggtatgcaggatgtcaccgcaatgatatctgataccatgcgaactctagagaataaatttcgcacatctcttgactctctgaccggcggctatctccgagttattctaagaaaggaatacgaaaaaactgacatttccattcttggagagatacaagaagatgacttaaatgagatccttcaaaaaattgacgagtcggttttatcaagtcaagaccaaaagactcttagagaaaccattaagacttttggtgagaggcagccccaaagcgagattgacaaattatctgcacacatcataaccaagttgattttgcttcataaaactcaatacgagcttgaaaccaaggcgcgagagtttgcggcaatttgcaataagtacctgaaaggcaaagctttcgaattcaatagcaacaacttcacacttcctataagaccgataaaggacgatccttccgcgctcaatccattggaagatgaaattaagctaagtatgctttcttccggggagaaacaaattgtttccctattctcccacctttacctatcggattatgatgattatttcatcattatcgatgagccggaactctctttgtcagtaccttggcaaaaaaccttcctgacagatatcaccaactctaataaatgcaaaggcctggtcgcggtcactcattcgccattcatttatgctaatgacctccagtcccaagctcatgcagtgactgaattcctagtgccttga

SEQ ID NO: 354316 - DNA, 1170 bp, Pseudomonas aeruginosa
atgagacttcttccttcagaccctgatatagaaaccatagtttctcgagtcaaggccggagatattgacctacaaccagactttcaaagaggtgaagtctggtcaagatcaaaaaaacaacgccttatagatagtatacttcgagattggcacgtacccccaatccatgtcatagaagacatcgaaacccgaaaacaagaagttctcgacggccaacaacgattagctgccattagagacttcattgatggggagttcgctctagatggcggaatagaacctatagacaatgctttattagaaattcacggacgtaaatatcgtgatttacccgaaacgtttaaacgaagattcaatcaattcacaatccgcctatttcgtatcgtagattacaagcctggcgaaccgggcgagctgttctttagacttaaccaacctacaagcttaacaggcgcggaacagagaaatgcattcttcggccctgtgagatcacagataaagaacatggttaaagccttggacgacatgggcttggacaagagtttccttggcttctctaattctcgcatggcctatgatgatgttctttccagagttgcaatcaccctacaaagaggcacattaaatagcaaaattacatcaaccgacttagcggacctgtatcgctcagaatgttcccttaacccttgggtagaaaatacaatattctcctccatgaagattatgtcgaattgtataccattttctactcaaagcatgaagttcaacaaagcaactctatactcatggatgatgtttatcgcaaggtgcacaaaagaattcgactggtttgacgggaagcaactagcagaactaatcgaccacttcgaaaactctcgacttatcggaacctccacagatgaaataatcttcggcatccgcgcggaaatcttattcaatgtatatgaaagtagatcatctgcccgagtagcggacgtatcctccgttctactacgagacgccgtcatatggattctattttccgacatggtcaaggggtcccacagagaagtagcagcttatattcacaggctaactcatgcacttactacgtcactgagaagtggagactcattcgaagaggacgcagctgcgagagctatacttgaatcgggctgggggacattttaa

SEQ ID NO: 354317 - DNA, 1455 bp, Pseudomonas aeruginosa
atgagcatccgacgagcgaaactggatgaccactggcgccatgtaatggcacacaattacgcaacccgagtgatagaccttacaacacagaatttgctttgtattaacgatggcactatcaatatatcatccggaatatgcgcaatagtaggtagcaacggtgtaggaaagtcagcactgctggccgccctttgtgaagtggttggtcagtcagatgaactactatctaacaatcagaaactgaaagtcttgggaagcactctttccgcaaacataaccgaaaaaagcacccccaaaacccttcaagtaatcaacaatgaaagcggagaacgagaaaaacttggtgaatcggctactgaagtacattgggtagagccttcatttgtagtaaaccaagtgtacaaatccatttcggacgactcagaatttcacagcctattagagccactttccccaataaaactatccaatgatgaattggaaattctccaatacattacaaacaagagcttcgaaacctgcgacatatttgaaataaccgaatatagcgaactcgatcccttaccttatttccgagtacagtcaaacggggtcgaatacggtagtgaaagcatggggctcggcgagctttctctactaacaatcttctggaaacttcgggtactgccaagaaactcgatcctcatcatcgaagaaccagaaactcatgtatcccccaaatctcaacgcgcactgatggacatagttgcaaaatacagcgacgaacacaaaatctccattatactgacaacccactcaccagcaataatatcaaaaatcccccaagacagaatcatcctcataaatagggagataaataaaacccgcgtccagcatggaataagaaaatctcaaataaatgagctacttggagaaccgagacaatatcgcgggttaattttagttgaagacaaagctgctcagcagttcttgatatctctagcctcaattataaacacagggctattggaccagtttgagatactagatgcaaaaggagcagactcaatccgccaatccctgacgaaccttcccaaagtcaaaactccctggctaaatattttgggaatattcgacggtgacatgagggaagaaataaacccaacaaatttcaaatggcctttcacctttcttccaggaaatcaatcccctgaatgcattctcagagaaagtgcgcgaggcaatgtagaatttataaacagactttccgatagattttacaaaaccaccgaagaaattcacattgctttacagcatgtagaagggctcgatattcatgactggtacacccaactccccagacatctcggttgcgagcacatggacttaatgcgtgtattggtcgaaaactggttgactaataaccaagaaacagggaaggcttttattgactctatttcagcgcttctcgagtaa

SEQ ID NO: 354318 - DNA, 273 bp, Pseudomonas aeruginosa; identical to SEQ ID NO: 345758

SEQ ID NO: 354319 - DNA, 1485 bp, Pseudomonas aeruginosa
atgtctcagtcaaccgaattaaccggtggcgccgggtttgtctatgaaagccatgtggctgcatatttcatgtctgctcttctggcggagaccgtcaggccaccattacaaagtaaaattaaaagtgtacgtctgcaacaagccgctctgggcgctcctcttgatgatgttatcatcgaattagatacttcaattcagatgaaagcgcactttcaagtcaaacgacaccttataatatctgcctctaaaaccaatgaagatttcaaggaggttgttgttaactcttggaagacctacatcatttcaaaaaatgaaaatcgtagtgacacttttggggcgctaacagacgaaatctccagctcatcgctgagaaatgttcaaactgtctgtgaaagtgctcgaagtagcgagagtagcgaatcattctgggctatagaagctcaggctagcgtaaaattcagggagttcattgatgtcctacgcaagattttagatagcgcacagatccaggcgaccccgcacgaattatatgaatttctccaagggttttatatagactctttacgagtcatgacttcgggtgcaccattgctcacgtcagcgataaatgaacttaagacagttcttagggcggaacatcgcgctactgatttatgggaggctcttaaaggaatagcaagagaaggagcgggccaagctgcaacctacaacaaaaggtcacttcaacgtaaattggtattgttttccttcaaagacatagctgctcagcaggaagtaaaggcgatagtcgaacgatccgccagtggaacctcgggcgccaccccaattacttgctctcttgcgttctcgcatattggtatagagcagagcgatgtcgcggttaccgcattaattgtaacagacgaacctgaagcgttatctaatcagatacagtcttggaaagagcaagttgctaggagcgcattaatccctgatgagaatagatctgagattgttcgggagccactaaaaaatatagtcgcgcaaccggtgttagcgtatgtcctccttcagaacctggctgtggcagacttttctgcctatatttattatgcaaagaaaacagatattgaaaaatgggatgaatctagatgcgaactcgagtttaagacactgcccttgcttcatagattaagcagcaagcgcgaactgatttgtgagctttacactgctgaagtaaacgccaaccgattttcagaagccgctataaagcttgtagctaaaaactatcaccgtgaaatcgaaagccctatactaaaggccggctttggaaaagcatcagcaatcaaagagcttgcggatgttatcgctaaaataactgctagctttatcgcaggtgatcaagttgcagttggccagatcggctatataaaaacgagaatcagatatggcgagaatgttgtcacaagggaaaagcacttacgagaccgcaatccgctagcgtga

SEQ ID NO: 354320 - DNA, 936 bp, Pseudomonas aeruginosa
atgactacgagacgcctgaaagacattcattccgcccatgagctagctcaagctgtaggtgtaagcgagtcaaaaatactcgactacgcagtttcggattgccaggaaggattttacgaaaagctcgaaatcccaaagcgtggaaggaatcgtaaaggggaatttagagaagtctataaggcaaaccacaagtgggtcacccagcttcaccgatctgtttcgatgttggttgcgaacagtgcaagctttggtacgcacgttcaaggttttctcaaggggcgttcgaccctaactaacgctgaactccacctccgtaaaagcctaatccttcatgcggatataagaaatttcttcaacgtaattacagaaccacaagttgcaaaagcttttttaacaattggggcgactcctgaaatttcgaaattactagcgaggatttctaccattgacggattcttgcgtcaaggaactcgctgcagtccaataatttcgaatctagtttgcaaggggctggatcaagcgatgctagatttagcctccacccatgactgcatgtatagtcgctatgcggacaatatgaccatatcaggggcggaaatcccagatattagcgctattagtacgattgttacaaacaatggatttgagcttagggggagcggctgctatatccagcgacgaggctcgagacagtttgtcacagggctatccgtagttgatcgagaaagaccgcgacttccaaaaaaattgaaaagcaggcttaggcttgcagtttactacgcaagcaagtatggaaaagaacattttgaaagaagtaggcacgtagatacagttacaccttcttgggctcagatgaaaggcatgatagcttatgcacactcaattgagccggatttcgcagaaaaactatggaagcttttgaggcattcacgctag

SEQ ID NO: 354321 - DNA, 930 bp, Pseudomonas aeruginosa
atgacaccgccgagttggtttcacgatcgagggccatcccctattgaggacgagttcagtaaagctgcttctgacctcgcgggcctgattgagagagagcattggtttggtgatgcggataagcaccatcgctatcgggtggattttatcttaaaagatgcgcgactaattattgagcttgatggtcattcctcacattcaacaagagaacagttggagaaggatgctgtcagacaacgttatctaagccgagccggctacactgtgatccgtttcacagggcgagagatcgcgaaagacgcactggggtgtgtttcggaggtgcgtcagatgtacgaagagcgcatgcagcgggctcctgctaagtatcgagttatgtacgttgactactcatttgtcaaaaagcagatgaatgaggccctgaagttttaccgcgagattcaccccgagaaggaactcaccccccagtcgcttgaaaaaattacccctcatgctattgagtggctgcatgaaaaatcatttgtcacggctttcgtattctgccctaaagaattacacaatgaaatagaacatctgaatgcaactatcgtggagtatgacaagggtgagattaagttcaatactttggcaagtgaactttattcgttggatttgggcgaacacctagaaagttttgcgcatttgtttgacgagttcatggtggttgcagatgatccgatctatagagcccctattcgtgctgtgctgccagaaaagatcagtgaaaacactgtccgagcttacactcacaaataccttgccaatgccaagcttttacgcctaggcaacgatgagacctccttcgcgggtacagagttggcttacgtacgctggcaaaacatattttacccaatcggatttgctctgggactgagcatatacgaactatag

SEQ ID NO: 354322 - DNA, 1437 bp, Pseudomonas aeruginosa
atgatgattccattgggtagaataatttattgtatatcacctggtgcaactttaaaatccgccaccgagtccactgaggattacaccacggcatataactgctcagcttttaatacaaattctgaagcattagcggaggtctttgaagagatcaactctcgcgacagctttaccttagcgttcacaccgctatcatctgaaacttcgttttcgctttctagtcgtgacccagtcaaaattgaagaattttatcaaaacctgaaaaattggaatgatgcattcggaagcctcagcgggtcattgaagcttaggataggtaaggtcgcccaaagaaaaactctgtcgatttactcactttccgcttttgcagactatttatgcaaaggtagcccagccgaggtaatgggaaaggttttcaacctagctaaaaccgcatattatcttgaatccagcgagcttaaccaattgaccaaaagctcgctattatgctttggtccgaagctggcgactgacaactaccccacaaatcctgagcccagctacaagtcaaaacacattgagcttaggtcaaaggcctgttccgtttacgcaaacatcaatactaactttataccatctgactttgtatttgataagagtatccttgggcatcctctatctgaaacttttgacaggctatctctaatatgctgcctaatggcaatatctgacatcaccaaaattgataccagtggcgagatagcttatacagtcaaagggtacaccaccgaaaaactttctgtaaccaacctttcagatgtggacacatcttcaatccagcaatacctcgccgtttatcaatgggcatatactgaaggcaatataatagacaaactcggcatctgccgaaacctcctcactatacatgcaactgatggacagctcttaaagctgaaagaggggtggctggaatcaatcacgtccaaccattcaatttacttaaaagacaacctaaaacagtacattgatttaaagaacaaactttctgaacaaatacagaaaggttcagaaaaggcatccgacatcgccaaaaatatcaccaactatctgcgcacatcagttttctcactgacatcgtttctcttttcagcctttttagtccgaaccctagccaaaccgaccgctgccgaaccatcaataataacacctagcgtatactggctgtttctgcttatagctggtatctcccttgcgattctggcctacgcactcgcagaaactaacgcagaaaaattcgatatatcaaaagctataaggcattcaaatcccggtacaccgaccttctcagcaaagaagatattagttttatttttaacaatgacaaagattttaaccgggatattaactacattaaacgcacaagaaaaaagtcagtcatactgtggctatgcattttaa

SEQ ID NO: 354323 - DNA, 1113 bp, Pseudomonas aeruginosa
gtgaaccaaattcaaaccatggacggagcggtgaatggtccgcagcccccagacggcgcagctcttcaaccgaatcagctcaaaatcttcaatgctgcaattcaaaaaattgatgttcagaatcagactttgggagacccattctatcggacagctgaaactgacattaaaaattacctaacaggtctgattgacgagcttttgaagaacaaaaggaatcagtcattcaaaatcgagacaacaggcgaagtcggaaaactagtaaccggactttcaacaacaaaatttaaagaatttgcaaaagatcttagtgaacggcttcttaatctcgaagtcaacgttcagactcagctaggtaaattcaccaccttacgcagcggcagcctattttgctgtcattttcagcttgatgaaaaatcatgcttactaattgtaaaggttgaccacgccgacttcataaacgagaccaccttcataaaagacactggattacccgccaaacatcgcgctcagaaatgtgctattttcgagataattaatggggcacttgctgagacggttatcattattgatagtgcaccttcggtaaccgagtactggtggaaagactttctaacactcacagcattatcttccccccagataaacacgcttcgagcattcaccgccgtagaaggcctcctagccgctaaagtaaagccaaaatcaaaaagtgactactggacactccgcaacgctcttgtgggatattttacaacacgcccccaatgcagctacccggacatggtgaacgagttatttagcgcgtacaagcctgatagtccggatgtttctatgccggaatttatagtggcagcaaacttgctccccagtaaaaaaattgatggctttgatacccatttcgatctaaccccctcagtaatcaatgcaaaaatcaaaagacaaatcaaactatcacataacgtggaccttcgcattactggcgaagttgaagacattaaaaacttcttttccacaggcgaagaaaatggaagaaaattcctgaatatatactctgaagaaggttataacgcatttaatcgcaaggaaagcgatgatgattccattgggtag

SEQ ID NO: 354324 - DNA, 276 bp, Pseudomonas aeruginosa
atgagcaagcccttcgacatggagctgttcctcgctggagtgctgacaggctcacacgcgacgcggcgacgtcatgtgcgccaggcaaaaatcattcaggctgcaatcgcagagcgctggcagcgggccaacccttggacttggcaaaggaagcatgtggtgtggtttcttgaaaatcgcttgagcgatcacagtcatgcaacgcagtattactacgtgctgacggtccggctgctagcgcgacgtctaggaacgtcatgggtattcaagccctga

SEQ ID NO: 354325 - DNA, 981 bp, Pseudomonas aeruginosa
atggcattggtaggtagacgcgaaggtcgtaatttcggttatggcaggcaattgagctacgcagggccgcaagcgctgaaagacatgttcggcggcggccactacggcacggtgaaggcacactgtgatcggtggcaggcattcgtgaaatggtgccgctccgaaaaggggcccggcatcaatgatgcgcggcagattgatcgaaaggtgttggccgactacgcggcgtatctgcgcgacacggttagtcgcggtgatctagccgtcagcaccgcacagaaccggctctccagcgttaacaggaccatggcagcgcttcgcggtgatcagtacgtaaaattgccaagtccgagcaaggcactgggcatgcagcgcaccggggttcgtcaatcggtgccgcagggccaagatcgcgaccacatccagcgaatagtcgaggcgctttgccgctgtcaacatctaagggctgcagcgatcgtgcaactggcacgagccaccggtatgcgcttgcgtgaggccatcttggctgacctgccaaggcttagccgtgaggctaacgacctaggcaggatcaacattcaggatggcaccaaaggcggtcgcgccggtgcctcagcgccgcgttggattgcagtggacgaccatgttcgaggtgcacttagttttgcacggcaggtgtcgcctgccggtagccgcaatctgattgcgccaagcgaaagcttcctgaaagttttgcagacaatcgtccgccctgcccgggacatcctgcatgcacacaatctcagaggcttccatgagctccgcgcggcgtacgcatgtgagcgctatcagcaaatcactcagcaccgggcgcctatcaacggcgggcaacgctgcgagctaaatcagcaccttgaccgcgaggcccggaggcaaatcagctatgagctggggcacggtcggatcgatgtggtcgctgcctatgtaggaggccggccatga

SEQ ID NO: 354326 - DNA, 216 bp, Pseudomonas aeruginosa
atgaagcgggacaacacaagcgagccgtttttcatcaccgaggaagtcgcggctgaaatgatcgccagcggctatgagttcgagccgccgcccattgcctgcacggtgcacctgcatgacgtgctggtgggcatgagcgatgccgagctggcattgccgccgggcgagatcgctgatcaggagcgtgagcgtcgccggccatgtttaagctcatga

SEQ ID NO: 354327 - DNA, 2601 bp, Pseudomonas aeruginosa
atgaagttcacgctcaaagactatcagcgcgacgccgtccgcgactccttgaataacctgggcaaggctcgccgcctatggcatagcgagaatgaccggacggccttctccctcactgcggtaaccggcgccggtaagactgtgatggccgcagccacgttcgaggcgttgtttcacggtgacgatgagttcagcttcgatgccgaccccggcgcagtggtgatctggttcagcgacgatccttcgttgaacgagcagacccgatatcgctttatcgaggccagtgaccgcatcaattacaccgacttggtggtagtggaaaacacctttaacaggccgaaattccaggcggggaaaatctattttctcaacacccagaagctcagcaagaacagtttgctggtgcgcggccatgaccctgaagagatggccgccaagcgggacggcaccttcccggacatgcgacctgacctccgggcatacacaatttgggacaccatccagaataccgttgaagacccggatttgacactttatctggtgctggacgaggcgcatcgtggcatgggcgcacagacaccagccagtcagaatgctaagagcaccattgtccagaggctgatcaatggcgtgggcagcgtgcctggtatcccggcggtttggggtatttcagctacggtggagcggttcaataaggcgattgagtcggcaggcaagcacatcaagctgccgaatgtggaagtggatgcgtccaaggtgcaggaatccggcctgatcaaggacaccatcctgctggatatccccgacaatactggcgatttcgataccgtgctggtgcggcgtgcgaccgataaattgaaggaatccagccttgcctggagcgcttactccaggcagcagcaggaagcccatgctgttgtgccgttgatggtcttgcaggtgcccaacacgcctgaccccgatgaagtcgggcgggcgctggataccattttcaaacagtatccagagctgccttctgcctgcgtggcgcatgttttcggggatcacaccacgcagcgcttcggtaaccgcgacgtgccttacatcgagccgcagcgggttcaggaatcgacctgggtgcgggtgctgatcgccaaggatgccatcagcaccggctgggattgcccacgtgccgaggtcatggtgtcgttccgtgcggccagtgacaagacgcacatcacgcagttgctgggccgtctggtgcgttcgccgctggctcgccgtatccctggtaacgaccgcctgaatgcggtggattgcttgctgccgaaattcaatcgcaaggcggtggagcaggtggtcgatgagctgaccagcggcaacgaggcggcaacgccggggcgcgtgttgatagactacatcgaggtgcgaccgaaccctgctgccgcgcctgccgtgtgggaggcattcgaggcgttgccgtcacaaacacggccgcaacgtggtgccaggccagcggtcaggctgaccgcgttggcgcacgagttggtatccgacgatattctgtccggtgcaggccaccgggcacacgccgagatgcacagggttctggatgcgtttcaagccgacaacgacgccaagatcaaggccaagcggcagtccgtgctggtggtggacggcaagactgtgaaggcagatctgcggagccagggccggagcctggaacagttctgggaagatgccgatgtggccgtgatcgacgatgcttaccgccgtgcggcgcgcatcttcagcccggcgattgcccattcctatgttgaccatctggccagtcacgaagccgaccgcgacgaagacccggagggctttcttgaagccatcatggaagctcgcgtaaccgttgccggtttggggctggtgatggaggcgcaggcctattttgatgccgaggccgataagctggcgaaggactggctggcccaatacggggcgcagatcaaggcgctcagcgatgatcggcgggagtcttacaggcaaatcatcgaaatgagcacggagccgcaggacgtaggcttgctcaagcccgaggcccgttatgaagcgaccaaggcgaacgaaaacggcaaggtgagagtgctcccggtctgggatggccacttgctgtgcaacgaggccggcaagtaccccgctgaactgaatgactgggagcggacggtagtcgagactgagtcggcaaagccggggttctcgttctggtatcgcaacccgcagcagcctgggcaggcttcgctgggtatcgcctatgagaaatcggggcaatacgggattgttcgcccggactttctgttctttgctgttcagggagatggctctctcgtcgtcgatctggttgacccgcacggcctgcatttgagcgacgcgctagtcaagctgcaaggcttggctctgtacgctgccgaccatgccgatgcctatcgccggatcgagtccattgctcaggtgaagggccatgacaagctgcgcgtgctcgacttgaagcggcaggacgtgcgagatgcgattgccttgggtcaggatgcagaggtgttgttcagtagcgggttagcagatgactatcagtga

SEQ ID NO: 354328 - DNA, 618 bp, Pseudomonas aeruginosa
atgcgtttgaatcgacaggatggtggccgtcgtcagtgcatctccgttactaataacgaagtcgctgccgacgagcagaagaaattgcgcgaagatggcttgcggcccggtgatgctaagtgggaaaaatggggtatctgcgactacatcaccaaaccccgcgtcgccgctgccattaccggcaaaacgccagacggcgaacccatcaagggtgattacaaattcaccgatgaatttccgatggccgatggctttgaggaaaacgctgagttctttacgctgacctatgagacgccagtatcggtcaattacaacctagcgttcaacaggattgcgccgttgctgtggctgcgagctggagcgcgaggcaaccgcatagacaagctgcccggcgatggctgggcggtggcagacgcctatggattgctcagcaatgtggatgcggccacaccttttatcaaggcgctggccaaggccgctgaaatccgcattgcttatatcgtcactgatgacgaccgccgctttcaggccattgccaagcgcttgcctgatggtgtcgagccggtgcgcttgtacgaatcgtatctgaccaacttcagcttcaccaacggagagtaa

SEQ ID NO: 354329 - DNA, 573 bp, Pseudomonas aeruginosa
atgaatcaacgcataggatacgcccgcgtatcgactgatgatcagcacctggacctgcagcgcgacgcgctccagcaggctgggtgcggcgtgatctacgaagaagcggtcagtggcaagaatacagcgcggccggagcttgaacagtgtcgcaaggcgctgcgggcaggggacaccctggtggtgtggcggctggatcgactcgggcgcagcctacctgatctggtgcagatcgtgaccgatcttgagcagcgtggcgtcgggtttgagagtttgacagaaaaaatcgaaacctgcagcgcggcgggtaagctgattttccatgtgttcgcagcgctggccgaattcgagcgtggcttgatccgggagcggacgcaggccggcttggccgcagcgcgtgcccgtggccgatcaggcggccgtaagccgaagctggacgagcagcagattagagagatcaaagccctactacgtgaccccgatattcaggttgctgacgtggctcgtcgctatggcgtatctcgaaccacgatttacaagcattgcggcgtcgtgcaaccgcgccatcaatag

SEQ ID NO: 354330 - DNA, 204 bp, Pseudomonas aeruginosa
atgaaggacagaccgcatgacacggcgatggccgagcacttccgcgcccatccgacgtatgcagcggagctgcttgctgacgtccgccgcgacggcaacccggccgagctagccattctgttgcgacagatggccacggcttcggtagatgttgcgggactggatgacgccgaaacgggccgggcgactggggcagatttttag

SEQ ID NO: 354331 - DNA, 1773 bp, Pseudomonas aeruginosa
atgcatcatatctcacaagttagaatacagaatttcaaatcaatcgcggacggaacatttccactttcgcactacacccccttggttggctataacaacgctggaaaaaccaatattattcgggctattggctggataatcaaacgatctagcctcgcgccagaagactttcaccttaccgatcagccaattattgtagaagcggaaatctctggcataagtgctgaagtgctcgatgcgattggtgatgctcaccgtggacgtatcgagccccttgtcgttgacggtcagatacgtattaggcgcacgcaagccactccagggcagccagttgcggggatacgatttgaagtattaaggcgagaagccggtcaaattgaatgggttgtcaatccagcgggaatcgacgctgcaataggcgctctgtttcccgagcctatttttattggagcgatggaaaacgccacagaggacgtagcgaaatttggtagcggaaccacaatcggcaagcttcttaaagagataatggctcccgtcattgatcggcactcgcctgctgttgctgaggcactgcaagacgtcggaaggcgtctttcagccaacgctgagaataaagacgaaactttagtcgatctcgacggccgtattcaaggcgagctgtccaagctattccccggtgtctccgccaagacgcacatacctgtcccagatttttctgatttcatgaaatcagcgacgatacggatttttgaagaggggttcgaaaatcccgacgggagggatgcctcgtcatttgggcatggcgctcaacggtctatacaaatagctcttattaagtgtctagccgaagttcgaagagctggcggtggaaatgctggtagaacgacgctccttctgattgatgagccagagctctatctacatccccaagctatcgaagtcgtacgcgcagctttaagccgactcgctggcgacggctatcaggtggtcattacaacgcattcagcaaatatgatttctcgggacgatgcccccaatacccttctcataagaagaagcgcagctctagggacaagatgctatccacgaataaaggatgcggtggcagcggcaattgatgatgcgcagcatcagtcagaagcgctatttgccctttcaaactcgagtaagattcttttttccgagcgagtcgtaataacagaaggaaaaaccgaacgcacaattctgcctacaatatttcacaaccattttggaactactcccggtgaagataagattgggtttgttgatatcggaggaactcctaatattccagatactataaaagtgttgcggtcgatgggcgtgccttgcaaggcgattgtagatttagattttgcctttaggatagctcctcttaagggtctgctcgcgcccgatcatgcggatctcatcgcatgcaaagcaatactggaagaattaagaaatggcggccacattggccttgatgcagatgggcttcctactagacataatggaatgcccgctgcggcggccttcgaaagacttgcccaagaagaaaacgcaatagactgcattgcaagattgcatgaagagttgaaagcgatgagcatttggctatggacgaaaggcgcgattgaagcgcaccttggtatagccaaaacaagtgcagcccacataaccttcatgaccagcctttctaatgaggaatataaagctggccttcccgactaccaatctgttagcagagcaatggattggttgcgcctttaa

SEQ ID NO: 354332 - DNA, 639 bp, Pseudomonas aeruginosa
atgcgattacaagaattgattaatgcgacgctgcgcgaatgtatgcgaattagcgcgaatgtacgcgattgcaccatattctactggccattctgttccggtcgcataaaatcgcacaggagtagcaggcaggatgtgtgttgtacgggtacgggcaagcccgtcaccatccaacactgccccttactcaccttcggttcgacggcaacttgctctgcgaggctaaccgtcgctgccgcgatgacaaacggagaagcaccaaaaggaggagcgagtaccgtggagttagagcaaagagcccgtaggcgcggaaaacccattgaagtttgggttaccgatgaggaaaaggcggagatcgacgcaagggcaaatagtgcgggtttgtctcggtcagcctacatgcgtgcggccggattaaatcaccgtgtaggagcaatagccgatcttgatgctgttcgtgaccttgtcaaagtaaatgccgactttgggcggctcgctgggctattgaaattatggctagcggaaaagcgcggtcagggtgcccggccatttgacgtggaagcgttgatgatgcagttcagagaacttcaacatcagacaagagggattatgagccgaatagtgttcaagaaaaaatga

SEQ ID NO: 354333 - DNA, 1158 bp, Pseudomonas aeruginosa
atgggatcgcaccaggagcggccgctgatcggcctgttgttctccgaaaccggcgtcaccgccgatatcgagcgctcgcagcgctatggcgcattgcttgcggtcgagcaactgaaccgcgagggcggcgtcggcggtcgcccgatcgaaacgctgtcccaggaccctggcggcgacccggaccgctatcggctgtgcgccgaggacttcattcgcaaccggggggtacggttcctcgtgggctgctacatgtcgcacacgcgcaaggcggtgatgccggtggtcgagcgcgccgacgcgctgctctgctacccgaccccctacgagggcttcgagtattcgccgaacatcgtctacggcggtccggcgccgaaccagaacagtgcgccgctggcggcgtacctgattcgccactacggcgagcgggtggtgttcatcggctcggactacatctatccgcgggaaagcaaccatgtgatgcgccacctgtaccgccagcacggcggcacggtgctcgaggaaatctacattccgctgtatccctccgacgacgacgtgcagcgcgccgtcgagcgcatctaccaggcgcgcgccgacgtggtcttctccaccgtggtgggcaccggcaccgccgagctgtatcgcgccatcgcccgtcgctacggcgatggcaggcggccgccgatcgccagcctgaccaccagcgaggcggaggtggcgaagatggagagcgacgtggcagaggggcaggtggtggtcgcgccttacttctccagcatcgatacgcccgccagccgagccttcgtccaggcctgccatggtttcttcccggagaacgcgaccatcaccgcctgggccgaggcggcctactggcagaccttgttgctcggccgcgccgcgcaggccgcaggcaactggcgggtggaagacgtgcagcggcacctgtacgacatcgacatcgacgcgccccaggggccggtccgggtggagcgccagaacaaccacagccgcctgtcttcgcgcatcgcggaaatcgatgcgcgcggcgtgttccaggtccgctggcagtcgcccgaaccgattcgccccgacccttatgtcgtcgtgcataacctcgacgactggtccgccagcatgggcgggggagcgctcccatga

SEQ ID NO: 354334 - DNA, 240 bp, Pseudomonas aeruginosa
atgaccgaccgccttccctgccgcgcctgcggccatctcattctcccgaccacggcggcgagaaacgacggactgtgcatgccctgcaagggcggctaccggcagaacatcgaggatggcaagcacttccacgcggagcgacggcgctacctggcgagtccgcaggcgctgtactggagcgcgctggtgaatcgcgtctacgatggccgcgagggattcgccgggctgtcgccggcctaa

SEQ ID NO: 354335 - DNA, 843 bp, Pseudomonas aeruginosa; identical to SEQ ID NO: 335619

SEQ ID NO: 354336 - DNA, 684 bp, Pseudomonas aeruginosa
atgcaagcccttccgccccggcggatcggcccggttcgcggcccagccaataacaatcacacgcgagatgccgaccatgtccttcgatccccaaccctttcgccagcagtaccgcgcggccatccggcccggctacaacccctggctgcacgccggcttcgtcctcgcctacggcggcgcctggatcgtcttcttcctctcccggctcgagcagccgagcctgctggaatggctgacggtgccggccgcgctggtgttcttcaactggggcgagtaccgcatccacaagtccctcggccaccacaagcacccgctggggcggatgttctacaagcgccataccggcgaccaccacagcttcttcgtcgccggccagatgcgctacgaacaggcccgcgactggcgggtgatcctgttcccggcctggctggtggtggtcttcagcctcggcgcgctgctcgcctggagcctgctcggcctgctgaacgacaacctcgccgcgctgttcgccgcgaccctgctgctgggctacctcagctacgagatcttccacgcctgcgaacacctgccgccggagcatccgctcagccgtctgccgtggatcagccacatgcgccgcctgcacgaactgcatcaccgtcgcgagctgatgcagacgcacaacttcaacctggtcttccttga

SEQ ID NO: 354337 - DNA, 231 bp, Pseudomonas aeruginosa
atgaacccaacccagtccactcaagggcaatctcttatcccacagcccgaactgtgcaagaaacttggcaaaactcattccggacttgccaagctgaggaagaaagaccccactttccccaaaccgattaagtttagtgacactcgccaagctgccgcatattacgtgctcgcagaagtcgaaacttggctaaatcacaagatcgcccaacgcgatggggaggctgtatga

SEQ ID NO: 354338 - DNA, 219 bp, Pseudomonas aeruginosa
atgaacagcaccaccattcgcgctcagaaaataacttccgaaatcagcgctgatgctaagtatcttcgcgaacagggattgagaaacgaggccttcgcacacgctacgtcggtaaccctatctctgcatctgatcaaggccctggagcgcatcgagcgtctggagggcgatatcaaggtcctgaccgaattattggccaatatggagtccagccgatga

SEQ ID NO: 354339 - DNA, 558 bp, Pseudomonas aeruginosa
atgctcatcacgcacgaacgagaaaagctgattcaagcgatcatttttttcgtcaaaaacaccagaaactgcgggaaggtgaagctctttaagcttctttacttccttgatttcgagcacttcaaagatactggtcgaagcgtgacagggctggattacagcgcttggcctatggggccagtgccagtcgatctggtggcagaaatagacttgccgcagcccgacatggcggcatcaatgacctttacccaaaagccgattagaaatggtcgccaggtcatgcttgatgtcactccaaatatagagttctcggatcagaactttactcgtcgtgagatgctgctaatgcgccgtcttgccgaggagtatgccgatgcgctggctgatgacatggtcgaggctacgcatcttgagaacatgccatgggacaaggtttacaaccaacagggcggcaagcaacaacgcatcccatacgaactcgcactacgtagccaggaagcggaaactctgcttcaggtagcacgagaacgaaaagagcttctggaacagcttagatga

SEQ ID NO: 354340 - DNA, 312 bp, Pseudomonas aeruginosa
atgcgggcaatcgccatcgcaatactgatgctttcactcgccggctgtgcgagcagaggtacaccaatcgaacaggctgatgttcggcagatcgttcagggtcagacaacctacgaccaaatgatcgaacgcttcggcaatccgctttcccagtctttcgactccgatgggaaccttcaagcgatctggttttacgtctatgtcgggcctttcggaatgggtatggagcagcagaacctgaccgtcctcttcgacaaggacaacaaggtcaagaaatacgtgttgacggacggacagccaggtaagcgctga

SEQ ID NO: 354341 - DNA, 801 bp, Pseudomonas aeruginosa
atgaaacggactgcggtgctgattgatggtggtttcttcattcagcgcgttaattttttcctgcggagattttttgccccaggcttcgcgctaacggccaagcagctctgttccgttgtggaattcatcgttcgcgcgcacattgaccacgacgaaggtggtcaatctcgagagctgtaccgagtctatttttacgactgcccgccgctggataagcaacttcaataccctttgccgagactaggtgaaacaacacctcctcgcctcaactgcaaggaacaccctccctacaagcagcgtcgcgaattgcaggactgcctgcgcagcctgcgaaagacagcattgcgtcttggcgaattgtcgaatcacggcgagtggcgcctcgttagccggtcaatgcaggcgctgataaagggggagagggcatggtccgatcttaccaacgatgatttctattacgacattgatcaaaaagctgtcgatctaaagcttgggatggacatcaccacccttgcgctaaacgatctggctgacgtgatcgttttggtggctggtgattcagacttcgtaccggcggcaaagcttgcaagaacaaatggaatcgatttcgttctcgatccaatgtgggcaaatccctctgctagcctgcgcgcgcacgtcgacggaatacgctcattcgacgtggtgaaaatgatcagcgagtcatcgagcacagatgtgacagtacggcccgactggtggcctgaacttccgatacctgaagacttgccagttaaggccgccaacgacggcgatgcctaa

SEQ ID NO: 354342 - DNA, 201 bp, Pseudomonas aeruginosa
gtgaaaggcccggccgtgctggccggctacagcgaagagcagggggcgccgcaggtgatcaccaactcctcgtccagcgatacccgctggcatgagcagcgtctgccgatctacctgcgtcagcacgtgcaacaatccgccgtcagtggtacagagagcgcgctgccctacgctcgggcagccagcctggaaaaccgctga

SEQ ID NO: 354343 - DNA, 255 bp, Pseudomonas aeruginosa
atgggcgccagcgccgccctgccgatgttctggcaactgccgccggccttcctttccagcgccaccctggccgccggaatcgccctgatcagttccttcggcagcatcgccgccttcctcgcgccctacctgatcggctggatgcgcgacaccacccagagcgccagcctggccctgtacctgctggccatcctcatcgccctcggcgccggcctggtcctgcggacccccgccgccgtggtcaacccacgctga

SEQ ID NO: 354344 - DNA, 1461 bp, Pseudomonas aeruginosa
atgatcaaacactggatcaatggccgcgaggtcgaaagcaaggacgtcttcgagaactacaacccggccaccggcgagctgatcggcgaggtcgccagcggcggcgcggcggaaatcgacgcggcggtggcggcggcccgggaagccttcccgaaatgggccaataccccggccaaggagcgcgcgcgcctgatgcgccggctcggcgagctgatcgaccggaacgtgccgcacctggcggaacttgagaccctcgacaccggcctgccgatccaccagacgaagaacgtactgatcccgcgcgcctcgcacaacttcgagttcttcgccgaagtctgcacgcggatgaacgggcacagctatccggtcgacgaccagatgctcaactacaccctgtaccagccggtgggcgtctgcggcctggtctcgccgtggaacgtaccgttcatgaccgccacctggaagaccgcgccgtgcctggcgctgggcaacacggcggtgctgaagatgtccgagctgtcgccgctgaccgccaacgagctgggccgcctggtgcacgaggcgggcattccgccgggggtgttcaacgtggtccagggctacggcgccagcgccggcgacgcgctggttcgccaccgcgacgtgcgcgcggtgtccttcaccggcggcaccgccaccgggcgacggatcatggaggcggccgggatcaagaaatactcgatggaactgggcggcaagtcgccggtgctggtcttcgaagacgccgacctcgagcgggcgctggacgccgctctgttcaccatcttctcgctgaacggcgagcgctgcaccgccggcagtcgcatcttcgtccaggaaagcgtctacccgcagttcgtcgccgagttcgccgcgcgcgccaggcgcctgatcgtcggcgatccgcaggacccgaagacccaggtcggctcgatgatcacccaggcccactacgacaaggtcaccggctacatccgcatcggcctcgaggaaggcgccaccctggtggccggcggcctggagcgtccggccggcctgccggcgcacctgagcaaggggcagttcatccagcccacggtgttcgccgacgtggacaaccgcatgcgcatcgcccaggaggagatcttcggcccggtggtctgcctgatcccgttcaaggacgaagccgaggcgctgcgcctggccaacgacgtggaatacggcctggcctcctacatctggacccaggacatcggcaaggcccatcgcctggcacgcggcatcgaggccgggatggtcttcatcaacagccagaacgtgcgcgacctgcgccagccgttcggcggggtgaaggcctcgggcaccggacgcgaaggcggggaatacagcttcgaggtattcgccgagatcaagaacgtgtgtatatccatgggcagccatcacatcccccgctggggcgtgtag

SEQ ID NO: 354345 - DNA, 291 bp, Pseudomonas aeruginosa; identical to SEQ ID NO: 336196

SEQ ID NO: 354346 - DNA, 846 bp, Pseudomonas aeruginosa
atggataaggcactttttaatttggttctaaatcttataagaaaacaaccatggctttcgtcaaaagtacgtgagcttgagtctattctttatgatgagtgttccgatctggagtcgagaaatttgttgatagagattcttgacagatttctatatgtggatcgtgagctttattttcagttaataatggaagttgcgcaggatattgtaactgagccaggtggcgatgaggctattacacaagtagttgcaatggctgctgattcaaatgctgatagctctcaggaagttttatataatttaaagccaaagcttgaagagcttggatggcggagacatgttcttgttgatcgttatggcaaagccttgagtaaatgtaaggatgatggttatagaaaaataatccttgtggatgattttgtggggtccgggaaaactgtcgtgaatagggtgagagatattaatttgaggttctctcaagccaagatagaagaattctcggttaaagttaaggttttagtatccaccgctgttgggttagataatgtcctctctgctgggattgatattactgctcaagaaatattaaaaaaaggaattgatgattactacgatgctgaaagggctgctttaaatagagacttaatgcttaagttggaggccggactttccgcagagtatgaaggaagggatatgcctagcctaggatatggtggggcgcaagcagcatattgtagagctgaatcaaatacgccaaatagcgtgtttccaattttttggtggcctgtaagttcaaatggctcagaacgatccagaatattagttcgtgctatgagggatgcataa

SEQ ID NO: 354347 - DNA, 1026 bp, Pseudomonas aeruginosa
  misc_feature (366)..(375): n is a, c, g, or t
atgaaaaaaataagctatgaatcttggcggaagtattttctaagtaggggtatttctcctgattatattcaggcttacctttcttatattgaaaagctttcatccacttcttctccggtgatttttgagtttgaacatctatcaaagttgataggtattgagtatgatgctctccgctctatggtgaactcaccttcttcttattatagagtttttaatataaagaaacgagcgggtgggctgcgtgagatacatgctccatatccatcgctgttgatgtgccaggactggatatatagaaatattctgttgagtaagcctgttcatgcggcagcacatggctttgtacctagtcggtctatattnnnnnnnnnngcttctaaacatctcggaaagaaatgcttattaaaaatggatattaaggatttttttccatctataaaaattaattgggtgataaagtattttcaaacaattggttatgcggataatgtttctttctatttggcttcgctttgctgtagcgatggcgctctggttcaaggaagctctgcaagcccatatatcagtaacttattgttgtatggtttggatgctagactttcaagattggcgaaatcgtatggagtagagtatacaagatatgctgatgacttgacgttttccggtgactatattccgcatttctttataggctttgtgactgaaattgttggtgactatggtctctcggttaatgaggggaagactcgtttaaaaataggtgatggacagaagatagttacagggctgtctgtcgcaggagaaaaattaaaaattccaagggaacataagcgtagaatgaagcaggaacttcattttataagaaagtatgggtatttatctcatatggctaagcagaaaaggcgtgatccatttgccttggagtctcttttaggacgctttagcttttggttgcaggctgagcctgactcctcagatgctcggggcggagtggagtatctaaagtctattcgttggttatag

SEQ ID NO: 354348 - DNA, 1347 bp, Pseudomonas aeruginosa
atgcctacgcccgacaagaacaacaagatcgacgtccaggctttcatcgatgcgcaggcggtttccgccttccagttgcgagtcctgtcgctgtgcttcctgatcgtcgccatggacggattcgacaccgccgccatcggcttcatcgccccggccctggcccacgactggcaactgagcccggcgcaactcagcccgatcctcggcgccgcactggccggcctggccctcggcgccttcgccgccggcccgctggccgaccgtttcggacgcaagagcgtgctcctgctctcggtgctgttcttcggcggctggagcctcgcctcggcctacgccggttcggtggaaaccctggccctgctgcgctttttcaccggcctcggcctgggcggggcgatgcccaacgcgatcaccctgacctccgaatactgcccgcgccggcaccgcgcgctgatggtcaccgcgatgttctgcggcttcaccctcggctcggcgctgggcggcctgctcgccgcgcggatggtcccggcgctgggctgggaaagcgtgctgctgctcggcggcggcctgcccctggcgagcctgccgctgctctgggcatgcctgccggagtcggtgcgcttcctcgcccgccgcgcaccggacgcggcgcgcctgcggcgcatcctcgaacgcctggggcgcctacccgacggctgggccggacgcctcgaactgcccgctgacgagtccgacggcacctcgcccctgcggcagatcctcggcgccgagctgcgcggcggcaccctgctgctctgggccacctttttcatgggcctgctgatcatctacctgctgaccaactggctgccgacgctgatcggcggcaccggcttcagtctcggcgaggcggcgacgatcagcgccatgttccagctcggcggcaccctcggcgcactcctcctgggcagcgccatggatcgcttcgacgcgcaccgggtgctgagcctggcctacgtcggcggcgccctgttcatcctcggcatcgccagcctctaccacagcttcgccctgctggcgctgtgcgtcgccggcgtcggtttctgcatcagcggctcgcaggtcggcgccaacgccctggccgccgatttctatccgacccgcagccgcgccaccggggtcagctgggccctcggcctgggccgcatcggctcgatcgtcggctcccttagcggcggcgccctgctcggcctgggcctgggcttcagcggcatcctcgccctgctggtgatcccggcgctgctcgccgccgtggccgtgcatcgcctgggccggcgccgggtcaggccttctcccaccactctctga

SEQ ID NO: 354349 - DNA, 1167 bp, Pseudomonas aeruginosa
ttggtgtatagagatggttttcgagtttatccctatggtgggcctgccgatgattggcttgatttagatcgtaacgctctctcggcctcacaatataagctcaataggtcgcagattgtaggttatttaaaaattgggaaagaagaaaatcccgagcttcatgaccaaaccaatcgagagggttttcgggatactcctgaaaaagaggctctacggcgcttgctgcgtcatgtgttcattacagagtgtcggcgttacttagaaacagtcgataaacagaataagattgccgatgtcgatactgtggatgagcttgaggagcgcttgaccgactctcaaaaaattgcattaaaagggttgagtgatctacagactagagtcccccaagaaagcgaaactattgaaaaaattagattccagctggctgatatacaggacgcatgggagcgagcgaagattaccattaaaagtcacgatgaggacatggagcaatatgttcatcttgctggtgttggcctacaagtggaatttatatcgcatgagctagcgcgcgtcacaggggatgcgctggatgtactatctaaaaagggtgacataaataacgaagtcacaaagaaattcctgcatgcacagttgaagacactgaataagcgtgtgcgtgtgctcgatatgctgagtattcctggtcgccagactaaaacatgggttgatctggaggatgttagtgaccttttatatgaggtgcatgagaataaaataaggcggcacggtattgtatttgaagttaatgttataaatgatatgcctctaaaggtaaaggctgagaaaggccaggttcttcaaatattggataatctgtttagtaactctttttattggcttaagcatcggttcaatcgagatgaaccgccgactatatcaattcagattgattatgagagtcgcagcttgatttttagcgacaatgggccgggtatccctgagagtatatcagataacagattcgatccttttgttacatctaagacttcaggtgaagggcgagggctaggattgtttatttcgcgccgtctggcttcatataatgatgctgaactggttttaggtgagaagataaacggtaagtacaactcttttgtcctgaagtttaagcaagggaatgcgtga

SEQ ID NO: 354350 - DNA, 1203 bp, Pseudomonas aeruginosa
  misc_feature (1135)..(1173): n is a, c, g, or t
gtggcgattgtattcaaggctagagttttattagagctaggcgctgagctgattagttccgatgcggttgctttgtatgagctggtgaagaatgccattgatgctggctcgccagacgtcgagatagcaattactgttgtcctacagcggtcttcatttgatgaattaaatgatattttagacggcaatagaacggataaagataagctagtaatttttaaggaagctatagatcgattaattgaggatgatgctccgcaagaagcgctagatatctttcatgaaactttgggagtgccgcgcagtgtcgaagacgccaagatcaagctggcgcaggcatattttaaagctaataagattgttataagtgatcgtggccatggtatgaccatgggggcgctgcgaagttgttatctcacagtaggcacccctatgcgcgtgaatgagcgtgaggcgagaaagcagaagaaatcggacggagcagccccgatcttaggtgaaaaggggattggccgcctgtctgccatgcgcttggggcattatgtatatctaaagacagcagttaaaagtgagtcgaactggcatgttttacgtatggattggagaaaaatattcgccgatccaaatcttgatgcagatgctctggattatgaacctcaagtgggaaaagagaagcctgaggctgagtatagtggtacgaagataattatccgagatctccagtcagactggagtttggaaaaaattaacggccttataagttcggaaatggccaagctggctaatccctttgattcaaatttttttaataagtattttaaattttactatcaagatcagaaactgcagctagctttctttgagaaattaaagctgaatcatgcagatgcggtttgcaccgctagtttcaaaaagctagagggggttgtcagtaaaaacccgctggactcatgggagctaagcgttcttgttgagtataaaagatatgacacgcagcgtctccatacattttcgggtgagcatcttgcggggtgtgttagggagaatttaaaaagaattaaggctaatagccctgtggcatctaacgatgttgttgtaagtgctcttaagactttggggccatttgagactaagnnnnnnnnnnnnnnnnnnnnnnnnnnnnnnnnnnnnnnngttttggtggttcaatcgtgggcgaattag

SEQ ID NO: 354351 - DNA, 1029 bp, Pseudomonas aeruginosa
atggaagatatcgagcaacagatagcagaaaagtactttaggaatggtgagggatttctgcaaatctatcctgacgaccaagacggcgagatgtatgacttacttctgcgcgaagggagggaaatctgcgctttgctgccagacgataaagtgaagctgtactttgtggatgcggtgtcgtggcaggctggtgcggattcggaactaaagacgatcctagtatggaagggcatacttgatctggtttttaagctggcttccctggttaccgtacatgcccgtcccacaccatctccagaacatgccgcacttttgccttggcgtctagatatcaaggcttggctcaggaatggagtctttgactgggaaagccaggattactggtggttgcgtgatcccgagtatcggataacgttcagtacatttgcgcgcgcgatattttgcttcatccttctgcatgaggtgggtcattttcataatcttcatgccgtgcggcgggaagagcgatgtgcacagcagggggaatccgtagctgatcgggcgcggctggaaaagcatgcgcgagagatcgtcgcggatacctacgcgttccagttcctgatggatgagctcaaagaaaagctctttcctgacgaattgtactatcagcgcgagaggcacattgtaattaccgaggcatgctttattttcgcgctaatttctgtatcggcagtgttctggggcttcagtgtcgttattcctatggacgagtcacatcaggagaacggctaccctggacatgcttttcggttgcgtgcgattcaaagtgcagcactagagcatggaataaatggcctacagcccgaggtcgcataccggatagtttcaatggcgatcaaacagtgctttgaaatatttgaagatgcctcaagcggtgattttgttgcgtggagtcaatcagttcaagacgcgatccacggtgctcattacaaagatgtttgcgaggaggtcagccattggtcgaaccccttctatgccaacagaagttga

SEQ ID NO: 354352 - DNA, 1197 bp, Pseudomonas aeruginosa
atgaccaagagcactatcgcattgaacgagcttgccgagaaaggggcagataccgatctgctcaagcacatgatccagttcgttgcccagcgcatgatggagctggatgtcgaggcgctatgtggcgccggcttcggcgtcaagagcgaggagcgtagcaacagccgcaacggctaccgggatcgtcggtggcagacccgcgccggcgatgtcgagctgcgcatcccaaagctgcgccagggtagctacttcccgcccttccttgaaccgcgtcgcaccgccgagaaggcactcgcagcagtgatccaggaagcctacgtgcagggtgtctcgacccgctcagtggatgaactggtgcaagccatgggcatgagcggtatctccaagagccaggtgtcacgcctggccggcgagatcgatgagcgcgtgcatgcctttctcgaccggcccatcgagggcgactggccctacctgtggatcgatgccacttacgtcaaggtacgggaggccgggcggatcgtctcggtcgccgtgataatcgccgtggcagtgaataccgatggtgtgcgcgaagtgctcggtatgcgcgtcggcccctcggaggccgagccgttctggacggacttcctgcgtagcctgatgcgtcgcggtctgcgcgtggtgaaactggtgatctccgatgcccacgagggcctcaaggctgccgtagccaaggtgctgaagtcgacctggcaacggtgccgggtgcacttcatgcgcaacgctctggcccacgtcggcaagggccagcgcaccatggtggcggccttgctgcgcacggtgtttgcccaggacaacgaggccgaggcgcgccgccaatggcggacggtggccgagcagttgcgtgagcgcttcccgaagatcgcccagttgatggatggctgcgaggacgaagtgctggcccacatgggcttccccaaggcgcaccgacagcaaatccacagtaccaacccgctggaacggctgaatgcggagatcaagcggcgtaccgacgtggtcgggatcttccccaatgacgccgctatcgtccgcctggtcggagcgatgctcctggagcagaacgacgaatggagtttgcaacgccgctacatgcagcttgaagggctgcaatcactcagtgacaatcaaaccgctcggctatccgctgtgatcaactga

SEQ ID NO: 354353 - DNA, 1209 bp, Pseudomonas aeruginosa
atgaaaacgacgcagtacgtggcccgccagcccgacgacaacggtttcatccactatccggaaaccgagcaccaggtctggaataccctgatcacccggcaactgaaggtgatcgaaggccgcgcctgtcaggaatacctcgacggcatcgaacagctcggcctgccccacgaccggatcccccagctcgacgagatcaacagggttctccaggccaccaccggctggcgcgtggcgcgggttccggcgctgattccgttccagaccttcttcgaactgctggccagccagcaattccccgtcgccaccttcatccgcaccccggaagaactggactacctgcaggagccggacatcttccacgagatcttcggccactgcccactgctgaccaacccctggttcgccgagttcacccatacctacggcaagctcggcctcaaggcgagcaaggaggaacgcgtgttcctcgcccgcctgtactggatgaccatcgagttcggcctggtcgagaccgaccagggcaagcgcatctacggcggcggcatcctctcctcgccgaaggagaccgtctacagcctctccgacgagccgctgcaccaggccttcaatccgctggaggcgatgcgcacgccctaccgcatcgacatcctgcaaccgctctatttcgtcctgcccgacctcaagcgcctgttccaactggcccaggaagacatcatggcgctggtccacgaggccatgcgcctgggcctgcacgcgccgctgttcccgcccaagcaggcggccttgtactatggtggacgggcacggcccgtccgccgctcccacatgcgacaaccaaggactcccaccatgaccgcactcacccaagcccattgcgaagcctgccgcgcagacgccccgcacgtcagcgacgaagaactgcccgtgctgctgcggcagatcccggattggaacatcgaagtccgcgacggcatcatgcaactggagaaggtctacctgttcaagaacttcaagcatgccctggccttcaccaatgccgtcggcgagatatccgaggccgaaggccaccatccgggcctgctgaccgagtggggcaaagtcaccgtgacctggtggagccactcgatcaagggcctgcaccgcaacgacttcatcatggcggcgcgcaccgacgaggtagcgaaaaccgccgaggggcgcaaatga

SEQ ID NO: 354354 - DNA, 228 bp, Pseudomonas aeruginosa
atgcccgccatcactatcccgccgcccaaacgcttctccttcccccagcgccgcatctatcgcttgcaacaagtcatggacgcgaccggctttggccgcgcctggatttacgaactgatgagcgaggggaaattcccgaaagcccgcaagatcggcgtccgcgctgtcggctgggattcgctggaggtcgagcaatgggtaaatgatcgcctggagggtcgtgcatga

SEQ ID NO: 354355 - DNA, 156 bp, Pseudomonas aeruginosa
atgaaaaaggcgacccaatccgaggaaagaagcggccgacgcaacgccgactccatccactccgccctgcacacgctcgccctccattgcctcatcagcctgctgatcacgctggtcgtgctcggctgtacgtggctggtggaggtgctgacgtga

SEQ ID NO: 354356 - DNA, 363 bp, Pseudomonas aeruginosa
gtgaacaacatcaccttgctgacctgtctcgacaccctggccgcagggatagaccccgccgaagtactggagaacgccccgacgaagatgtcgcgggtactcgcctacatgctgatgccgagccgcacgctgaatatttttgaagccgagcgcattggcgatcactgcttgcgcagcacgatcagcaccttcgcgaacacccacggactgatcttcgaacgcatcaacgagagggttgagaacaactggggcacgccgtccgatgtcgtccgctaccggctgcccgagacccagcgcaaagctgcgctcgtcctgctggcgctcctggtggtaaaggcccgtaagtccaagccgttgaactga

SEQ ID NO: 354357 - DNA, 912 bp, Pseudomonas aeruginosa
atgggcgccctcgacctgttccggcaacggctgggcaggcggcccttttgcagcgataacccggccacggatggcctttatcgcctgccggtcgctgatgccctggcccatcaactcattcaacccaacactgccaagcgcgtagtttgcctgaccttcgacgttgaccgaccaggcgctgctatcgactggagtgaccgcaacgctcccgcgccgagtctatccgtgatgaacccggcgaacgggcacgcccacctgatctacctgctggccgagccggtacccgtgtcggacgcctcccacatcaagccggtgcgctacctggccgcgattcaggagggtatccgccacactctggatgccgaccgaggttatgccggtctgatagtaaagaaccccacgcatcggcactggcgaacgcagcaatgggccgacgcttacagcctcgacgagcttgccgatagcgtcgagctgcccacgcctgtcgagatgaagcgccgcgcacaacaggccgactatgcggggcttgggcgtaattgcgccctgttcgaaatcgcccgcagaaaggcctatagcatcgtacgcgaatactggcgcccgggtggagcagtgccctttgccaccgcagttctggagcttgtggagacagagaacgctggcctcgccgtgccgctatcgacgggagaataccgagcgattgcccgaagcatcagccgttggatctggcagcgcttcaccccggacgaattccgcaagatccaagccgccaggggatcgctgaaaggctcggccaggcgcgaacagttgctgcccactgcgcaggcaatggcgcatgaaggctacagcctccgcgagattggcgatgccttgggcatgtcgcactcgactttggccgattggctcaggcgttag

SEQ ID NO: 354358 - DNA, 597 bp, Pseudomonas aeruginosa
atggaacaaaagctgaccgcagaactatcagtagatgcccccggccaggccgtggcgcgcaccgtgaccagcccggagtgcttgagcgcgtcggtactgacgatctgccagaatgtcgaccactcacaaatcaccgagatgatcagtgagcttaagcagcagacggcggccattcacgcggatgacctgtcccgcgccgagagcatgctgatctcccaggctcatacgctggacggcatcttcgcgaggttggccagcaaagcgctgactacagatcatctggatgtgatggagcgctacatgcgcttggcattgaaggctcagaaccaggctcgcgccaccctgcaaaccctgggcgaactaaaggcgccgaagcagatcgcattcgtgaagcaggccaatatcggcaaccaggtacaggtgaacaacgacagcagccctacgcgcacgcgcgcgaagaaaaaaacaaaagcgccaaacgaactattggaggtagagcatggggaacggttggacacccgcgcggcgggcacggcaggcggagctgatccggcaattgcgaccctggcaaaaaagcaccggaccaagaagccctga

SEQ ID NO: 354359 - DNA, 2199 bp, Pseudomonas aeruginosa
atggagcgattctattcttggcgggatctcaaccactgcccagatcaaggaacagtcgaagcactcgttatctgctacaactcatgtgttttagccgtcgataacgtgtaccgggatatcgaggaggctctgaaggctcgcgacaatcttccagattgcgtctacgtcatcggcagtagtagccaatgtgccgtcttcaaggaggcttgggagcctggcaatgatcgcagggagaccatgctgacgcggggtacgaagcttggcttggacttcgtcaagcagtacgtcttttttgagtggcaggtaacccgcttcgtcaaacatgtcctcggttcgacagcagaaacctacaagttcgatcccgagcggctcctcacccggggcgtgtactcgctcctagataagaacaatgccatccatcaggcgccttccgggcatgtcttcaggcacccgtccggaaacaagaacaaggttttcatccaatctagggagattgcgagcgacgaggctgagctatttgtcgtcggctacaccattgctttgaaacacggggcaaagctctgtgaagccaagaaaatcttaatcgataccatgggcatctacgcatatgtgatgaacgcattgcgcctttgtggtgggcaggcagagatcctgagttttcattcctacgatgaactggagaagctcaatcccccgagtgtgccctacttctgcatcgtgtctgcttcgacatcgggtcgaatggccaaggtcatgaaggcgcggcagtttgtagaggatcgaattacaaccatggtcgacgtgaagtcggtaggtcgttgtggtgatgtgatggtgccgctcgatgctatgggcgtatattttcctgatctagccgtcagcgagggaacgctgatcgaaatcatcggcgagaactttacgtccaaggcaaagccgccccggccagtagtcatcggagtgacgcatgcccccgatgcgctgaatgcaatccacaagtatctcggattctcggtacttccgttcaactcggccatggagggcagtcggaccaaactacttcagcttgatgctcttccaatcttggagcacaaaaaattcgtcgaatggcttgatgctgagatcaactggtcgttccctctgacggtcagccatgtaatccacgctaacgacgagacatcgctacgtctggctgaggatatcctaggccgactacagagcaagctggcgaagggcgatgcgatccgattgattccttacagagacctggacaaaccggtctgtgaagatgcaaccggggtggtggtcgtatcggctgtgtctcgggatgggggagtgctgcgggaaattagtcgtgaccttagatcgtatattgacgccaaggtaccgaggcatttcattacgccgatcggcattccgcagactagtgcttcttggaagcaattggagatattcctcacaaagaacccgacctcgcgcagttatggcttctcgaactggattcagatgcccatcggtgacgactccgagcaaaatacctggacacgattaacagagctcgcatcgagggcgcaggggcttgaggttcgtgagtttgagctggagggtaaagtcgacgccaaaatcgttgcgacctccttggaactagcggcaggcgaaattgatgacgcctacaatagcttcctcaaatcaccacgcggtaagccgctgactctgtctgagggatacctgtttttcgagaaggactccgagattgccaagcggtacgccgaggtcagccaaagtgcgttatacctgaccatgtcggcagtcttgcagtgtgcccgagagcacaaggatcacaccaaaaggctgtgtcctacaggttatgagtcggtcgtgcttgggccggaatgcttcatgcgtttcaacgatgctgtgttgcaggcgtgtctgctcagggccagcctgccatcggagctcgactactcggcaagcccggagctcagcaaactgatgagggagctgctgtcgaaggtcttcactcgctggaacaaggacttcggcgatgctgcgcttgagtttgctgcggcgatcgctgtgggctccctacgactcactcgtagcgacatgaatgagcttttcaatgaggttttcgaaaaggcaactgagccatcggctctgctgggcctgctcctcttggccatgcaaaaacagatctga

SEQ ID NO: 354360 - DNA, 1014 bp, Pseudomonas aeruginosa
atgcatgacgcttccagattgcagatggtggtgacactggctcgtcatcgtttgcaatccgattatcttgagatccatcccaacactcctgaggagacggcgatcaatgaagtttgcagttactcgcctgggattgcaggcgtacgccttgctcgcgggatacggctggacaagcttgaaattgatcgtcgagatgttctgaagtcggctgctgagaaaatgcaggccactgacgcggaaaattttgatcagatcgtccaaggcaggagcctggatttgatctgtgtcgcgggttcgaaggtccagtatctgcggccacttttcactgctcgtggtgttgtcaaagagcacgtggaaatgcgtaagacgatgcagatgctggttgactttgtgaataagcaaagcaaagacaaagtacccaagtcactcgtggactcattaggcttgttctccagtgagctgatcaagaacacacaagagcatgccgtcaagaaccatgctggcaaaccttatctcgctcacgtcgaggggatgatgcttggttggacgcgttttagcgaagaactgttttctgaagacttttcaggtaacgccaacctcagggcatattgggacaaggagtctggtaagacggggtcgggcatgaccagcctgcgtgcttttgaggtgagctatttcgattcaggtcctgggctcgttagccgacttaaggggcggccagtgaccgatatgacgcttgaagaggagcgggattccctgcttgcgtgcctacaacataaatcctcctctaagtctgagaacgcggccggtgaggggcttccgtcggtactcagtgagctgaagagggtaggggggctcatacgcattcgctccggaagactgtcaatgttcaacgtctttagcagaggagacactcggcgcggtatcttcgatttcgaggactggtctgacgcacctttagcacctgtagaaggcgcagttgtatccattctcgtgccactgagggccgaataa

SEQ ID NO: 354361 - DNA, 432 bp, Pseudomonas aeruginosa
atggccaaggcgttccgcgatcgcatccattccatgaatgagatgtacaagcttcctgtgcacgataccccgcatcttttcgagggcacggatgatcgcttgctgaagttcaagaaaacgcttctggacgaggtcgctgaaattgatgagatcgttgagcagatccacagaggggacagtgaggtcgacgtccaggtggcaatcgctgacctgctaggcgacatcatcgtgtactgccgatccgaagcgatgaagtatgggattcctctcgaagaggtactggacgtcatcatggacagcaacgaaagcaagctcggtgcggacggcaagcccatctatgacgagaatgggaagttcctcaagggccctaactactggaagccggagccgcgtatcaaggagctccttgctgcttacgcgaccaagaaatga

SEQ ID NO: 354362 - DNA, 1476 bp, Pseudomonas aeruginosa
atgagcactgatgccattgtctccaaggtctggagcttctgtaccaccctgcgcgacgacggcgtgggctacggcgactatctggagcagttgacctacctgatcttcctgaagatggccgacgagtacgcccagccgccccataagcgcgacatcggcattcccaggggctatgactgggcaagcctggtggacaaacgcggcgccgagctggaggttcattacgtcaccacgctgatgctgctcggtggcagaccgggtctgctcgggcagatcttcaccaaggcgcagaacaaaatccaggacccggccaagttgacccggctgatctcgatgatcgacgagactcgctgggtgaggctgggtgccgacgtgaagggcgatatctacgagggcctgctggagaagaacgccgaggacaccaagtccggtgctgggcagtatttcaccccgcgtgcgctgattcgcgccatggtcgagtgcgtgcgtcccgcgccaggcaagaccatcgccgatccggcctgtggtacgggtggtttcttcctggcggcctatgactacctggcagccaaccctgctctaaaccaagagcagaaagtcttcctcaaaacttcgaccttccacggcaacgaaattgtcgccagcacccgccgcctgtgcctgatgaacatgctgttgcacaacatcggcgagatcgatggccagagtagcgtttcacccaacgatgcgctgatagccgatgatggccggcgctttgactacgtactggccaacccgccgttcggcaagaagagctcgatgagtttcaccaatgccgagggtgaagaagaaaccgacgaactgacttacaaccgccaggatttctgggcaaccacctcgaacaaacagctcaacttccttcagcacattcgcagcatactcaagaccaccggccgggcagccgtggtgctgccggacaacgtgctattcgaaggcggggccggtgaaacagtgcgcaagaagctgctggagaccacggacctgcacacgatcctgcgcctgcccactgggatcttctacgcccagggcgtgaaggctaacgtgctgttcttcgataacaaaacggcacgtaaagagccatggacgcgggaagtgtggatctacgactaccgcaccaacattcaccacacgctgaagaagaagccgctgcgcttcgaggatctgcaggacttcattgactgctaccacccggagaaccgtcacgaacgccaggaaacctggcacgagacgaataatccggaaggccgctggcgcaagtacagccttgagcaggtcctcgcccgcgataagaccagcctcgacatcttctggctcaaggacaagtcgctggccgatctggagaacctgccggagccggacgagctggctgaggagatcatcgagaacatcgaggcggggctgaacagtttccgagagattctcaaaggtattgcatag

SEQ ID NO: 354363 - DNA, 1848 bp, Pseudomonas aeruginosa
gtgagcaccttcgacagcaccaaggtggcccttccggacatgatccgcgacatcaccgccggcaaggtccagttgcccgacttccagcgcggctgggtgtgggacgacagtcatgtgcgctccttgctggtcagcgtggcgcgttccttcccggttggcgcggtgatgctgctggataccggcggcgaggtgcgcttccaggtgcgccccatcgagaacgtcgatttccccaaggggatccccgggccggaaaagctgatcctcgacggtcagcagcgtctgacctcgctgacccaggtgctggccttgaacaagccggtgaagaccttcgacgagaagagcaagcgcatcgatcgctactactacatcgacatcaacaaggccttggaagccgagcaactggaagacgccatcatagccgtcgagcagagccgccagctgaagaccaacttcggccgcgacctggcgctggacctttccacccctcagctcgaatgcgaacagctctacttcccttgcaaccagattctcaactcagatgcctgggaggagagcctgcaggaatacgctccgcagcacttcggcacctacatgcaattccgcaagcagatactgaatgccttccgcagctaccaactgccggtcatcgcccttggcaagaccaccagcaaggaagcggtctgcctggtgttcgaaaaggtgaataccggcggtgtaccgctctcggtgttcgagctgatcaccgccaccttcgccgctgacaacttcaatctgcgcgatgactggtacggcagtgagctgcgcaaagtgcccggccgccgcagtctgctgctcaaggagccgctgctgaaggccattgagccgactgacttcctccaggcggtttccctgctcaactcctacgagcgccgtcaggccgatatagccgccggcaaggtcggcaagtcagctgcggccgtcagtgccaagcgttccgccctgttgtcgctcaagctggccgagtacgagcgctgggccgataccgtcgagcagggcttcaagcgcgccgcccagttcttgcgcaaggaatgcttcttcacggtccgtgacctgccctatcgcactcagatcgtgccgctggccgccgtgctggccttgcttgaagagcgctggttggaaccacgcatccacgacaagctcagccagtggttctggtgtggggtgttcggcgagctgtatggcggcgcggtggaaacccggattgccaacgatctggaggatctgctggcttggatcggcggccagggcgacgccccccgtacaatctacgaggcagccttccaggccaatcgtctgcttaccctgcgcacccgcctgagtgcggcctacaaggggctgagcgtgctgatacaacgggaaggcgcccgcgactttttctggaaggcccgaatccaggagctggacctcgaagagatcgccctggacatccaccacatcttcccgaaggcctggtgcgaggagcagggcatcaaaccagcgacttacaactcggtcatcaacaagacggccatctcctataaggccaaccgaatgattggcggcaaggcgccttccagctacctgaggagcgtgcaggatcactcccaggtgcaaatgggcgacgacgctatgaatgccatcctggaatcccacttcatcaccccccaaagcctacgcgaggacgacttcaatcagttcttcgccttgcgccagcaaagcctactggccatcgtcgcccaggccatgggcaagcaggccgacatgactgttgccgtgccggatgacgacgaacaggacaccgacaacgaagatttcgaggttgctgaatga

SEQ ID NO: 354364 - DNA, 1590 bp, Pseudomonas aeruginosa
atgagtgaagcggtagagaacatccagagtgaggaaagtggcagtttgcctgtcagctgggtgcgggcccggctttctgaaatcgcagccatcaacccaaccctggataagtcggagattgaggacgacctcttggtttccttcgtccccatgcctgccgtggaagccgaaaccggcgggatagacgtaagcacccaccgaaagttcgcagaggtcaagaaaggctacaccggctttctcgcaagcgatgtgctgtttgccaagatcacgccgtgcatggaaaacggcaagatggccgtggtgcctgtgctgaaaaacgaccttggctttggctctaccgagtttcatgtactgcgcccggcaggcagaatcagtccggactacctctattacttcgtttcatctaaggccttccggattgaggccgagcgcaacatgactggcgctgttggtcagcgtcgggtgccgactgccttcctcgatgccagtgaaatcctgctccctcctgctgccgagcagcaacgtatcgttaccaagctcgaagagctgttctccgagttagatcggggcatagaaagcctgcgtaccgcccagcagcagctcaaggtctaccgtcaggccctactcaagcacgccttcgagggcaaactgactgccgagtggcgagcgcggcatcccgacaagctggaaagcgccgatgcgctgcaggcgcgcatccagcaggaacgcgaggcgcgttatcggcagcagcttcaggattggcaggacgcacagcaagtatgggaaaccggcggcaagaccggtagtaagccgaccaagcccaaggcaccaaaaatgttgctgccgctatctgctgaagagctggcggaattacctgggctacctgatggctggagctatatctaccttgcttacctcggcgatctaggccgaggaaaatcaaagcatcgccctcgaaacgaccctcgcctgtttggcggaccttatcccttcattcagaccggagaagtaagggcggctaatcgggttattcggaaatactccagcgcttacagcgcgcttggtctggagcagagcaaactctggcctaaggggacgctatgcataaccattgcagcgaatatcgctgaaacagcattcttgggctttgatgcctgcttccctgacagcattgtgggattctcggcaataaataatctggtcgaccccggatatgtggattttttcattcagggagcgcgcacccgcatagaagcctatgcgccggcgacagcccagaaaaacatcaatctggagacgctggaaaatctggttgttccactctgcagtggcgatgagcaaagagtgctgttgcaaattttggacgagcgcttttcagtcatcgatcagctcgagaagaccatcgccgactctcttcaacaggccgaagccctgcgccagtccatcctgaaaaaggccttctccggccaattggtgccgcagcgctccgacgaggagccggccagcgtgctgctggagcgcatccgcgacgagcgtgccgcccaagaagccatcgcaaagcgcggacgcaaggccgcgaaaccggcatga

SEQ ID NO: 354365 - DNA, 2847 bp, Pseudomonas aeruginosa
atgaccctcaaccagaatcccgaacaactcgcccgagacaagatcgacgcacagctcgcagctgctggctggattgtacagcccaagaagaaaatcgacttcagcgccggcttgggtgtcgcggtacgcgaataccagaccagcgtcggacctgccgactatattctgttcgtcgagggcaagccggtcggcgtgatcgaggccaagcccgagacggccggccatcacatcaccgccgtcgagagccagaccgagggctatgccactgcccagttgaaatggatcaagggcagcgagccgctgcgcttcctctacgaggccaccggcgtcatcgcccgtttcaccgatgtccacgatcccaagccgcgctcccgcgaagtcttcagcttccatcgccctgaaaccctacgtgaatggctcggccagagcgccccgctacgcgctcgcctgaaaagcatgcccctactcaatccgaacaagctgccggccagcgttctatgcctgcgcgactgccaggaagtggcgatcagcaacctggaagattccttcaaggctgacaagccgcgcgcgcttattcagatggccaccggggccggcaagacctacaccgctatcactgccatttaccgcctgctcaagtacgccggcgccaagcgcgtgctgttcctggtcgataccaagaacctcggcgaacaggccgagcaggaaatgatgagctacctgcccatcgacgatacccgcaagttcaccgagctgtacccagtccagcggctcaagtcctcctacatcgccaaggacagtctggtctgtgtgagcaccatccaacgcatgtactccattcttaagggcgaggagctggacgactctcttgaagagctgagccctgccgagcaactgactcagccgaagcaacccatgccggtggtttacaacccaactatcccgccggagttcttcgacttcatctttatcgacgaatgccaccgctccatctacaacctgtggcaacaggtgctcgactacttcgacgccagcctgatcggccttaccgccaccccagacaatcgcacctatggcttcttcaggaagaacgtggtcagcgactacagccacgagaaggcggttgccgatggtgtcaacgtcggcaacgaggtctacctaatcgaaaccgccgttaccaagcagggcagtcagctcaaggccgaacagcaggtggagctgcgcgagcgtctgactcgtcgcaagcgctgggagcagcaggacgaggacgaggcctacagcggcaaacagctcgaccgagatatcgtcagccccgaccaaatccgcactgtcatccgcaccttccgcgacaagctgccggagatctttcccgaccgccatgagagcgacggccattttcaggtgcccaagacgctgatcttcgccaagaccgacagccacgccgacgacatcatccagtgcgtgcgcgaggagttcggcgagggcaactccttctgcaagaaggtcacctaccgggtcgccgacgggcgcaaggatgccaacggcaacatcatcgaagaaggcgaagaccccaggtcggtactcgcccagttccgcaacgaatacaacccgcgcatcgccgtcaccgtggacatgatagccaccggcaccgacgtgaagccgttggagtgcctgctgttcatgcgtgacgtgaagagccgtaactacttcgagcagatgaaaggacgcggcactcgcaccctagataaggacgacctgcagaaggtctcctcggcggctaagactgccaagacccactacgtcatcgtcgatgccatcggcgtaaccaagtcgctgaagaccgctagccagccgctgatcaccaagcccagcgtgccgctcaaggaactggcgatgggcgtgatgctcggcgccaacgacagcgataccgtcagttccctggccgggcggctggcgcggctggccaagcaactggagccggccgagcacaagaaggtggaagcgcataccggcggcaaaccgcttagccatatcgttgcccggctgttcaatgccattgatgccgaccaggtggaggtccgtgccctagagctggcaggccagccagagggtagcgatcccggcgaggcgctgcgcgaccaggcccaggccgagctggtcaaggaggctgccaaagcgctcaacggcgagctgattgaactgcttgacagcatccgccgcgagcgcgagcaggtcatcgaccacgacacccaggacgaggtattgctcgccggctggcaggcggacagtgcagaggtcgcccgccagcagaccgaggatttctccagctggctggaggcgcaccgcgacgagctggaggcgctgaccatctacttcagcgcgccgcagcgtcgccgggaagtcaccttccagcagatgcgcgcggtgctcgacgcgctcaaggccgaccgcccgaagctggcccccctgcctgtctggcacgcgtacgcacggctggaagactacaagggtaagcacccgatcagcgacctcaccgcgctggtcgccctgatccgtcgggtatgtggactggatgacacgttgacgcccttcgaggagacggtggcgcgcaacttcaagaactggatcttcaagcgccacgccggcaagggcgagaagttcaacgagcagcaaatggagtggctgcaaatgatccgcgaccatatagccagctcggtacatttcgataccgaggcgttagacttcgcgcccttcgaccgcgcgggcgggctgggcgagttctacgaacagttcggcagcgactacgaggcggtgttggatgagatcaatgaggctttggtggcgtga

SEQ ID NO: 354366 - DNA, 168 bp, Pseudomonas aeruginosa
atgggcacggcagacaaccaaggcaaggcgaaggtaaacgaagagggtggggcgctggagtatcttgacaggccaatgatctcctacgggctgcgcacgatctcgaagcctccgtcacgggtcatagtctggctgcgacgcatcttgggagggcgggccaagttgtga

SEQ ID NO: 354367 - DNA, 210 bp, Pseudomonas aeruginosa
atgcctgccagcagcagcgtttcctctgaaaaaattcggaagatcaagatcaaagtaagtgcaatcattattattgtatgcatccagggtatagactccttcatgctcttttttaatgcccaggcgcgcgcgaactattttttccagccgtgttatttcctggtgaagcttgtcgatgttgctaacaattctatcctcgcctttatttaa

SEQ ID NO: 354368 - DNA, 1278 bp, Pseudomonas aeruginosa
gtggtctatcgcggccccttgcgggccggcgtcgatccggcctacctcggcgcgcgctacacccggatgctggaaaaactgcggcgcgatttctccgcctgcgccgggcacatcgacctgcgcctgaacagccgcgtggtcggtggcgacggccagcgcctgatggtcctcgacgaggcggaacggctgcacgaggtggagtattcgcacctgctcctggccaccggctgccatgagcgcagcgtgccgttccccggctggaccctgcccggggtgatgctcctcggcggcctgcaattgcagatcaagagcggcgtggtgaagcccctgggcgataccctgatcgccggcagcggcccgctgctgccactggtggcctgccagctgcatgcggccggggtacgtgtcgccggggtctacgaggcctgcgcgttcggccgcatggccagggaaagcctggcgctgctgaacaagccgcaactgttcctcgacggcctgagcatgctcggctatctcaagctcaacggcattccgctgcactatggctggggcgtggtggaggccagcggcgagggggaactgacggaagtgacggtagcgccctacgacgaagagtggcggcccgacctggaaaacgcgcgaccggtgaaggccagcaccctggcggtcggctatggcttcatcccgcgcacccagctcagccagcagctgggtctggagcacggcttcagcgacgacggatacctgcgcgcggaatgcaacgtctggcagcagagcagccaaccgcacatccacctggccggcgacatggcgggtatccgcggcggcgaggcggcgatgatcggcgggcgcatcgcggccttgtcgatcctcctgcaacgcgaggccatcgcgcccgccgaggccatcgaacgccgagaatcccatctcgcccgcctggaggcgatcaagcgcttccgcgccggggtcgagcgctacacccagcgcggcgcccgcgaggtcgaactggcgcgggccgatacggtgatctgccgctgcgaacaggtcacccgtggcgacatcgagcgcgcgctcgaacagggcgtgcaggacatcgccgggctgaagatgcgcacccgcgccggcatgggcgactgccaggggcggatgtgcatcggctactgcagcgatcgcctgcgccgcgccaccggacgccatgacgtcggctggctgcggccgcgtttcccgatcgatccgatcccgttttccgcattccagaacctcggtacggaagcctga

SEQ ID NO: 354369 - DNA, 156 bp, Pseudomonas aeruginosa
atgaactattacatttacgatctcgttctccaccacctgtgcatctactacttcatcatcaggcgcatcaatatccgcttgctgttctccagccataaccactccccatactttttttcaaaaaatcaacaccactcagaactacgacttatctaa

SEQ ID NO: 354370 - DNA, 195 bp, Pseudomonas aeruginosa
atgcatggcatcaagggggtatccatgacgaagacgtcgaccctgacgctcgatggcgtctctttccagctgccggacggcagccttctgttttccgatctcgacgaaaccttcgacacccggcacaccgggctggtgggacgcaacggcgtaggcaagtcgctgctcgcgcgcctgctcgccggacacttgtag

SEQ ID NO: 354371 - DNA, 720 bp, Pseudomonas aeruginosa
gtggaagagttcgccttcgaggaagaaaccgacggcgccgacagcagcaagtacgcctgggccaactcggcctacgcgatggcggtcaacatcaaccgctccttcaagctctacggctggtgctcgcggatccgcggcgtcgagtccggcggcgaggtgcagggcctgccggcgcacaccttccccaccgacgacggcggcgtggacatgaagtgcccgaccgagatcgccatttccgaccgccgcgaggcggagctggcgaagaacggcttcatgccgctgctgcacaagaagaacaccgacttcgccgccttcatcggcgcgcagtcgctgcagaaacccgccgagtacgacgatccggacgccaccgccaacgccaacctggcggcgcgcctgccctacctgttcgccacctgccgcttcgcccattacctgaagtgcatcgttcgcgacaagatcggttccttcaaggagaaggacgagatgcagcgctggctgcaggactggatcctcaactacgtcgacggcgacccggcccactccaccgagaccaccaaggcccagcacccgctggcggcggccgaagtggtggtggaggaagtcgaaggcaatccgggttactacaactcgaagttcttccttcgcccgcactaccagctcgagggactgacggtatcgctacgcctggtatccaagctgccttcggccaaagaggcctga

SEQ ID NO: 354372 - DNA, 186 bp, Pseudomonas aeruginosa
gtggcgaaggaagaggccgagcgcaagcagttctgcgaagaaacccgcaacaacctcgcgcaactgaagaacaacccgcgcgtaagggtcgacgaaggcaagggcgaactccgtcgcctcggcgaggaagaacgccaggagcgaatcgccaaggccgaaaaggcgatccaggagaattgccgctga

SEQ ID NO: 354373 - DNA, 735 bp, Pseudomonas aeruginosa
atggttacgccttgcatattattattatccaagtatccatacagagattctgtgagggaggtagtccattattttttgaaaccagaaaaaggctattttttgatcaacaaagtaacatccgcccccagcttcaagggtgtggaaattaacagcggtgaattcaggaatctcgggctctacgtcgaaatcctggattcctacctcagccagatacgtgccctgctcacccactactcaagaattacaatcctgcggttcgaccttcatctgcccgactgtaagttttttagcccaaacgaaggcaaccaacttgtctcagtttttttcaaatcacttaaagagcaccttagccgcaaacattggaaaggtcacaaacacgtgatttttggatgggctagggaggttgaagaaaaagtgaagggacactaccactgttttataggaattagggccgctcacaagttcataggcgagtttttgaatggagaatggacccacctatggggcctgctggaaaagcgctggaaatgcatctccaggggctctatgcaggtcagcagatatcatactgtaaacagaggtatacccgaggagctcgacaaggcgttcaaacatatatcttacctggcaaaaaccaaaggaaagtccttcgggacaggtgaacattacaaacgctatgctacctcccgaatcaaaccaaagcagcaagatgaccactgtaagatcgcagcgtaa

SEQ ID NO: 354374 - DNA, 939 bp, Pseudomonas aeruginosa
atgccatacgaattagatgatcgactcgtaatcggcgtcgcctcaagcgccgtatttgatctaaatgaatcagactctgtattcaaaagccaaggcgaggaagagtacagaaaatatcaagaagaaaatttaagcacccctctacctaaaggaatagcattccccttcattaaaagacttctatcccttaatgacctgagccccacagaagccgacccacttatagaggttgttctgctttccaagaacgatccagacactgggttacgagtaatgaaatctatagaacactacggacttagcattactcgcgcaatattcatgcaaggcaagtcaccttatgaatatatcccagcccttaatatttctcttttcctctctggaaataaaactgacgtcgaagctgcaatcaatgaggggtacccggcaggccaggtattagactctaaattcgatgatgatgaagaggatagaacccttcgaatagctttcgactttgatggggtattagccggcgatgagtctgagcatgtaatgcagtcagccggactaagcgagttccacgcgcatgaagtcaagaatgttatgcagccacacaacccaggtccgctgaaggactttttggttcgcatgtccagcatacaatccgtagaagaaaagcacaaaacccttaaccctgagtaccagaaccgtctaagagtttctattgttacggcaagaaatgccccctctcatgagcgagcactcaacacattaaaaagctggggagttatggcaaacgacgcgtttttcctaggaggcatcgagaaagggcgagtactaggcgtactcaaaccgcatatcttctttgacgatcaatcgggacatttaaagtccgctagtgctgtcgctccgtccgttcatatcccatttggcgtaacgaacaagcctaaaccctag

SEQ ID NO: 354375 - DNA, 1842 bp, Pseudomonas aeruginosa; identical to SEQ ID NO: 318396

SEQ ID NO: 354376 - DNA, 900 bp, Pseudomonas aeruginosa
atggaagcgccaatcctcgcgggaggagaggatcaccacgccgtagttgtctatcaccagcagttgctccggggaattgccccagagccgttcgatgtgttcgagatcgaccttcaccaccagcacgccgatgatccgcgagccttccttcaccgcgctggcgaagtagtagccgcgcttgatcgaggtggtgcccaggccgaagaagcgcgccaggcggccctgcatggcctcgcgataataggggcggaaggcgaagttgcggtggacgaaactgtccgcctgggcccagttggaggcgacctgggtggtgccgtccggttgcagcaggtagatcacgtcggcgccggtgcgtcggcggatgtcggccagcgcctcgttggcgatcttctgcagcagcgggtcgccaggttgttgcagggcctggcgcagcaccggcaggccgccgaggatctgcggcagttcttcgtagcggcgcagcgtgccgagcaggttggcgacgtagaggtcgagcgtctggcggttctgctcggccaactgctcgctgtagtagcgctcggcgaaatattgcaggggccagagcagcggcgcgagaagcagggcgaggatgaccagcgagcgccagcgatggaaataggctttcaagacgaacgaacctgccgtggctgcgagtatccggggcatcccggacgggatgccctaaattatcacgccttgcgccgagtccggtcgctccctgccgttcaggggaagcagtcggcgtcggcgaatgccttgccctggcggtccttctccgaaagcaggggggcatcctgcagcggccagtcgatcttcagctcgggatcgttccagacgatgcagcgttcgtgttccggcgcccagaagtcggtggtcttgtag

SEQ ID NO: 354377 - DNA, 897 bp, Pseudomonas aeruginosa
gtggacaggatcagagaactcgcgcatgcaatcgaccgtcacgcaactgggtcgggcatctgtgcgacagacataccccgcttgtcactggtccatgtagaccggcctagcatgccgacgcccgtggtttatgaggcgggactttgcctgatcgcccaaggggcgaaccgcgtctcgatcggcgagcgcagcgcggtctatgacgccgcaaactacttgctggtctcagtcgacatgccgctgctatgccacgtcatcgaggccagcccggacaaaccctatctatgctgcaagatcgggttagattccgcgttactcgcggagttgttgatggcagaaggcggtacatcgcctcgcaccgacctaccggtacttggggtgtaccccaccgacccggacctaattgatgcggtctgcagatttgtccggctccttgaccgacccgagacaatcggcgcactggcgcccctcatagagcgggagattctttatcggctcctcaccggtccgcatggtccgatgctacgccacgtcgcaacggccggcagccatctcaaccaagtaagccgcgccatcgacgcaatccgccgtcgtttcgacagccagatccggatcgaagacattgcggccaaggcgggcatgagcgcctcctcgctccacgcgcacttcaagggcattacgggcatgacgccgctcgaataccagaagcagttgcgattgcaggaggcgcgccgcctgatgttgttaggaggtgcgacggccgggacagcggggttcgcggttggctatgaaagcccatcgcagttcagtcgcgagtatcgacgcttgtttggcgctccacccaggcaggacatcgatcggctgcatgctgcgtcgttgacgatcggacctctttag

SEQ ID NO: 354378 - DNA, 726 bp, Pseudomonas aeruginosa
atgacctcccaaatcgacaaagttgtgctgatttcaggcgcatcaagcggcatcggcgaagcgaccacgcgggagctggcggctgccggcgcgcagctattcattggcgcacgtcgcggcacgcggctgaaggcgctggcggaagaactcggcgacaacgtcgcatggcgtgaactcgatgtaacagatggccctgcattcgaggagttcgcccgagcagcgaaagaccacttcggcagaatcgacgcgctagtgaacaatgccggcgtcatgcctctatcgatgctcgccgcgcttaagagggacgaatggaaacgcatgatcgacgtgaacatccatggcgttctcaatggcatcgcggcggtgctccctgaatttatcgcgcagaagaacgggcatgtcatcaacgttgcctctattgcggcgcgccttgtgatgccgtcctcttccgtttattccgcgaccaagcatgcggtgcgcgcgattaccgaagggttgcgccaagagcacgacatgatccgcacgacgatcatctcgcccgggactactgccaccgaattggggcacgacgttaccgaccctgacatcgcagcaatgcttaaaaattcgattccgaatggaatgcctgctgatgcgattgcacgtgcgatccgctacgctctcgaacagcccgatggcgttgacgtcaacgagttggtcgtgcgcccaacggcctctgcgatgtaa

SEQ ID NO: 354379 - DNA, 243 bp, Pseudomonas aeruginosa
atgacgacgcgcaagctgcggctggggccgctaccgaaaaccgataccacgaagctgacctttgcctgcccggccagcctgaaagccgacctcgaccgctacgccgcgttgcatgcgcagacctacggcgaggcggtcgacgtggcgacgctgataccctacatgttagaggcgtttatagggggagaccggggattcaggaagggcgccgcaagcaagaacgcggcgcagggatcgacctag

SEQ ID NO: 354380 - DNA, 993 bp, Pseudomonas aeruginosa
atgaatgcacttttccgtaaatccgttttgccgttgatcctgctggcccttgcgggctgcgcctcgcagggcaagccgccgccatccatttcgctcgatgagccggtgcaggcgcagccgttgccggagccgccgaagccggtggaagtcatcaccgttcccgaaccgctggcactgccggatcagttgaaaccgatgccgggtgcggacgtaaccaagcccgttccggaaccggccgatgaaaccgtgcgcgtatcgaaggccaacgccgaggcgcgcatcgcgccgacccgcgagggctacgtcaatgcgattcaggtgtggcccttcacggacggcgcgctttatcaggtttacgccgcgccggggcgcgtgaccgtggtttcgctccagccaggcgaggagctggtgacggttgccgcaggcgataccgtgcgctggatcgtgggcgacacgtccagcggcagcggcgccgacctgcgcgtcaatgtgctggtcaagccgatccgctcgggcctcaaaaccaatctggtcatcaccaccagccgcaggacgtacctgctggagctgacctcgaccgagaaggtgtggatggcgtcggtatcttgggactatccgaaagaccggatgctggccttgcagcgccaggcgcaggccgccagcgccgccgcgccggtcgataccggcctgtcgctggagaagatccgcttccgctacgcggtgtcgggtagcaacccgccgtggaagccgctgcgcgcctttgatgacggcgagaaggtctatgtccagttcccgccgggtattgcccaaggcgagctgccaccgctgttcgtcattggcgcgcagggcgacgggcaactggtgaactaccgtttccgcccgccgtactacatcgtggatcggctgttcggcgcggccgaactgcgcctgggcggtgatggaggcgacgtggtgcggatcgaacgcacggacggcgcggcgcggaggaactga

SEQ ID NO: 354381 - DNA, 1329 bp, Pseudomonas aeruginosa
atggctattctgacaactcttggcatgatggctccggctttcggtgccgataatttttcaggacgcgagaaactgaaagagcattctcaagaatttcgcaaaagaatcgagaaagtcgccgaaggcgtttacacagcgatcggctactccgccagtaacgtcaccgtgatccaggcggagggcggctcgatcattgtcgatacttcggctaatccaattgatgcaaaggcgattattgaggcattcggcgatcgaatgccacggccggttctcgctattatctacacacataatcatcccgatcacaccggtggcgcaaaggtattcgcaggcggcgaaaagccggagatttatagccataagcttctggtggcagccaagccggacacaggccgcggacggcgagatggcggcgacgcgttcggcaccgccctacctgatgaccaattcatcaatgctggcacgcaattggaatatggtcgagtcacgccgcataccagagaaggattcttgccacccacacacacctttgatggggacgaagaaaatctgacgattgccggtatgccggttcaactgttcctcaccgccggcgaggctgacgaaaacatttcggtttggctgccagatcgcaagactttgattgcaggcgatgtatttctgaagaccttcccgaatatcgcaccgctaagaggcttgccgacccgtccggtggagaaatggattgccagcctggacaagctcattgcgcttaatgcggagtctgtcgtgcctggccacatgggtactatcaacagcgcagacgcagcgaaggatgcactcacggcatacagggacggaatcaaattcgtctacggcaaaacgatggaaggaatcagcaagggtaagacaccggacgaactggttcaggagataaagctacctgcggaactggcgcaacatccatatctgcaagaatattacggtactgttgcctgggcggtgcggggcatctatgcgcagaacgcaggctggtttgatggcaacccaacacacattttccctctgaccgaaaaggaacgtgcatcacatcttgttgcaatgattggaggagggaaaaagatgctggagagcgcggaagcgtccctctcggccggtaaattccagtgggccgcggaacaggctgattacgtcctggcgcttgatccacagaatcacgctgcaacgatggttaagatccgtgcactacgggagctcggcgagcgtcagatgaatgcgactgcacgcaactactacctcacggtgtcacagaatttagagaaagccgatcaagttaagcgatcaaagtag

SEQ ID NO: 354382 - DNA, 897 bp, Pseudomonas aeruginosa
atggattacaatgctgtcagcatgtttatcgctgtcgtccagacaggcagcctatctgcagcggccgcgcgaatgggagttccgctccctacgttgagtcgtagaattgcagagcttgagagtggcttaaatgtgcagcttctggagcgcactgcgcgtggttgtcgtgtgacggaagccggatcgcgtttgtttgagcacgccagcagcggcatagaagctctacaggaggccgagcgcctgattatgagcgcgcaggcgcgattggttgggcgtcttcgcctttcgctcccacaatccttcgaaccttggtgggaactattgggtctgtttcagcgcactcaccctgatattcaaatcagcgtttattcgacagaaaggcgtgtagaccttttggcagatggagtcgatgtcgcgttgcgggttggtgcgatagccgacgacacggttgttgcacggcatatgctgacattccgacatgtccttgtcgctagccccaggcttgtagagcagcacggagcaccgagccgcccagccgaccttggccgatatccgtgtgcagcgtgggggtccacccttgatgcccgcccggtctggatgctgggcgatcatccgcaccagatcccggccatatttaccgtaaatgactaccttcacctaaaggcaagggcggttgcaggaaactttgtaacggaattgccctcgttcctcgctgcggaacctctcaggcgaggggagctagtggagttgcttccccagcaccccttccctgatactcctctacaccttgtccacaggcgacaacgtcatccatctacaatcattcgggcttacctcgacttctgttcggcgcatctgtcaattgtcgaggacagatggagaattccagcccgttaa

SEQ ID NO: 354383 - DNA, 654 bp, Pseudomonas aeruginosa
atgccggcgatgccgtcacggccattcggcttcaatccctcacgtctccgcgcctatgtcgctgcgcgctccgcttgcgatgaagatggagcccgccgcaatggacgtgacgcgggctgctatgccctggcttgctgcggcaggttgtgccaaagcgtgccgtcctcgaagctggcggttcgcgcctgtacgtcccgaaggacggttcagcgacacgccacccggcctcgctatggagcatccacgccacgcctcaaacacgttcgtcgcaatctgcggcacgaagcactctcgctcgtcgttggggtgttggccttgcctgtctcagggcgcaagccggggaaaccgtcacgtggggatgccgagtcggccacatctccattcgggagcgggcggccggtgcgtccttggcttgtcgtgaatcctggcgagggaacggctgcgccttgggcttcatggccgcaaccttccagcgaaaacaatttcccctgcgctgcgcgcattcctcgcgggacaaattcttttcgcttccaggctctccacggtgttgcgaccgctgcgcggtgcagccagcccatcccccgccggccggatcacaacaaggacgcactggcgcgaccttgttcaacccgaaaggagaaacatcatggctaa

SEQ ID NO: 354384 - DNA, 753 bp, Pseudomonas aeruginosa
atgtctgtatctacttactttgtttccgaagccgctgtccgcaacctcaaacagcgggccgagcgtcgcgtgagtggcgtccgttccgcgcacatgagcgaggtcgtggctgctgcgctcgggttcaggactcatgcggcgctgcgcgcagcactcgacggtcgcgcaaccgccgaggccagcaaaccgagcaacgcgcgtgcggtacagcggctgcgacaactgggctacaacccgcccgaggatctgcacctgttgccggagttggatcgctcctactcgccgttcaggacctatccgttgcgcaagcagcgtggggtgcgctggaatggttggcgcaacctgatggtcgcggcgatcaacgccggcttggaacagcgcatgttcggactgtcgccaggcgaggactggtggccaggcgccgatccgaagaacaacggcggcgagcgcggccagtatcgcttcaccttcgacggagacttgtctgcggtggccgtggtatcggcgatcagcggcgacgagttgtcgatccacgtgttgctcgccccccgcaacgagcaggtcgaggccgactttaatgacggtctaaatgatggtacggcgtgcgcgcacggctggctggaacgccggctcggtgcgtggatacaggatggcggcgaggagttctcgtgcaagcgcgccatgcaggcgcgggtggctgcggtgaagatcaaaccgcacggctatgccgaccagggcagcttcatcatgtag

SEQ ID NO: 354385 - DNA, 387 bp, Pseudomonas aeruginosa
atgaacgataaatcgcatgtttccctcgaacaacacgtttgcctggtctgcggcactcgcttcgacaccggcgcgatcctgctggacaagcgcctgcgcgcgagcatggagcgccatacggcgaccggctggggcttgtgccctgaacaccagaagctgtccgacgatggctttgtcgcgctggtcgagtgcgacccgcagcgcagaggctcgccgggcggcggtaatcgcgtgaagcccgaacaggcatatcggacgggccgcctggcgcacctcaagcgcgaagccttcgcgcaggtgttcaacgtgccgatcgcggccgatcagccgtgcgttttcgtcgaacccggcgtgatcgagcagttgcagacgatgacggcgaactga

SEQ ID NO: 354386 - DNA, 807 bp, Pseudomonas aeruginosa
gtgattctttttccactgctgccgcaccacatttccgtcgagcttgccaatctcgctcgatcagcctctgttcgctcgctcgcagattcggccgccccggagcaccccacctgtgaatatacgcccaccggtggaacgcgcgcgaccacagcggcgctgaacaagctccgaggcgacttgctgcagctggcgctggcagccggatatcccagccccgccagccagcggcaggcggcagccttcgattccgaagccgccctggtgctgtcgcaacagatgctgatagcgcccgcagaagcggcgaaaggcggtgtctgggaatttctttcctgcgtattgctacccgatgtcgtccggtggcgctttggtggtacgggaggagcagccactccgcttgagcgattcctttctggccgccgcaacgtattccagcgtctttggtggcgtgcctttctccttgcaccgcgggtagctgacgccccgcatctacctgaactcctacgtgctttgggggaggacgaacttgtccagctcatggagcggccatcgcttgccggcatagagggcctgccagcctccatcgcgtccggtcttcttgcggcttcacgatcctattccgacattacccggcgccagcttattcgcgaagcgcaaaagcgttttctccggctgtcctcatttgtttcattcgagtcgatcgcaccggccgaactgtctcgccacgtggagaacgtcttcgaacaggtggcggcctccctagcacgccgccagggcttagcgccggaatctgcacctctccatggctga

SEQ ID NO: 354387 - DNA, 843 bp, Pseudomonas aeruginosa
atgggaagtcttgacgacagaacaaccggcccccttcctctcgtcttgtccggattggactacagctcccttctacggctacgcagagagatcgtcgttgacgtctcaggactgcgggccgactgcggtcttgccgacgatgttcccctaatggcagccgcgagctggtctagtcccggcaccatgctgcgcaggagcctggcaagcgtctctattgcggatgacgaaggtacatgccttgttgagcttgccggagacgtttccggcagcgaggtagcagggatcctgcatatcgacaccgtgattttggtcgcctgccaacctgtccagtcccagccgctcactgcacgacatgcaggtgccgtgctgatgcatgaaagacagacgattcagctggattcgtcgcattcattctttccggttgaggtcgtggatttcagcaagggatattgggccaatccggaagcggggtggcgactcacatggaatatgtttgccctggatcagccctttcttggatcggtccgactactcatcaatgctgcacatccgcacgtggtccgagccgtttcaggcgaagcaccaaacgccgaagcatccgccatccgtgcggcaatctacttcgacacagccaaagctctgattcttggctcgctggccagcgaggatttcatcgaacgcaacggcgactatgctgacggaagttgcggcaggatcgtctacacaatgattcagatgctgttccctggcgacagcatcggtggcctggcggcagccgcaagccaaagaccggatcacttcagtaccgatctgcagggtcggttaagactgttctggagctga

SEQ ID NO: 354388 - DNA, 1917 bp, Pseudomonas aeruginosa
atgccagcaccgctggacctgcagtctgagacattttctgcaaccggcggcgcggctgccgagggcgtatcgaatcaactcggccgcccgcgtgcagaccgttttacgctgttgatccgcgaagcggttcaaaacagctgggacgcgcgaacttcacctgccggcggtgttgtattccatgtggatggacacctgcttgaccgtcacgcgcgccaagcgctggcggctcaggtgttcgccgacgtgcccgatgcagtcgatgtcaaatcacgccttctcgccgacagtgatttcgctgtcattgcagtaagcgactttggtaccaaaggcctcagcggccctacccgtgggaatgttgttccacaacctggcgaatccaccaatttcgtcgacttcatgcgctatatcggacggccgccaaaccgcgcacacgcgggcggaacctatggctttggcaaagcggcgtactttctcgccagctcgttgaagaccatatgcgtctacacgcgcttcaacaatgggcgcgacgtggaatccagattcatggcggcagcattggggccgcagtttgaaaccggcggcgccagcggccgtcgctttaccgggcgacattggtgggggcggttgcagcaagatcaggtcgtcgatccaatcgtcggtaccgaagccgacgctcttgcactgctgctcggcggcacccagcgcggcgaagacgccttgggcactaccgtctacgtccttgcacctgacttcggttgcagcgcaccagagcaggttctgaaccagatggggcgcgcgatcatggattacttctggcccaagctcatcgacggcccagaccagacgcccaccatgacgttcggcgttcgctggcaaggcagcgacctacctctgccgaagattcacgaggaacccgaccttgccctgctcgcccgggcgttcgcagcagcgtcggcgaaagagcagtttgacggtgtagtcctggagcccatcgcatcgcagcggcccaagaagcttcttggccatctcgcgctcgttcggcatcctgctgctctgatgggttcaccttctgttgtcgatgaaagcagcagcgatggcggagagctgtatcagcgcacgctccgtaggccgctgcgccaggtggcactcatgcgcgcccccaacttcgtggtgaagtatgtggatgggccactcgtcccatacgagctggtcgagtacggcggggtttttcgagttgattccgatgcagatgccgcgtttgcgcttgcggagcccccgactcacgacgactgggttccagacctgctgttggacgcatccgataaaacctacgtgcgagtggcgatgcgcagagtgaaggacgccatccaagccttcgccgccccccacgcgatcgaagcctctggggccggttcccattcggtagctggcttttcccgcctgctcggcggcctcgttccatcgctggctcccgatggcgcaaacgcagctggcgcgaacacgcgaaacgggcaagggggcgaaggtcgtggcgtcgacggaaggggtgggcggtccggctcagggcgcaggggtcgtgcagttccccaggtctcattcataggtgagccgacaatcgaactcgtcgatggcctcccggcgatggtggcccgctttgaaacatccaacgccagcggtacatcggtcaaagtctcagtacgctcaaaggtagtcattgccgatgggttcgagagcgatcctccagaaggggcacaacaaccgatgatcttgaagtggatggaccccagcggcgtgacagcagcgacaggctccacaagctgcgacgttcccgcctccggcggcatctggacggtcgtggtcagcattccgcccgatgccatgatctccgtcgcgctgagtgcagaggccggtgcatga

SEQ ID NO: 354389 - DNA, 1044 bp, Pseudomonas aeruginosa
atgacgcaaggtgctcagacaactgcaaacgggtggctccaacttgaatcctcccaaggcatgccgatgcggggcgagttccgcgtgttcgacacaaacctgactaccgctgacggcgctgtattgctggcaatcgatgccgtcggacttcgacatgttttgatcccagttgcggcagattttcctcccgcacacgatcggcgtagcggcggcgtacatttgacaactcgtcccctcgtcgatgcatcaggccagcatcagtatctggatcttgcctgccagaagggccacctcaacaacgtcttcacccatcttgccgaagaagttctagacttgctgcgagactccgcaatccgaccattgcaggcttgtcgccaaacactgcaacgctggcgcgagctactggaccgggagacttcgaccatcctttcaacggaggccctgtgcgggttgttcggcgaactgtggcacctggcgcgcatggtcgcgaaaggtgatcaaggactcttggcgtggcaaggcccgtatggagcgcggcacgatttcactgcagatggctgtgccttggaaatcaaaacaacggcacgccggaacgaatggaagttcagggtgcatggactgatgcagctggagcagcccgacaacgcttgtctctacttgtgtgccatgcgactggagcttaacggcgccagcgggtcgagtgtgccggatctgatccagatgcttctggccactggcattgatcggcgcgatcttctggaccggctgtcgaaggttgggtacgaccagcgcgatgaaacccactatcaacagcttcggctcgccgtcatcgactggcgaatctatgaagttgccgctccatttccccgactcacagcggcgtccctcaatccgcctgggcctccattaggcgtttcggacattcactacaccatagatcttgccgcgtcttcagctgcgcccctgcagccagagattcttgaccgcatccacgctgcacttgcaggagtccacgatgccagcaccgctggacctgcagtctga

SEQ ID NO: 354390 - DNA, 2640 bp, Pseudomonas aeruginosa
atgtcgctgagcgatgggaccaacagtcaagtaagccaactagctgagcagattcacgactccgtgcgcgctggacgcacacccgaagaggctgctgcgcgcctgtccacactgcttcctccagccctcgtcgaacaggctctacagaagtaccgggatgcgagccgccgggtgtggacgatgaaggaaccgggaagcatctacaacaagcacttcgacccctggtatctggggcccgacccggcagaccgcttgtggcactcctacgaaaagcacttgaaagaaaagggttgggacgcggaggccatcaaagatatcgacgaagcatccaccagggtggtttcgcttttagacccaccggggaaggcgcagattcggacgcgcgggctagtcttggggcacgtacaaagcggcaagaccgccagcttcaccgcagtcatcgctaaggctgccgacgtgggctaccgattcatcattgtgctttctggaatgaataacgttctgcgctaccaaacgcagctgcgaatcgacgaggatcttatcgcggccaacttggagcactggatcaccgtcacgaacattgaagacgactttgccaccaacaccaatgtgaactctttcctcacggaaaaacattccacaaaggtgcttggcgtcgtcaagaagaacagcggccgactcaagcgcctccacaaatggctcaccggcgcaagaccggaggtgcttcgcgcatgccctgtcctgatcatcgatgacgaagcagaccaggccagtcccaactcgcacccgaaacctgatgagcggaccaagatcaacgaactgatcgtcaaactgctggccggcctgcccaaagcagcgtatgtaggctataccgctacgcctttcgccaacctcttcattgacccttcgctgccggaagacctctatcccagggatttcatcgtcgatttgccgcgcggcaaagggtactttggtgccgaacagatatttggacgtgcgcctctcgacgagacagaagatcccatcgatgggttgaacgtcattcgacttgttcccgaacatgagggagtacagctcaagccgccgaatcgagacgcccggttcacgttcagtcccgacattacgccctcgctgcgtgaagcgatattgtatttctggatggccgtcgccgcgcgccgcgtgcgcggccaacgtagcaaacacgcctcaatgctcatacatactacgcagtatgcggcggtacatcgcaacgcgaaaggcgttattgacgcattccaaggtgctgtgcacaagcagattcgcgaaggtgatgctgccttggcaagcgaactggaaacgctgtggcaacgcgaacaaacggcgctcccgccacaagaactcagtttggtgccggtctccttcagcgatttgatgacgcacctcgtggacgtggttaagcagaccgagtccaaagtggaaaacggcagcagcccgacgttggatcgggttgactaccagcaggacgccgacggcaacggccgcatctacattgtgatcggtggcaacgtgctgtcccgagggttgaccttggaaggtttgacggtcagcttcttcatccggtcagcctccgcctacgacaccttgcttcaaatgggccgctggttcggctaccggccaggctatggcgatcttgcccgcgtttggatgaccgaagagttgcgcgactacttctacgatcttgccagcgtcgagcgcgagattcgccaggacatctcgcgctacaagaacggcaacgtgactcccatggagtttgcggttcgcatacgccaacaccctgctttggccatcacggccaagctcaagatgcagcacgcggtgcaggccaagatggcgttcaatgcccgagaagtccagacgatcgtgttccgccacgaggaccaagcctggttggacagaaatctgaaggcggcacgcgatctgattgcacgcatgcgtgcggctggcattgaagctgcgacggtgaccgacaagccgcacaaggtgttcttcggcgttccgtcggcacaggtgctccagtttctgaacgagtacgccattgaccccggcaacagcgaaatgcctgcgggccttctgcacagctatatacgtgaacagaatcaacgcgaccacattacgtcgtggacagttgctgtcgtcactcgatctgaacaacttccgacactcggaacgatcgatcttgggctcggggcagaagtgccattggtcaaccgcgcccgctcgcttcgcgagagaagcccgcaagtagtcgatatcaaagccttgatgtcggaaacagacatcgcaatcgacgtcccccaacccgctgcggagttgcgcgggaaggatcgcgacgcgctgcgagatcttcgcgacggggctgttcccgaccagggcctgctattgctctatcccatcagcaaggattcgatgccccgcaagggaagcagccagcgcgcgccgctcggtgcggtacagcacatcattggcctcgcactggtgttccctgatgttccacaaagcgatctcacgccacaaagctatatgactgtcgaactcccggacgttggcagcgaaatgatcgatattgacgatcttgaagatatggccgagaccgacgaatga

SEQ ID NO: 354391 - DNA, 2130 bp, Pseudomonas aeruginosa
atgaatacttcagttatcgaagccctcgcgctcgccccctcacacatgcttgaaccgcagctattggcagggacaggcgcagcaactgccgacttgggaccaatttggattcttgaagaagtcgcgggccacctgcgctcacaaggcaagaaaacgactggtaaatcgcggatgcgcctgtatcgactcagcggggatgtgctgtctgctgagcacgaattggatctggatggcgaagctcggcgcgccgacactgccatgtcccttctttccctggcgaaagcgcgcaccggcgttgtggtttgtagcttccgcacagttgccgcgatgcagcttgtggagcgcttggaaaccgatacccacaacggactccattatgttgtggaggtagatgctgcacgcaaggttgtattcgcccgcgcccgcgaaggcatccgctcgtccgcactgagggagcgcgtagaaaccgcgagctggcagcagatcagtctaagcaggccggcaggaaactctgagtgctatgccgcaaaccttggcaaggcggcgcttggcaacattgaagaccttacttgctttgcactatccatcggcggcataaagggatatcagcgtggcgtcctgatcggtatgacgtcgctggagcttgacgatgggctcaagaagcttgcacaactactcgcatggacacgatggattaggctcgccgtccgcaaggccaagcgggcgcgatcggtacccgcgatccctaccgcacgtctttccgatgccgcagaaggagctgcgtcgcttgacattctggttcgggccaaccgcaagattgctgcaggccacgatgccaaggctgcggacctcgtctcacaggcaccgagccagcggatttcgctcaaacgccgcctcacggccaacaagacaacgctaaacatagtcgagttgtttgccggagctggaggaatggggctgggcttcctcagcgcccgtggatcgggcggacgcgggtaccgaattgccggatcggcggaaatccatccgatctacacgcaaaccttgcggcaaaaccatgcctacatggagaaagctgggctgactccgccaaacacgacgccacccgaatatgccccgatggacctttgttctaacgaggtgaggacgcggctgggtgcaatggcgcgtgagcatggcgatgttgacgtgttgatcggcgggccgccatgccagggcttttccagcgcaaacaggaacagctggtcaagctcgaatcccaacaatcgcctagtagatgctttcctagactgcgtgtcgcacatggcgcccaaagtccttctgatggagaacgtccaaggaatcttgtggacgccccgggaggagtctgactccgacttgagcgtcgcagcccacgtcttggagcgacttgcagaaatgggctacctcgttttccccaaactgctggatgctgtttggtatggcgcaccgcaaaatcgcaatcgcttcttcctgctcggcatccacaaagatgttggctattcgcccgctgacttcggcaagtgggggccgtttccgatgccaacccatggtcctgggacaggcaaggcctttgtgacggtacgggacgctattgcagatttaccgaagctaggcaacggggacaatctagttgagcgtccttatgaagaggatgccgcacgcctgcaacagaacgattttttgcgggcaatgcgcaccggtgccccgaagggggtcatatgggatcacatcacttcgcgacatgccgaatacgtcatcgaacgctataaaggtatcggccaagggcagaactggcaggcagtgcgcgaattgatgacaaattacgccgacgttgagcggacacacagcaacatctaccgtcggctggcgtggagcgagcccgcgatcaccatcggtcactatcgaaagagcatgatcattcatccttcgcagcatcgcgggctctcgcttcgcgaagcagcgcggctgcaaagctttcccgattggttccgcttcgccggaactgaatccggcggtgaaggcggcttgatgtacaaacagcagcagcttgccaacgccgtttgtccgaacgtgaccaaggccgtcgcagagttcattctcgatctctaa

SEQ ID NO: 354392 - DNA, 927 bp, Pseudomonas aeruginosa
atggcgagtccgcatgcgcttgtaagaactcaaggcatgacgtttgccggtctccagtctggagccgacctggcggtgatagaacaacaggggttccctgatcagcctgcctcgcaccccacatccgaccagggcgatccagaaatcccaatcctcgaactgtgcctgcctggcttcgtcgaaaccgcctaccgccagccagtcatcgcgatgaaagatcgcagagacacagaacggattgaagtaacgcaacagtccgggatgaaagccggcggaacgatgcagccgctgctcctctcccaccacctggacccagctgtacgccaggcggacgccagagtttccctccagcaagaccaggcacttttccaaataggtggacgccagccagtcatccgcatccaggcaacagatataacgcccctcgcccgcgccacaccggcattccgcgctgcggatggcccacgattgggctggcgcaggagcgtcatgccgggctcctggagagcctcgaggaggtccagggtcgaagggtcatcagaaccatcgtcgaccagaatgatctcgaagtcctggaagctctgccgggccaggctatcaagcgcgcgcctcaaatacctcccatggttgaagcagggaatgaccacgctcagcaggggcttctgcggatcccacggagtggcgtgtccggaaacctgccggagcgccgaggccgaaccgatatcgaggacaagatggaccaggagccttcccttctctcccagccacgaacgaaaagcaggcggtagggaaaatagcagacgttgcagaaaatgggccgacctcacgcccttcacctggacaccggttcggtttccatggagacctcttgctcaggccgcacgcccccaggcaggtagccgggtatgttcctggccgcatccctga

SEQ ID NO: 354393 - DNA, 360 bp, Pseudomonas aeruginosa
atggtcaggggaaacatcactccgcgcacgcggcaactggtggacgccctcaatgactgcctgggccggggggagcacagggagatgtttcaccacagcgacgatgcgggcaacccaggctcccatatgggtgacaacttcccggccaccttctaccttccccgggccatggagcatcgggtcggagaagagtccgttcgcttcgacgaggtctgcgtggtggcggatcggaagagcttttccttgctggtcgagtgcatcaagggcaacggctatcacttcaccgcccatcccgactggaacgtgccgctgcggcccagcttccaggaggcgctcgactttttccaacgtaaggtctga

SEQ ID NO: 354394 - DNA, 288 bp, Pseudomonas aeruginosa
atgatcaagatttttcgctgcacggatactccgcaagcggtgctcaatgctgcgcttgctgatggagtagtcgggatcagaggagggcgtacgactgttcgcaatctgctagaccgaatatctcaacttgcagagtcagaggggcatgaggatatcgttgcgttatcgacctgtaatcacccttacaccgagcttgcatacatatacgatagtgagcggttcagtaatgaggcagccaagcaggaggtggtagcggccttcaacctgattatcactggcgagctgtga

SEQ ID NO: 354395 - DNA, 1617 bp, Pseudomonas aeruginosa
atgacccaactgttgcacaacggcaagcagcattttgtcgacaacaacggacatccgctcgtcggtggtcgggtttatcactactacgttgggaccaataccccgaaagacacatatcaggacagcgggcagacgatccccaacacaaaccctatcgtcctagacgctagaggcgaagcgtcaatttacggggcaggcacttatcgtcaagtattgaccacatcctctggcgttacgatttgggaccaagtcatcctagacccatcatctgctgttggtggtgacttagacgcgctcaaggacgacctcgccaacaacacagatcctctaaagggtgccggtcttgtaggattctccaacagcgcagtttacgcggacggtacggttggttccggaattcgcgaaataaatgccaagattggtgtggtagtcactgactatggtgcgaaaggagatggcgttaccgatgatactgattcaatcaaggcagctattactgctgctggagcaggcggggatgtaattttccctgaaggaacctatctcattactgacaagcttacatcgctcacaagtcagcgctggcttggtaggggggggcagcgtgcgacaaccctgaaaaagggggcgaatattgacatggttgaagtaggaaccttgtcaacgatccttgacatcaacctagagggcgtaggcgctacgtattcaggtaagggtttcagggtcacgtctggattcagccagaccctaactcgctgtcgtgctgtgaatatgggcggagagcctctgtatttcgatgctaacgccgggggcggcactaacgtaacggtattcgaaggatatcctgtcgacacggatacctatgccggatgcgccatagccggagatactgctcctcatcctcggtttttccgtggtatgtggctcagtggcgcgaattttgcgcttggcccaggggctggtaacggcggctcgatgagcgaattctatattcgtgacttgagatatgatgccacttccacactgttccatatttctaatgggcggtgcgccactcttggggctacgacgacccttaagggctttgaccacacaattgacggggttgccttcgcagggcctgttgcgcttgattctgctcagggtatcaacatcggtccttcgtgttccgtaccaacgttcacggaaaacccagctaactgccagtacaactctgtgtatgtccagcgcaggacgtacactccgacctggacccagacctctgccacaccatccgtgggaaacggtacgctaaccggaaactacatccggcacggctatcagtgcatggttgagatcgagcttatcgcgggatctactacggccttcggagatggaacgacagcctataggttctcactcccgttccctgggcacctgtctttcaaccagcgtggcttccctgttcgtatcttcgatacgagcgcgggggctgatttcactgggtgggcgtccattggcgcgggtcaggattacatcaccatctctgtgggaccccagcaggcccgggccacttcgcctatgacgtgggcaagtggcgatatgctgcaatgcagtttctcgtatatggtccgatag

SEQ ID NO: 354396 - DNA, 213 bp, Pseudomonas aeruginosa
atgaccttcttcgtctccaagtacaaagagaaagcgcctcagattgaggctgtcgagtttcgcgatatggcagacgccggcctgcttgcgaatttcgccagggccgaatcattcaacgctacgttgtcggtcagtgatgtgctgatcaagagcagtgaagaggtcagcgtcatgaagggtgaggatttctataagcaatacgaacctgcttaa

SEQ ID NO: 354397 - DNA, 492 bp, Pseudomonas aeruginosa
atggtgcttaccgatgagcagattgaacagctgataaagctacccaagctcgtcataaaccccaacctgaagatgaagctgcagaggagctctcttcaggtcacctacgaccttcgggaactcaatggcgagcgggagttcaagctctaccttcggcagaatccgaaggatccagaaagctattcctgtggtcttatctacgtcgtcgacggcccggaccagtctgtgacgctatgccggtacaacggaagcaatcacatccactgcaattcgcttgaggatgatgagccgatccatttcaaatgccatattcatcgggcatcggagcgatacattgctctgggcgacaaggctgaaaaatacgcggagacgactggtcggtatactacttatgaaggtgcgttgaactgcatccttgaggattgcaacatctcgggccttgagcctcccagagaaggtcccatatcaggagaacagatttcgctatggtag

SEQ ID NO: 354398 - DNA, 981 bp, Pseudomonas aeruginosa
atggcattggtgggtagacgcgatggccgcaatttcggctacggcagacaattgagctacgcaggaccgcaggcactgaaagacatgttcggcggcggtcattacggcacagtcaaggcgtactgtgatcggtggcaggcattcgtaatgtggtgccgttccgatcaggggcccggtatcaatgatgcgcggatgattgatcggaaggtgttggccgactatgcggtgtatctgcgcgacgtggttgggcgcggtgatctcgccgtcagcaccgcacaaaaccggctatccagcgttaacagaaccatggcggcgcttcgcggtgatcagtacgtgaagttgcccagtccgagcaaggcgttgggtatgcagcgcaccgggattcgccactcagtgccgcagggccaagaccgcgatcaggttaatgagatcgtcaatgcgctttgccgcaatcatcagcaacgcgccgctgcaatcgttctgttggcgcgagccaccggcatgcgcttgcgtgaggtgatcctagccgacttgccacggctgagccgtgaggctaacgacctaggcaggatcaacattcaggacggcaccaaaggcggccgagctggcgcctcggcgccccgttggattgcggtgcacgaccatattcaaggtgcacttgggtttgcacggcaggtgtcgcctgcgggtagccgcaacctcattgcgccgcacgaaagctaccttgacgctctacaggacatcgtccgcccggcgcgggacatcctgcatgcacacagcctcaaaggctttcatgagctgcgagcggggtacgcatgtgagcgctacgagcaaatcacccaacaccgcgcacctataaacgggggtcaatgctgccagttagatcagcaccttgaccgcgaggctcggaggcaaatcagctatgagctggggcacggtcgggtcgacgtcgtcactgcgtacattggagggcgtacatga

SEQ ID NO: 354399 - DNA, 288 bp, Pseudomonas aeruginosa
atgagcaagccattcgatatggatctgttcttaaccagcgtcctgaccgggtcctacgcgacgcggcaacgccatttgcggcaggcaaaggttatccaaactgcaatcgctgagcgatggcaacgagaaacgccttgggtttggcaaagaaagcatgtcgcttggttcctggatcatcgcctacgtgaacgcagtgacgcaacgcgttattactatcgactgaccgtggagctgctagttcgtcgtttagaaaaaacatggttcttcaagtgccaagcgaagatctga

SEQ ID NO: 354400 - DNA, 1839 bp, Pseudomonas aeruginosa
atgtcagaactctccgggaactcatcatctagagctattggaagcgtttataaagagaataaaagatttgttgtaattggtttgactggaagaacaggttcaggttgctctacatcagcagaaattctttgtagtaccgccattgagcttccagagaacgcatatgtcggaatatctaataatgagctaagaaaacaccgaataattaaaaaattcattgagcatcgatggcagccatttaagtgtcttcaagttagaacggttataactagattcatccttgcattaaatttttcggaattttgtcgctttgtttcagatgttatggctagagatatacataatgcctcagaggccatgagggagataaaagaagagtatgataatctacatgtcgagatatcgaaatatcttaggagtccggaaagcacgctagatgaaatagaagataagcaagaatttgcttttgatctatacttcaataggttgccggtcttctcggataaaatacgagaaggtctaaaaaatatttcgcttgatgcatacacaaaaatataccaggccgcaggcgataacatacgagcgtcaggtcaagcaaatagttctaggtttgatgattcaaaagtttttcatttccctaggactataaataaaataataaagtctgcgcaccatttggctcgaaagaataatgagtcctgtttcattgtgattgatgctattaggaatccatacgaagcaatatttttcaaagagcgttacgctggtttttatctggtatcaataaacacagaaaatgaaaacaggctagcccacctccgcagtacacacaaattctctgagtctcaaataaaagaccttgatgaaaaagagtacccaagaaagctttctgggtatagtaagttcatatcgcaaaacattcagaaatgcattgagatatccgatatacacatacacaatcctagaaaagagcagttcaataatgttgagcttaagtgtcagcttgcttggtatatttctctagtgcaacatccaggcttggtgatgccaacatctttggagaactgcatgcaaattgcttatacggtcaagcaaagttcaggatgtatatcaagacaagtgggagcggttgtaacggatgaggagttctcagtaaaatcagttgggtggaacaacacgccacagggacaggtgccatgccttctcagaaatgccgaagatttactgcttggtcaagacactcctgcatatagtgagtatgaaagaaatgatattaaattcagggaggttttgcatgagaaatttgatgggcttagaaaatcaaccttgttggaaggtcgtaatttgtccttctgctttaaagacatgcaaaatgaaatagacggtgaaaaaaaccaagtgcacactcgttcgctgcacgccgaagagaatgctttccttcagatttcaaagcatggtggaatgaagcttaggaatggagtactatttactacagccagtccatgcgaactttgctccaagaaagcttaccagcttggaataagtaaaattgtatacattgacccataccctggaattgccactaggcatactctattggtcggaagcagcaggccagagttacagctttacaggggcgcagttggtagggcatatcaccagctttatcagccaataatgccatacaaggatgagcttgaaacgctgctatccatacccggtagcgcaaacaaaaaagctattcgggcaaaaatgctagaaaaagaaaatctagaactaagagaagaacttgctcggctgaaaaaacagctagatgatcttaataatcataaaggataa

SEQ ID NO: 354401 - DNA, 1002 bp, Pseudomonas aeruginosa
atgaagcactggactgaaccaaatggaatatttttgattcaaattccaatcgattggcagtaccttaattcaggccttagcgactatgaggagaagtcgccttacgggtttcaaccttatgaagaccccataggttgctttcagataagttgttatccgctgagcgagcttgctcctagcatcgccatagccaatccaaacggagtcagaaatttaagctggaaggcgtccagggaagataattccgaattttgcacacatctgttcttcggcgcttattatgatcaagcattgataggtaaatatatctacgatgcgggtcttgaaggcgacaagaggattgccaaacagcttgggatcgcgattgaaatcctaaactcggttgtgatagtcccagagcgtgatcgtaaactggctgctgatctcgataagtttgatcgattcacaggggctcttgcggcgtcacatgatctcctatatgcagcaattgatgcaggggcatgtattgagataattgcaattgcagcaaatcaaatagatgcatatttaagattgagtctggtaattgcaacgcagctaaagaaaaagacgaacgatatcgaaactagatacttgttccaagcagatggagagaaggggataatggaaaggaaggttttcgaagatgctttaaaattaaaagtaattgatctggaggcttttaatggcttgaatgagctctacagcctgagaaatcgcgttattcaccgatacataatctcagatatcaaatcacgtgatctcgtcgagattgctgggaaatatttgagcgctttggaacgaacacgtctaacccttcgcgacttcgagcagaaacaagcagtcgtgccttatggggtgtacggaacgaagtttggtaaaacccttgttacggacgacgccataaggcggttacatgcaagcgcaaatgacaagcatcttcttgaaaaatataagagaagcgttagtgacagaagaagctag

SEQ ID NO: 354402 - DNA, 705 bp, Pseudomonas aeruginosa
atgaaaccgctagtccaatactgccaaggagctgtcaaagcattgaatgctcaatatgaaatgagcaacgtgctaggtcattctgccaccgctgggtcggcgcgcgaacgccttatccaagattttctcattgcgcatctcccagaaatgaccagcgttgtgagtgggatgattattgactcgaacggggggcgttcaaaacaacaagacattgttctgatgttgcggtctatgccaagactaccttttgctagcggccatgatcttatatttcaggagggaactgtagcgactttcgaaattaagacccaaatctccccatctactctcgacgctattgcgatcaatattgaaagcgtgaacaagctagtaccaagcacattagagggagttgaattaggcgacctagactggccatatgcaaggatattgaatgttgttgtaacatatggaggctctgctttggatgtcattgagcgcaaactaacagagctgcccgcaacaggtcagccagatgtctatttagatttaacaaaagggattctgatcaagaacgacggagttctatttggtcatgacggtactgctgcatacattctcttcaacgaagctggggtgggtttggctcgcttgcttgcgttactctcaaaagtaactggtcgcttagtaatgcgtggcgtgcagtgggaggcgtatatctcttga

SEQ ID NO: 354403 - DNA, 186 bp, Pseudomonas aeruginosa
atgccgtccgacgcggccctgaatcgcttctttacgccccctttgcggagactttccctcaagcggcagagcccgctcgaaggagagatcgcacacatgaccgttctggattggttgtccctggccctggccacgggactgttcgtctatttgctggtggcgctgctacgcgccgaccgtgcctag

SEQ ID NO: 354404 - DNA, 1437 bp, Pseudomonas aeruginosa
atgcattcgaagtcggtagatagcctgtcgctgacacgggctggattcatcgagtacttcctggtcgcgaccaagctggtacacgcgctcaccgccatcgccccggcgctgttcctgctgtactaccccggcctggttcccgtggagctgcgcagcaacatgctcgggctgctgctgttcttcggcgcgctcacggtgatcatgttccaggcactggacgtctactccgacgatatcttcagcaaccgcctgcgcttccgcatcatgttcttcgcctgggcctcggcgttctgcctgctgttgttcatgtaccagggcctgggcctgtttccctacctcagcagcaagctggtgatcttctggttcaccggcagcctgctgctgttcggcgtgcagcgcctgctggtgctgcgcctgtaccgggcctggatgaaacgcggcatgtacctgcaacgcacggtgatcctcggcttcaccgagagcggcatgcacctggccgaatacctggtacgcaaccacgacatccgctccggcatcatcggcttcatcgacgaccgctccgagcgggtcccggagaactacaactcgctgccgctgctgggcaacaccaaggacctggagaagctgatccgccaggaacaggtcgaccaggtgctggtcgccctgccctggttcgccgaggggcgcatcggcgccatcgtccaccgcctgcggcaattgccggtgaacgtcctgctggtgccggacatggctgccttccggcatgcccacaaccgcatcgtcgatgtctccgggatccccatgttcaacgcgtccgagctgccgctgcgcggctggtcgccgctgatcaagcgctgcgaggatctggtcctggcgagcatcgcgctggtcctcttcgccccgctgatggccctggtggccctggcgatcaggctcgactccaaggggccggtgctgttccggcagaaacgctacggctacaacaaccggctgatctgggtcttcaagttccgctcgatgtacacggaaaggaccgacgccaacgccgaacgccagaccacccgcgacgacgaccgcatcacccgggtcggccgcttcatccgcaagaccagcatcgacgagctgccgcagctgttcaacgtgctcgccggcagcatgtcgatggtcggcccgcgcccccacgccaccgcgaccaaggccgccggcattcccttcgaggaggcggtcagcgaatacagctcgcgccaccgggtcaagcccggcatcaccggctgggcgcagatcaacggctaccgcggtgagaccgacaccctgcacaagatcaagaaacgcgtggaatacgacctcgaatacatcgccaagtggtcggtgtggttcgacctctacatcctgttccgtacggtgccagccgtactcctgaccaaggaagtctactga

SEQ ID NO: 354405 - DNA, 1329 bp, Pseudomonas aeruginosa
atggcacgtaagggactctatctgggcggcagcgcgctgctgctcgccgtggtactgctgctggtgttctgggggcgtcccgccgacgccgagatccaggtactgaaggcgcctcgcgcggtggtctggaaagacttcctcggggtcaacgcgcagttcctctggttcagcccggagcgttacaacaagcagatcgaccgcctgcaggacctggggctggagtgggtgcgcctggacctgcactgggaccgcctggaaaccgccgaggaccagtaccagctggcctccctcgaccagttggtcaaggatctcgaggcgcgccagctgaagtcggtgttctacctggtcggctcggcccgcttcatcaccaccgcgccgttctactcgcccttccaggaccagtatccgccgcgcgacccggaagtcttcgcccggcgcatggcgatgctctcgcagcgctacccgagcgtggccgcctggcaggtatggaacgagcccaacctgatcggcttctggcggcccaaggccgacccggaaggctacgccaagctgctccaggccagcaccatcgccctgcgcatggtcgacccggagaagccggtggtttccgccggcatggccttcttcagcgagatgcccgacggccgcaccatgttcgacgccctcggccacctgggcgtggagagcctcggcaccatcgccacctaccacccctatacccagttgccggaaggcaactacccgtggaacctggacttcgtctcccacgccaaccagatcaaccgcgccctgcgcaacgccggcgtgccggcgatctggagcaccgagtggggctggtcggcctacaaggggccgaaggagttgcaggacatcattggcgtcgaaggccaggccgactacgtgctgcgtcgcctggcgctgatgagtgcgctggactacgaccggatcttcctcttcaccctcagcgatctcgaccagcgcgccagcgtgcgcgaccgcgactacggcctgctcgacctggacgccaaccccaagccggtctacctggccctgcaacgcttcctcaaggtcaccgggccgaagctgcgcccggccgacccgccggtcaccgagaacctgcccgacggttccttcagcatcggctggacccgcgaggacggtcgcaacgtctggctgttctggtcggcccgcggcggcaacgtgcgcctgccgaagctcaaggaggccaccctgcacgatccgctcagcggcaaggtcacgcccttgagcggcagcgacggcctggaagtcccggtgaagtccagcctgcagatgctggtctgggagtga

SEQ ID NO: 354406 - DNA, 2820 bp, Pseudomonas aeruginosa
gtgagcgaatatcaggggatgcgctggttcaaaatggattttcaggttcagacgccagaggacaatcgccactgggctgatgacgatatgcggctgctgagcccgcgtcggccgatgcaaaacggcatacctaacgaggacgatatacaaagcaaggccaagcgctttctacatcgctgccatgagttggaactcgaggctatcggtatcaccgatcacaacttttctgagaagactgagccccgcgattggttccttacccatctaatcgagcagaacaaggctgttgctagggagcttggtcgtccacctctctgcattctgccgggctttgaggtggatattggctaccacgtcttgtgcctatttgagcctgccaccaaggtaagtcacctgcggcgtgtcaacatgatcctaattaagctagggctcgcagagaatcagcgctttcgtgctgggatgcctactgcgttgcggcgaggggacgagccggtcagcctgaagactttgcttgaggtagttcagaaggatcatggcgggattgtaattgccgcccatgctgaccaacaggacggcttgctttcggcagctcgcaatattgatgactacaagctgccagggcttttggctctggaggtaaccggttatccaatgtccgagaaatatcgctcgatcttggaggggcgcaataaggactggtcgcgtgctgggcggcagcccgcatatgtgcagtcgtcggatgcaaagtcgctgcaagcaaatgctgagggtcatcctctccaaaacgcgttgggctatcgctacacctgggttaagtcatcaaaaccttcgatcagctcgctccgccaggcttttctcgacggtaagtcgaggcttcgtctgcaagaagcccggccctcagacgagcaaacacacccgcgaatcgtgttcctgaagtgccgcggtttcaagtttctcgctgatcaggagatttatttttcaccgaacctcaatacgttgattggcgggaggggtacgggaaaatctacggttctggagctattgcgttttgcattcggccgcgaccgaggggactccttctctgcctctaaccgggcgaaattcgagcgggttaaagcgacctttactgaggaggcagaggtgcaggtgggctgggagggaattccaggccaggtggacgtcatctcgcttaaaccgcaagagggccatgcgctactccagggtgaggcgcatgaccttgaggtctttctccgccagcttcccgtgcagttctatagtcagcagcaactgagtgagctcacggatattaatggtggtgacagtctgctggcgatgattgatgaagcttgctccgttgagctccaagaactgaaaggtcaggaggacactctacgagcagagatccaccagctgttcgctggcatggatcagatcggcgctttgactgaggaagtcagggtactcaagcaggagatccaggagcttaatcgacaatggcaagcgcggcgtgaggttcaagaggaggcgcagcagtatcagtatgcagaagcggctcgacgttatgccgatcaggtccgcacacaggtcgatgaagacatacagcggttttcccagctggccgaagatctgtcaacgcggggcgtgctcaatgatggccatgtacaggtctggcccaggtcagagtggttcaatgagttcactgaagaggcagccaagatgcggctgggttaccaagcacaggtagccgcactggcagcacagcttaggcaagatgcgatcaaactcttcggctgcggtgaaggatgggagcaggtttcgcgagagttggaaagcaccaaagggacgttcctccgggcttgccatgagcgaggcttgcagccgcaggatgtagcgcggttgcaggaaattgatagatctcgacaggccaagctgcagtctttgcaggggaaggaggagcggttaaatgtgcttactcctcagcgtgagcgtttgagtaacgccctggatgaaataagcgcgttgtgggggagacagtttgctgttcgacagaacactgcaattgaaatcaatgaaagagcccaaggctctattcgtgtgcttatccaacaaatggcagacgcagggggattccttcaggcctgggagcttatggcacctgatggtcgaagccgcttgggaagggcgtggacgcacattggcacaatattgtttgaaagcttctctagtcatctgcaagaggctccgcaggaagcatgctcaccttggttgcatatccgtgaggtgatggcagggcggcgcgatttgccaaaagcgctgctggagtacaaagacgagctgaagggctacattaacaatcagaaagattcgtggcgaatcgctcaactgacccgagtcgaggagcgcgtcgatattgaactataccgagcagataaaacactagttggtagtgtacagagtcaggccctctctgagggacagcgtaatacggcgatcttgcacttactgctggccaaaggtgaggggccaattgtcattgatcagccagaagatgaactggactcaaattttatctatcgcgaactagtgcctttgctacgtagcgtgaagaaccagcgtcagcttattctggccacgcataacgccaacctccctgtgaatgcggacaccgacttggtgtatgccttagaggtcaccgatggaaggggcaataagttggctgcaggtggcttagatcggactgatacggccactgcagtgctggacatcatggaagggtctgctgaggcctttaaacgccggttcgacaagtaccatttctag

SEQ ID NO: 354407 - DNA, 1482 bp, Pseudomonas aeruginosa
atgactgacgtcgtaatcaacgaaatggatttgaagcgtttctccgctctaataggccagtcccgcagcccaatgactgcgttctttgcccgcgaaattaggtggttcgcgaatgaggctgaaactgtcctaggtgttgtgctcatcgatatccatgataaagacttcaccgccattctgctgggaagagatgcagtaggccgttaccgttgtatcgatcaggaggtctctatgcctaccccagaggtagcgcatgcctggttggtagaaaagatcaccgttgttactttgagcggaaaaactgttttcgagcaaggcgacgaagagggggagtctatggatatcttcaccccagtgaagcccgtggaaaaacttcacccttattttcgaattctctcgaaggagccatcgcatgtggctgcaaggggtatcatccgagagatgatgcctcactacgttgatattgatgggaattttatcgagcagtttcagaccaccggcttcgatgccagggtatgggagctctatttgaatgcttatttggtggaagaggggctcaactttgatcgaacgcattatgctcccgacttcatcgttcaaaaatatgggcatacagtagcgattgaggcgaccattgtcggacgcaagggtgggctaacggagcttgatttcgaaaaatttcccgagatgactcgggaacagatagtagagaagactagaaatgaaatgcctataaaatttggcagtccgctcttctctaaacttcaaaagaagtactgggagctggagcatgttactggaaagcctctagtcatcgctattgctgattttcatgacaaccagtccatgctatggacatctactgctctcattaattacctctacggtgtgcatcacgatcatcactatgatgagtcgggaaagttggtcatcgctcctcagagaattgataagcacatcttgggtaataaggagatcccttccggtttcttcttccagcctggtgcggaaaacatcagtgccatcatgttttctgcaagcggtacgatctccaaatttaatagaatgggcaagcaggctggctttggcgagatcaacattaaattgatccgtagaggggctatgcatgatcacgatcccaatgcgtctctgccaaagctgtttgcctatgaggtcgacgagagctgcgaggaaacctgggccgagggtatgaacatgttccataaccctcgcgccttgcatcccgtgccagagaagttgtttccctcaattgctcaccactacttcaaggaggatatgatcgtggccaatctaccggaggttcatgtctattcgtcgatgaccatgattctaaacgtcgtaggtgatgaggagtggaagaataaaaaaatgacagtaacctaccaattcgctttgccggagttcatttcatcgacaataaccgtgcgggaatgttcctggcatcggatgagggcctggtag

SEQ ID NO: 354408 - DNA, 1008 bp, Pseudomonas aeruginosa
atggactttcttcgacgggcagctgcgcgccatggaaattattacgactacagtaaattcatctatcgtggagcgagagcaaagggcgagattatctgccccgagcatggaagcttttggcaagtgccaaacaaccatattcgcggcacaaaatgccccatctgctccagaaaaacaaaatataaaagatcatttaaagccgaatgcgaagaggccggcattgactattggtgcgcacttaaacgccgtgaagccggaatgccttatgagaaaatcttcagtgcatcataccttcgctcagaaagagcgacaaacgagataactgtttttggagttagctatccaaacttagagaccgcagtccgcgttatagacccaccagcaacgagcacaactatcgctcgccggctaaaatcaggaatgtctcccgaagaggccttcactaagattcctagcccaggttatgccgatggagccgtttatttaattgagcataagccaagcggcaaacaatatgtaggaatcacaatagttacactcgatgaacgatggcaacgccactgcgaacaggccaccagaggaacaatcaaagcccaaaattctctacatgcagccatacgcaaatacggccctgaacaattccaaattaagaaaattgacaacggcacaactaaagggaaccttgaatatctggagcgatactggatttccaaacttaatacgctaacccctcatggctttaatatttcatccagcggatgtagcggcggctccaatggcaaacctataaccattgactggatcaacttccctagccatagacttggcgctgagtatctagccagaacacgtaaaatttcaattgcagcagcgaaagcacgcattcgctctgggcgcatcaatgtaaaggcaccgccaaaacctggtgaaggtctatgcaaaacacctgcatataaagcctggagtcgactggttcacagccttctaaatccaaatagcaagagttaa

SEQ ID NO: 354409 - DNA, 3279 bp, Pseudomonas aeruginosa
atggctcgagctccacgtaaaggcaaagctcaaccgcccttggtggccagccatttccaagaggcgttggtgctcaatcagtacctgatcagtctctttggcatcgaccctctggtcacgcacaaggacggcacacacagcgttcgcccgctggagatcatcgccaaaagcctgcgcggcgctacggcgggcatcgacaagaatggcaagcaccacttcttaaccgccctgctctcgcacttgcctccccatgccgcattgaccccggccgagttggagcgctacgacgccaatctggtggcccatacgcgcaccatcaatgcgcgccgcaagcacaaaggtgaaattgcctggaagtacttccagtggctcacactgctgtttgttgaaatctacctcgaccgctatttcaacgaccgccaggggctttgtgtcgcgctcaacgcctttatcgagcgtttcaaccagcaccacctcacgttggggcgtgaaaccggcatcggcgcttacgccgtcgaagacctcaataagctctgcctgcaaaacgcaacaggcagcgggaaaacgctgctgatgcacgtcaacctgctgcagttcgcccaacatgcgcgggctaccggccaggccgatgattacagccgggtgatcgtgctctcgccgaatgagcgcttatccgagcaacacgagcgtgagctgcgtgagaacggcttctaccccgagccgctacggcaggaaagcgacctgatctcacgcgggcaaaatgccctggatgtaccgctgctgaccgaaatcaccaagctggcggacgagcaaaaggtcaaacagatggcggtcgacagcttcggcgatgccaacctgctgctggtggacgaaggccatcgcggcatgagcggcagcgactggaagagcaagcgcgacaagctggccgccaagggctttacattcgagtactccgccaccttcaagcaggccgtcaaggcagccaatgaccgtgcactggcggaaagctacgccaaggccgtgctgttcgattatagctaccgttacttttatgcagacggttacggcaaggactaccgcatcttcaacctgcccaaggatgagcaggcgcataaggacacctacctcaccgccgccctgctggcgttctatcagcagctacgcatgtacacggaggccggcaagcgctacgccggctataacctggaaaagccgctgtgggtcttcgtcggcgccagcgtcagcgggcgcaaggtcgacgaggaaagcgtatcgccctcggacgtcgcgcagatcctcgatttcctcgcgcgctttctggtccatcgtgaagccttcaccacgctcatcaacaccgtgctcaacggcaatagccagcagaccggcctgctcgacgcccagggccgcgatatcttcatacagtctttcccctacctgaaaagcttgaagcaaagcgcggcgcagctttatgccgatatctgccaacgcctgttccacgcccctggtggtggtcatctggtggtcgagcgagtgaaaggcgacagcggcgaactgctactcaaggtgggcgaggcagaacaaccctttggcgtgatcaacgttggtgacgccgcagcgctggccaagcatgtgcagagcgagctggaagacaaacactccctggccgaggttcgcccgagcgagttcggcgagccggtattcgctgatgtgcataaacccacttcgcccatccatatgctggtcggctcgaagaagttcatcgagggctgggactgctggcgcgtgtccagccttggcttgatgcgtatgggccagagcgagggcgcacagatcattcagcttttcggtcgtggcgtgcgcctgcaaggcaaggacatcagcttgatgcgtaccagccgctatcagccggtcaatccgccacaggatattcacttcctggaaacgctgaacgtgttcggcgtgcaggctgacttcatggcgaccttccgtgactttctggaaagcgaaggcctgcctccgaacgacgcgccgcatgtcgaggaaatcaagctaaacgtcacccatgacttcggccagaagctcaagatcctgcgctccaagttccgcaaggacactcaggaacagtacgacttccgcaaacatggccccatcgtggatctcagtatcgatgccctccccccaggcatgaccaaaggcgccatgccgttggtggtcgatcgcttcccacgcctgcagatgctccaggccaccgaggtcaccggccagacaccagaggctatggccaacccacctcgccacttcgacaatctgcggctgtcgatgctggactgggatcggctgtggttcgatttggagcgtttccgtcgccagcgacatctggataacgtcatcatcaaggccggggcattacgctcgttgctggagatcccggactggtatcgcatactggtgccggcgcattggtggacaccttcgatggccaatctgcgtcactggcagtccattgcactggaattgctctgtggcgcgctcgaacgctgcttcaatcaccagaagcgcaaatatctcgacccgcgcatggagctggtgctgctcacgcgtgagcatgaaaacctgccaggcgacgacgccagttatcagttgattgtcgaagcaacggagcaatacctgatcgacgacatccgcaagctgaaggacgagctcgttcaggttggctggcgcgacagcggctatatccagggcctgcggctggatgctcacctctacgagccactactttccagcgagaaagtgaagatccagcctgtcgcgctgaacaaatccgaattccagttcgttgacgatctacgccaatggctgcaggccaacgaggcgaatcttgccgagcgtggcgagcgcattttcttgctgcgcaacctggctcgcaaaggcgttggcttcttcgaggcgggtaacttctatcccgacttcatcctctggtgcctgaagtctgacggcagccagcgcatctgcttcatcgacccgcacggtcttgagcatgaaggccctggcagcgacaaggttcagctcgcccaaaacatcaaggatcttgaagcgcgcctgaatgatccagaagtgaggctagagtcggccatcctatcgccaagtacgaaccgcatgcgtatcgagcatctgtggagccaacatagccttggtgcaccgaacctgagcgatctgcacgtattcttcattggggaagacagctacatggacatggttctggatttaatactgaactaa

SEQ ID NO: 354410 - DNA, 3411 bp, Pseudomonas aeruginosa
atgagcaagcaaaaagaccaattcatcgccctgctgggcgaactgttccagctcaaccaacccgagctcgactttggcctgtaccgcatccttcacgcccgtagtgcccagataaaagcctttatcgataccgaactgggcagcgagatcgatgcccactttgccgagcaatcgcaaagcaacgcccacgactcgctcgaagccgctcgggtcagggtcgccgaaacactcggcgaagatgccttcctgcccacgggtgaactgaaacccgagtatcggggcaccaaggtaggcaaggaattcgagctcgctcagcagcaagctcgcgacggcggcggcgtgctggcggacgatgcccaggtatacgagcacctgtaccgcttcttcagtcgctactacgacaaaggcgacttcatgtccaagcgctacttcgtcgccgagaacgacagtcgcgccgcaccctatgccgtgccttatgacggccgtgaagtcatgctgcactgggccaacaaagaccagtactacatcaagtcgagcgaagcgctcagcaacttcaccttcgacctaagcacggcacaggccaaggaacaaggccagcaaagcggcttcgacttccaacccgcacaggccagcccgctgaaggtgcacttccgcctggctgccgccgcggaaggcgagcacaacaatgtcaaagaaggccaggagcgcttcttcataatccacgcctcacaagccttgaagctggaagtcaacgaccagggccaaacggaacttgtcgtccagttcgactaccgccccgatagcgaaaaaaccggccaggcgggcacctggcagcaaaagcgcctagcagaagccgaacaggtagtcgccgagcaactggaaaatctactgttttctcatccagagcttcgcccattccaggaactgctgttcgcccccgcgccgaccgataaacagcccaaccgtacgctgctgggtaaatacctggggcagttcaccgcacgcaacaccatggactacttcatccataagaacttgggcggtttcctgcgccgtgaactggatttctatattaagaacgagattatccgcctcgacgacatcgaagctgccgatgctccgcgcgtggatgaatacctaaagaagctgcgtgtactgcgcaagattgcccgccgcattatcgactttctcgcccaacttgaagactttcagaagaagctttggctcaagaaaaaattcgttgtcgaaactcagtactgcatcactcttgatcgtatcccggagatcttttatcccgagattgcagccaatgaacagcaacgggaagagtgggtgaaactatttgctattgatgacatcaaggcagatatggcacagctaggttacagcgaacccctcactgtagattttctgaaagccaatccatttttgttggtagacaccaaaaatttcccagagagattcaccgagtcattgctttctcacattgaaaatctagacaaaaattgcagcggccatcttttacatacggaaaacatgaatggaatctccattctggcaaaaaaatatgaaaaatctataaagtccatctacatcgaccccccctacaacactggtgacgatggctttccttataaagatgcttaccgccactcatcatggatgaccatgattgaaaacagggttgcatgctcacaaaaactcctagaagacagtggattattcttctcaagcattgatcgcgacgagaataggaactatctacctctacttttctctatatttggcgaagaaaattttgtagaagaaattgtctggcaaaagtcttacggtggcggagcaaagacaaagcacataaacaatctacatgaatatgttcacgcctttgcagccaacaaagatgcagttccttttctttcgctcccccctgacgctgatgcggttcggtactacaaattcaaggatgcgcagttccccacccgaggagcatttagaactcaaccactgaacactaacagtaacgatttcaggaaaaacctgacttaccctttgcctattccgaagttgtctacatatggaacaaaaaaatgggttcaagagcttgatcggattaggcagcttctcaaaaataatgagctaacacttaatggctcatacgaagacggatggtcataccaatttgatagtggtgaaaactgggatggcgatatccttcctccaccaaggcaatggcaatggagctgggaaaaaaccagagatgcttttattaaggatgaactgacattagagcttagagatggctcttggtcagtaaactacaaacaatacagatttgatgagaatggtgaagagcgcggcagaaaaccgtccagcattaatattggcccatacacgcagacgggaacagatgaaattcgccgcatgttcggggaggacgtttctaagtaccccaaaccatccggactaataaaagagttccttggcataggctacaaggacacttctgcacactttcttgattattttgcaggttctggaacaaccggacaagctgtaattgagctaaacagagaggatcaaggagatcgcaaattctcgctcattgaaatgggaaaccacttcaatacagttttgaaaccaagaattcaaaagactatttattccaaggactggagcgaaggtaagcctgtttccagggaggggattagctgcacctttaaatatttagtactcgagtccttcgaggacacgctaaacaatctgcaactgccggacacgcctcgcctgaatgttagcgcgaccgactccagtgagatggcccgcgactatttgctcaaatactggctggagttcgagacggctgccagcccgagcctgctcaatgttcgcgaatttagtgacccaacctcctacaaactcaaggtcaaacagccaggcagcgatgctcaggtagagaaaaccatcgacctggtggaaaccttcaactggctgattggcctgcatgtcgcccacctcgatcagccacgccgctatgccatcgagctggtgcgcgaaaccgatcccgaactgccacaggatcaggacacacgctggcgctcgacgtccatcaaggagcgtgaagacggcgagttctggttccgcgccgtggagggccatattttccgcgaacccggggatgactcgtcactcgagcgcgtgttggtgatctggcgcaagctcaccggcaactcaggtcgcgaccaggcggctctggaggcctggttgggcaaacgtggcatcaacccacgggagagcgagttcgccaccatttacgtcaatggcaaccatgcgctgcccagcgatggtgacgcggccatgcgcgtgcgcttgatcgaagaaaccttcgctcagcgtatgtgggaggacgcctga

SEQ ID NO: 354411 - DNA, 1122 bp, Pseudomonas aeruginosa
atgactgcatcccccctgccctggcaggctgacaagcctcataaccaacttccgccattgccgcccacggcagagctggagacccgtgcagtgctcaagcgctgcatcgaggcccgcacagccctggcggaattgaagcaagcagccgagctgattccgaaccaaacggtattgatcaacaccatcccgttgctggaagccaaggacagctcggaaatcgaaagcatcgtcaccaccacggatttgctcttccagcatgcccaagatggcgaaaatcacgccgacccggccaccaaggaagccctgcgttatcgcaaagccctacaccagggctatcagtccctaagggcgcgcccactatcgaccgtcacagcagtcgagatctgccgcacgctcaagggcgtgaatatggatattcgtcgggtgccgggtacccagttggccaacgaccgcaccggcgagatcatctacacaccaccggaaggtgaagaccatttgcgcgacctgctcgccaactgggagcgcttcctgcacaacgaaaccgacctagacccgctagttcgcatggccgttgggcattaccagttcgaggccatccatccattcaccgatggcaacggccgcaccgggcgcgtgctcaacaccctgtacctgattcaggaaggtctgctgagcctgccgattctctacctcagccgttacatcatcgcccaccgcgctgattactaccgcctgctgctggatgtcacccgcgaacaggcctgggaaccttggctgctgtacatgctcagcgccgtggaagaaaccgcccgctggaccaccgccaagatcgccgccatccgcagcctctcggagcacaccaccgagttcgtgcgcgaacgcctgccgaaaacctattcccgtgagctggtcgacgtgattttcgaacagccctactgccgtatcagcaatctagtcgacaagcagatcgcgcaacggcaggccgcctcccgctacctgaaagagctagtcggcatcgacgtgctgcgcgaagtgcaggtcggcaaggaaaaactcttcattcatcccaagctgatgcagctcctgacgcgcgacagcaacgaattccaggcctacgcctga

SEQ ID NO: 354412 - DNA, 2901 bp, Pseudomonas aeruginosa
atgtcgtcgctcactcccccaagcagccttactcctcatcacgccaagtatttcgcttgggagctcacgcgccgtcgcgctgccagcgaagaggatcggctctcccaatctctgttcgatgccagtgtcgatctcaatccgcaccagatagacgcagctcttttcgccttgcagaacccactcagcaaaggggtgatgctggcggatgaggtaggcctcggcaaaacgatcgaggccgccctggtcctgtgccagatgtgggcagaacgccgccgtcgtttgctcgtcatctgcccggcagcgctgcgcaaacagtgggcacaggagctctccgacaaattcaacctaccgacccaggtgctggatgcacggacctggaaattgctccgcgagcaaggcatctacgacccattggatcgcgacgtcatcagcattatgtcgctgaactttgcagcccggatggaagagcagcttggcaacattccctgggatttggtcgccatcgatgaagcccacaagctgcgcaatgcccatcgcaaaagcaatgaaaccggccagtcgctcaagcgttcattagctggacgacgcaagcttctgctgaccgccacgcctctgcagaactcattgatggagctgtatggtctcagctccttgatagacgaagacatcttcggcgatgagcgcagcttccgtgcccagtacagcaacatcgacgcggatctagttgcgctacgtcgccgcctgcatgccttcatcaagcgcacactgcgtaaagacgtccttgagtacgttccctatacgcagcgtcacgcactgactacgccgttcacccccagcgatgatgaacagcgcctctacgatctgatttccgcctatttgcaccgcgacttcagctacggctttccacagcggcaaaagcatctcgtcgcactcatcctgcgcaagctcctggcctcttcgacagaagccgttctggctaccctggaagccatcaaagcgcgcctacagaaactactggatcgccagagcatcgatgaggaatggttcgagcatctgattgaagagaacgaactcgaagaagacctactggaagccgcagaagctgcagctagctacgaagcccaagactcggccagcaagatcgacttcgagctgctgagcaaggaaatcaccgagctcgatacctacatcgagattgcccacagcatccgcgaagaccagaaatcattcgccttgctcaatgcgctggagcaaggctttgcacgcatgtccggcatgggcgccccacgtaaggccgtcattttcaccgagtcacgccggactcaagaatacctggctcgttttctcgaagcccacggccaccttggcaaagtcgtcaccttcagtggcggcaatcagggtgaggtcgctaccggcatctatcaacgctggttggctcgctaccacggtagtgaccgtgtaaccggctcgccagctatcgatcgccgcacagcgcttatcgatcacttccgtgatacggccgaaattctgattgcgaccgaggctgccgccgaaggtgtaaacctgcagttctgctctttggtcgtgaactatgacctgccgtggaacccgcaacgggtagaacagcgcattgggcgttgccaccgctatggccaacggtttgacgtggtcgtcatcaacttcctcaaccagcgcaatgccgcagatcgacgggtcctggaactccttcaggacaagtttcatttgttcgatggcgtttttggtgcgtccgaccaggtgctcggcaggatcgaagccggcattgacttcgagaagcgcatcgccgagatctacgactgctgccgcaccccacaagagatcgacgcagcgttcaccagcttgcgtgctgagctggacgccgacatccaggcaagaatgctggaaaccgaaaagctcctgctggaaaacttcgacgcggacattcacagcctgctcaagacccacaaagagcgcgccgaaagtcagctagaccgtataacccgcctgttctggaagctaactcagtacatcctggctgagcacgctaaattcgacagccagaacctggctttcgatctcaagctgccacctcttccacaggtggtcacagggcattatcagctcatccgcaaaggcgaacaggccaagcagatccagcctgaaaacacccgcatctaccggcttacacacccgcttggtgaatacgttctcgatcaaggccgcagcacctcgacgcccagcgcaacgctgcacttcagttatgcgcaatggcttgaagcccgtaacccacgcatcagcgttatcgagcaactgctgggtaaacagggctggcttcagctcaacctgctggagctcgacagttttcagcgcgaagagcacttggttttcaccgcaatgaccgatagcgacgagctactcgatcaagaaacgtgcgagaagctcttccagctttgcgcaaatgtagagccaacgcagatcagcccgcctgatgatctgcatggcaatgcccgtcgccagatcgatgccgcattgagccaagcactggaacaaaatgacaagttcttccagcaagaacgcgacaagctggatgcctgggccgaagaccggattctcgctgccgaacaagccctacaagacaccaagctcaagctcaaagggctgaaacgtcaagcgcgagttgcccaaagcatggacgaggcccgccgcctgcaggatgacattcgcaaggtagaaggagaacagcgtcgtcaacgccaggaaatcttctccgtggaggacgaaatcgaggctcgccgcgatgcgctcatcgaagctctggagaaacgcctgcatcgcgccagccgtacccaaacactcttcaccgtgcgctgggccgtgatttga

SEQ ID NO: 354413 - DNA, 1218 bp, Pseudomonas aeruginosa
atggatttgtccatgcgtaggattgtagggagcgacggtgagcggtatgcggtgctgatcgatagttcagggatgccactttactatcctacgctctttgccacctggcatttgcggtcgcgttccttggccgccaactcaattgcgaatgcgttgcatgcaatcaaggccttgtacgcctgggaggctcgcattggcatccacctggagtctctattttcgcaagacgaggtacttggggaagagcaagtgaggacgcttagcgactcattgcagcttttcctcaatcccgagccttgcggtaaaaaagttgcttcgatcatccgacggccaaagtcagttggcaccagtaatcactatttcagattgactgtggtagccgactatttgggctttctggccatgcgactgtgcccaactaagcggaatggtagggacatcaagctaatggtggcgtcgatcaaggctcaccgtcccagcaagcccaacagatcaacaacggacaaagatgagcgatatctagatgaagccgttgtagacgcattggagcaagctctgaggcctggagctgagcacaaccccgccaaggggcacgaagtccaagtgcgtaatgctctgatgttcatgattcttcgcctgaccgggcttcgccgcggagagctcctgaacctcaagatcgaagatgtcgatttcgctcagaacacgctgcgagtggtgaggcgtcctgattcgagaggcgattcacgggcgtatcagcccacggccaagactcgtcagcgaaccattccactcgcgccggaactcatcacccggatttacgaatatgtgcttcgctatcgtaacaaattgcctggggcgaagaggcatgggtacttgtttgtgacccacaaggaaggcccgactcaaggtcgcccgctctcgatctcagcctttcagaagtggatgttgggcgtcgcctctatcatcgagggctctggcgtccatgcgcatgccctccgacatcactggaattacgccttttcccagcacagcgacgcctcggaaatggcctccgcgacagaagaaaaaattcgctcttatctgatggggtgggaagaaacctctggtactgcacaaacctacaacaagcgacacaccaaacaaaaagccgcagaagctgttcttgcccttcaaagcaagtatctgaaaaagtccagtgatgaggtggccggtgaataa

SEQ ID NO: 354414 - DNA, 1269 bp, Pseudomonas aeruginosa
atgctagatcaaagctttaacaaaaaaaccataaatagcgagctgaggaaaagcgattttctaactgctccgcgtttgagagacaaaacagtcaaggcaggagagattggtagcgctgttggtaaggctaatacatcctgggatgtgagcagtgctttgctatctggggtcgttaaaggaaagctcatttatcgcgcgtgctcattcagtgacgaacttctgcttaggaaattgaatagaaatctacgtgaacatgctagggtttcggctgagagtagagatgcgattattgctaatatagccgagctagtccgagagggagtggaatataggatttacaggcttgatataaaggggttttatgagtctattagcagtgattatgcgtgcgcacttatagataaacttgtattactcagtcagccgacaaagcgacacattaaatctatactcgacttaaacctgtcattaggtggtacaggtgtgcctcgtggatttgcgctcagcgcaaccatagctgaaatcgtgatgaaggattttgatcgcgccattaaatctattgatggcgtatttttttacgctaggtatgtagatgacattataattcttactgatagaacagagttgccctatcgatttataaagaaggtaaaacagtcgctgccatcaggtatgtatctcaacagaaaaaaacagattatttgcgagacaaatggggatgtgactcctcataaatccactgccgaaccagtagtagaggtcgattttgaatatctgggttaccggtttatagttagttctccgcttcagaataacaaaaagcgggctgggcagcactttcgagacgtacgattagatattgctgagtcaaaagtgaagaaaactaaaactagattatgcagggccttgatgagcttcaatcagaatagagattttagcttgctggttagcaggataaagttcctggcatcaaatttcagtgttattgatgccgatagagataggaagagacttgccgggattttctataactatcatcgtgttgatgccgcccgctccgtaagtctccaaaaattggactcgtatcttgttaagattgtatcgtcagggcacggcaagatatctgatgagttctattcaaaaactacactttcccaacgtagagagctgttgtcgattagctttcgcagagggttttcgacgaaaatatttcttcacttttcccactctaggctgaaagcaatacaggagtgctggaaatatgtctaa

SEQ ID NO: 354415 - DNA, 1962 bp, Pseudomonas aeruginosa
atgtctaactcagcctctaaacgtaaggttaggaagtcggactatgatcgcgtactcgtgacggaaacaattccctacgaaacccctataatgttctctaatgacggactttacagcaatatcaaaacgagtcctgtaaatgatatttttaattttgcgctggatagagtagtaaagggcgtggggaggaaggaaagatttactattccttacacatataagattaaaaagaactcttcagaatttagggcgttgtctatcattcatcctgtgtcgcagtgggaaatgaaagagttttataagatatacgagcaattaatttgttatttttctagtagaagtaagttttctattcgggcgccaaaagttatcgcttcgtgttttttttataaaaactcttgggaaaatgtggccaagtataagcggggtggggttaatgaatctgagcgggatcggtacacgaaacacagttcttcatttttctcctatagggggtttgataggctgtacaagttctataattcgactgaattcaagcgtttggagaaaaaatattcccacttctggactattgatgtgtcaaagtgctttgatagcatatacacgcactctatagcttgggccacgaaaacaaaagagcatgtaaagtcaaaactacaagtaagctctacattcggtcagtcgtttgatggtttaatgcaaagagctaactataatgagacaaatgggattctgattggtcccgagattagcaggatttttgcagaaataatttttcaagatgttgatcggaaagttgaagaagagcttgccgctagatcgaagcaggtaggtattgactacagtttggccaggtatgtagatgatatatttatctttgctcaagatatttatgttgcgcagctggtctctgaaatttatgtagataatcttcgaaagtacaatctccactcgaatgcgtccaagtcgttaaagtacgaaaggcctttttattcgtcgaggtcaagagtaataagagatgtagatttagctgttaatgttttttgcgaaaagttcttattgggtgaagatggtcaagatagacttgctcctaaggagatattcagaaggtccaagctatgtcagagcttcatagattcagttaagtctatttgctcagaaaatgaagtcggctacgatgcggtatcttcttatgtgatttcggctctatttgaacgcgtaaagagattgataaatattgaggatgacgaatttgtaaggttaaacgctgggctttatgttgatgcgttcttggtaattgtagatctgctttattttttctatgctgtcgctcctgcagttagctcatcttacaagctcgcttcagcaattatattgattgcgaggttttccgaggttaatttggtcgaggacgtacatacaataaagcaagcattgtacgagctgacgctagatttgttgacgggcgatttggctagatataaaaccactgttcataactttgtttatttagaagctctaaatatagtgatagcaataagtgagctcggtgatgactactggctgccttctgcaatattggagcaattgttgctcgtaaactcatcctatcatgaccttatgtgctgtcttttctacataaaacaacatccggtctatgaatctcttagagtattaatttgtaatactatagatgcgcgactacgcgatctgagttcgattcaagttgatgcggaacaagctcacttgtggcttgatgcgattgcttgcccttttctcccaattagtaagcggctgaagtggatccgccgcctttactcttcatttaacatgaaccctcctgccagaacagtgatcactaggtttctgagcggggatgagaatcggcattggtttacaaattggcatgaggtcgatctgctcaacgcgcttgagcgaaaagagttgaagcaagtttattag

SEQ ID NO: 354416 - DNA, 804 bp, Pseudomonas aeruginosa
atgtctcttttccattataccgacgctaatgcgctgctatctatcatcaataatcagcagctctggcttaccgatgttagatttttaaatgattcggaagaggctttggacggagcaaagcatatcgtttcagcgattcataaacttgaagataataacgacgcggcacatgtcaaagctaagcgtaagttagaagatttttctccatctaatgtgctttcagattttgatgatatgcagatgtttgtgacgtcttttagtcgtgcttgcgacaatttgagccaatggcgctcatatggactgtacgcaattgagtttgatgagtcttattttgaggaaagcgtcaattttcacaactgtgtttacgataaggacaataaatgtaggctcgcggatgaacttgtcgaaatggctctttataatctaatgggattatattccagtggtgaggaatcctgtgcagttgatgaacaaagagtcatttgggagcttggtgactctgtatgtcttttcaagcacgaaagttttcaggaggagtgtgaggcgcgactagttacgcaatcgactctagacaatcaggccgtgtactttagggcgaagggagatctaataataccttatcagaagtactcttttccggtcgagtcagtcaaggccatccacgttggtccaatgaaatatcaagatcttgcggtaagttctctgaagtctttacttgataaaacttctgttgctgttcccaataatagaccgtttcagaatgttgatattattccgtctgaaataccttgccgaatgctgtga

SEQ ID NO: 354417 - DNA, 1608 bp, Pseudomonas aeruginosa
ttgaaaccacatctacaaaccacgatctggacgctcctacgcgcgggcaacacccagcgcgagatcgagcggcgcaccggcatctcccgccacaccatccgtgcctgggccaagcgctttgaagcgcagggtgattcaccgccccagccgcccgacgatccaaactgccccggggtggccaccgacccggccacctgcctggccagccaaactgccccaccccggccaccggcatcaacactgggccaagtccctggcgcgacctcgctgtgcgaaccccaccgcgccttcatcgaggcgcaactgcgcctgggccgcaacgccacggccatctaccaggatctggtcgatgcgcatggctttgccgggcgctacaactccgtcaagcgcttcgtggcccgcatccgggtgcgcgagcccgagcagttcgaccgcctgagcttccttcccggcgaggagatgcaggtggacttcggcgaaggcgcacccacccgcgtgcccggcgccgaccgctggcgcaagccccgcctgttcgtggccacgctgcgctacagccgccgcagcttccgccgcgtagtctggaactccggccagcaggtgtgggctgagctgcatgaacaagcctggaggtacttcggcggctcatgccgctacgtggtgctcgacaacctcaaggagggcgtgctcaagcccgacctgtacgagcccgagctcaaccccgtgtacgccgccaccctggcgcactacgaggtcgtagccgaccctgcccgcgtgcgtgaccccaaccgcaagggcagcgtcgagaacgccattggccacacccaggccacggccctcaagggcaagcgcttcgagaccatcgaagaacagaacgcctacctggagcactgggagagcaagtgggccgcctcacgcatccacggctcagagcgccgccaggtacaggccatgttcgaggaggagaagcctcacctgcaagcgctgcctgcattgcccatgcagtacttccgcgacgagcagcgcaccgtgtgcgacgacggctgcgtgcgggtggcccattgcagctatgcggcgcgcccggcggccatcggcaccaaggtgctggtgcgcatcttcgagcaccgcctggagatccgagacctgcagacccaggccttgctgcgcacacacgccaaggctgagcgccccggcaccgtcgtgctgcccatggacgagcgcgtcttcaacccctcgcgcgagacgcgccacatcctcaagcaggccgatgccatcggcgtggatgcggcccggctgtgccagatgctgttcgccatcgaaggccgcgtgggccagcgcaagctgtggggcatcgtgcacctggccgagcgctacccgcgccagatggtcaacgccgcctgcgcacaggccatcgacgaaggcgtgtacagctaccgccacgtcaaggccatcaccgagcgcctggtggcccaggctctggcccgcatggatgacgaccatcccgccacaacgccgactgcgcaagcccacgacctcatccgccacccacaggagtacggcgagttgttcgccctggccgccgccgcatctcaacaagacctcttcgcatga

SEQ ID NO: 354418 - DNA, 774 bp, Pseudomonas aeruginosa
atgaccgccatgaacacacacgacatcgaaaccaccctgcgcaagctgcgcctgtccggcatggccgagaccttgcagacccgcctcatgcaggcccaggccgcccaggagcccttcctggacaccttctcagccctgctgcaagacgaactcgaccgccgccacagccgcctgatggcgcgccgcttcaagctctccggcctggacgagaaacccgccctggccgacttcgactggcgcttcaatcccaagctgccgcgcgcagcctgcttcgagctgcacaccctcaagttcctcagcgaaggcgccaacgccctgatcgtgggcaagccgggcaccggcaagagccacatcgccaaggccgtggcctatcaggccaccttgcagggccacgatgtggcctatgtggaagccgacagcgagctggcccgctacgcgctggccgacgccgacgaacgcgcgcgcctgctcaagggctgggtggccgccgatctgctggtgctcgatgacctgttcctggccaggcgcatcagcgagcacgcagccgagttgctgcagaccctggtgcaccagcgctacaagctgcgccgctccatcgtcgtcacctccaaccgcatcgtgcaggactggggacgctacctgggcgacgccaccatggccaccaccatcctggaccgccttatgcaccgatgcgccatgctggagttcgagggcaagagctatcggctcaaggaagccgctgcccgcctggtcatcacccccgaccccgcataa

SEQ ID NO: 354419 - DNA, 948 bp, Pseudomonas aeruginosa
atgacgcgaccattcgacctgatgcgccgcatgcgggccggcgtggcttccttgctgctgctcagcgccacgggtagctacgccttgaacaccaccgccatcgttgcctcggtggcctcgcccgattgcttggagtaccgggtggtaggtatctgctactggctctactgcacctggggaggatgcacggtgcgcacctctgtcaaggtgcgccactacatccccgatgcggtcgtctccagctacagcaacacgggcgagaacccgtgggtcgaagtccgggcgatgagtacggccaatccgtccgcccaagcggggggcgatggaacgacgaacgaggatcacgaaaacaatcttgcgaaattcaagaacgccgacgtgatcggccatcccggcgtcgaggtgttcaaccagtttgtttcgtcctcgggctacttctgcgagggcgcaggaacggcattcatgccgtatctgctcagcaccttggacacgcttgcctggcgctacaacgtgcccgagatggcctacccggaggcattgattcccggcatgcgcgaggtcggcgcacgcaccacgatgaacctttggggcaacgtgtatccccgcggcggcttcctgcaccagaccgacgaccacaaatcgggggccgtggtggcccagcgtgcgggagatatcgtcactcgccgggggcagttgcacgtgtaccagccgctgcttgccaacgcccgcgatggctactggcccgccggcgcgctgatggagggtgatgcctcgactggcaagtggcaggaactcacgcccgtcctgtcctcgtcttgcacggttttcccacgcaccggcttcctgacccaggcccagcaaggcgactacgcctgggcactgtggcggccgtatgcctgctgcgaacgccgtggacaggtgttccttggaagcgttgatttcctttga

SEQ ID NO: 354420 - DNA, 276 bp, Pseudomonas aeruginosa; identical to SEQ ID NO: 158952

SEQ ID NO: 354421 - DNA, 759 bp, Pseudomonas aeruginosa
atgctcatggagcacgcacctcgggtgttcgcatccttgcaacaggcgcgggactgcgtgaaggcagcaaaaaatggctttcatggacaactccgcgtcgccttgtcagacggcgcaacactactgtgcttaccagccctattggcgttgtgtcgcgaggaggagcccgaggttgagattcgcttttttgaggtgccactatcccaacaaatcaaaggattgcacgacgacctgtatgacgtcggctttgcacagtccgacgacgtaggtgatggaatcgtcgcacttcccgcgtggactgacacgcttatggtggcgctgccagctcggcatccgttgctggctcttaagcgaattccattggatgaactgctgcgctacccgctagtgctatctgatcctcaagtgtgcgagggccacgccaagcacattgagcgagtacttagccgggctgaaatgcagcctctagttgccgagcgggttaccactttcgacctgatgatggcgttggtatctgccggttttgcactcggacttacaggggctgcacacattgcagcctcccgagagccaggagtcgtggcgaggccgctttcgacacgcgtaccacctttgacgacctatctactcagacttgaaggcgatccgtttgacgagcttgcgcgcttcattcagcgagtacaggccatcgaattgccagagtttctcaggtcaacaaaaagccgaaatcccgatcttccggaggaattgatgccatga

SEQ ID NO: 354422 - DNA, 315 bp, Pseudomonas aeruginosa; identical to SEQ ID NO: 170289

SEQ ID NO: 354423 - DNA, 315 bp, Pseudomonas aeruginosa; identical to SEQ ID NO: 170288

SEQ ID NO: 354424 - DNA, 636 bp, Pseudomonas aeruginosa; identical to SEQ ID NO: 158955

SEQ ID NO: 354425 - DNA, 1167 bp, Pseudomonas aeruginosa; identical to SEQ ID NO: 265145

SEQ ID NO: 354426 - DNA, 3117 bp, Pseudomonas aeruginosa; identical to SEQ ID NO: 280994

SEQ ID NO: 354427 - DNA, 336 bp, Pseudomonas aeruginosa; identical to SEQ ID NO: 158958

SEQ ID NO: 354428 - DNA, 630 bp, Pseudomonas aeruginosa
atgaaaatatatatgaaacgccctatttcattaatccattttgtgctgctggcaggcctcacggcaaccttatctggctgtgcttcaaacggaatgactcgatcagggtttcttggtgattacgatgtattgggaaaaacgaagtacgaaaatgttctgctcttcaaggcgccaggctttgaacccagtcgttaccgggaaatattagtcgaggatgctcaggtagtgacggcaactggacgcataggtgggcttgaagctgagcaagtgcgagagcttctcgatcacgtcaacagtgaactgcgacatctccaaactaagtccgaagctcccgcatcgtcaggccgcatacgtgtgcgtgtggcaattacgaccattgagacgcccaatagagcagtcaacaccctaacgacgttgcttgttggaccagtgacaactgggggagctagtttggagtttgaggcagtagatgaacaaacagatcgtcgggtggctgctgctagctgcttcgagcacggcaacgctctcgcggatttcaaaggctcctacacactgctcgggcatgcaaagtctgcaatcaccacctgccttgaacggatcaatagcgcttggagaagtgctggctcgtga

SEQ ID NO: 354429 - DNA, 1311 bp, Pseudomonas aeruginosa
  misc_feature (89)..(89): n is a, c, g, or t
atgtctctcgccgagaacgaccaacgcatcaggccgtcggaggtcaaccaaccggtggttgtagcggtgacactgtcaggcgggggcgntcgggcggcggccttcggcctgggcgtgctgcgcgaactcaaggccacacgcttcgcgctagagggccaggagaccactctgttggatcaggtgttcctggtcagcggagtgtcggggggcagcatccttgccgcgcacttcgcggccttcggcgatgccacgctgactcgtttcgagccggattttctgcttgtgccttttgaggggcgactcatacgtgaagctctgtggcctgagcgtctttatagactaacttcaccttggtttgggcgcagccagatcctggctcaacgcttggacgaactttttgaaggccgcacctttggtgacgtgcgccgacgaccgggcgcgcccgaactgatgatcacggcaaccgacctcacgaccggtgcccctttcgatttcaccaccgagcaattccggctaatctgttccgacctcgatgcaacgccgctgtctttcgcggtggcggcctcgtcggcagtaccgctggtgctgtcgcccgtaacggtgcgaaacaacgccaatacctgtccgccgcctctccgatctttgcctgtcagagggcaaaattacagatcacgcatcctgcaaagcggcatagacagctacctcaatgcgcacgatcggccctatatccacctcgtggacggtggtgtctccgacaacctcggcgtacgtctgatgctagaccggctagtagcttcgggctcaatgagcgccaatttctcggaggtcaagcccggaagcttgcgccgactcgtgttggtgacggtgaactccgaacgaggactgagcgagagagtggacagtagcgaccgagttcccagcacgacgcaagtacttgagtcgctgatcttcggtgccggcgctcgcgagacccaggtgacgctggccatgcttaacgacgacctgcaacactggcgttccgagattgtccgcacccgtggccaagcggacagcccctttgcggccgacgcagaaatctacgtagtaagcgtaagtctgaacgacgtgccggacgacaagatccggcattcgctgctgcgcgtgcccacagccttcacgatcgaggctacggatgtcttggacctgcaaactgcgggaggcgaagcactgaggcaatccaaggagtttatggcattgattgaatctctaagaagaatcacagcagccaagcagactgcgcctggtactcagcttcccttgatatctaactga

SEQ ID NO: 354430 - DNA, 1023 bp, Pseudomonas aeruginosa
atgagcatgccgctgccgatgaagctccggacccggttgttcctcagcatttccgcgctgatcaccgtctcgctgttcggcctgctgctcgggctgttcagcgtgatgcagctcggccgcgcccaggaacaacggatgtcgcaccactacgcgaccatcgaggtgagccagcaactgcgccagttgctcggcgaccagttggtcatactgctccgcgaaacccccgacgggcaggccctggagcgctcgcaaaacgacttccgacgagtcctggaacagggccgggcgaataccgtcgacagcgccgagcaggccgccctggatggcgtccgcaacgcctacctgcaactgcaggcgcacaccccggccctgctcgaagcgcccatggccgacaacgacggcttcagcgaagccttcaatggcctgcgcctgcgcctgcaggacctgcagcaactggcgctggccggcatcagcgaagccgagaccagcgcccgccatcgtgcctacctggtcgccggcctgcttggcctggtgggcgtcgccatcctgctgatcggtttcgtcaccgcccacagcatcgcccggcgcttcggcgcgccgatcgaaaccctggcgcgggcggcggacaggatcggcgaaggcgatttcgacgtgaccctgccgatgaccaacgtcgccgaggtcggccagttgacccggcgtttcggcctgatggccgaggccctgcggcagtatcgcaagaccagcgtcgaagaggtgctttccggcgagcggcgcctgcaggcggtactcgacagcatcgacgacggcctggtgatcttcgacaaccagggacgcatcgaacacgccaacccggtcgcgatccgccagctgttcgtctccaacgacccccatggcaagcggatcgacgaaatactcagcgatgtcgatgtccaggaggcggtggaaaaggccctgctcggcgaagtccaggacgaggcgatgcccgacctggttgtcgttttcagaagacggctgcactga

SEQ ID NO: 354431 - DNA, 756 bp, Pseudomonas aeruginosa
gtgacgcacgcctggccgaactggccgccgccgtgggcctgcaactcgactggcaggacgccaacggacggccgcagcgggtcgacccggaggtccagcgcggcctgctggaagcactcggctatccggcgcagagtccgcaacagatcgaacagagcctggccgcgctggcccggctgcgcgaggacagcgccaacctcggactgctggtcggcgaatgcggccagccgctggagcaagcgctcggccccgccggcaccccgggcgaactggtctacgaggacggcacgcgggtcgccctgcgcctggacgccgaaggccgcctgccggcgcaggcccgcagcggctatgcgcagctgtcgctggagcagcgggaatgggcggtggcgatggcgccgccgagctgtccgtccctggccagcctcgccccgggtcgctcgcgtcgctgggggctggccgcccaggtctatgccctgcgccgccccggcgacggcggcctgggcgacagcgccgccctcgaggacctgctacgcagcgccgcgcggcatggcgccgacgcgctggcgatcagcccgctgcacgccctcgccgaggccaacggacatgcctacagcccctactcgccgtccagccggctgttcttcaatgtcctgcacgccgcgccggcgagcattctcggcgcggcggcggtggaacaggcgatccgtcgcgccggcctggccgcggagatggcccgcctggagagcctggagctga

SEQ ID NO: 354432 - DNA, 702 bp, Pseudomonas aeruginosa
atggtcgctgatggtcagccccttgaagccccactgctggcgcaacaggtcggtcagcagccagcggttggcggtggcgggcacgccgttgatggtgttcagcgagaccatcaccgcgccggcgccggcgtccaccgcggccttgtagggcggcaggtagtcctggaacatgcgcggcaggctcatgtccacggtgttgtagtcgcggccgccttcggccgcgccgtacagggcgaagtgcttgaccgccgccatgatgctgtccggggcggccaggttggagccctggtaggcacggaccatcacgccggacagcagcgaggtcaggtaggtatcttcgccgaagccttccgagacccgcccccagcgcgcgtcgcgggtgatgtcgaccatcggcgagaagctcatgtcgagcccgtcggcgctggcttcgagggcggagatccgcgcgctgcgggcgaccacctcggggtcccagctggcggcgaggccgaggctgatggggaagatggtgcggtggccgtgggccacatcgtaggcatggaacagcgggatcttcaggcggctatggcggacctgatcctgcatggcgcgaatgtccgggcgggtcacggtattgaagatggcgccgaccttgccggcgcggatgtccgccatcagcgcttccttgggatggtcggcgccgacgctgaccaggcgtag

SEQ ID NO: 354433 - DNA, 513 bp, Pseudomonas aeruginosa
  misc_feature (256)..(256): n is a, c, g, or t
ttgaaggcgcggcaggaagccgaggaggcgctgaaggagcgcctgcaaagtctcgagcgcctgatgacgcagctcctggaacccatcgccgagcaggacgccctgatcgagcagggcatggtcaacctggtcaaccacgttgcccgccaggtgatccagcgcgaactgcacatggactccagccatgtccgccaggtcctgcgcgaggctctgaagctgctgccgatgggcgcggcgaacatccgtatccatgtcnacccgcaggacttcgagcgggtcaaggcgctgcgcgagcgccacgaagagagctggcggattctcgaggacgattcgttgctgcccggcggctgccgcatcgagaccgagcacagtcgcatcgacgcgaccatcgagacgcgcctggcgcaggcagtgaagcaactgttcgagcaacagcgcgaacaggcgacccatccgctggccagcgacatccggatcgacctcgacgcccccggagacgtcgatgcgccttga

SEQ ID NO: 354434 - DNA, 249 bp, Pseudomonas aeruginosa
atgagcgactatcgagtttggtgccctgattacggccaggaagaagaagacgcgatgcacatccgcgattcgtacgaccatgccgccgcagcatgtgactgggccgagcaatatgagcggagaaatgctgactacaacatcgccgacggcgggtgcgtgacagtaatggtccgtcgcctcggaggggatgcgcaaaccttcgcggtatctggatatgcacggccaacctattccgcaaccgctatctag

SEQ ID NO: 354435 - DNA, 1230 bp, Pseudomonas aeruginosa
atggtcaaggccggcgacacggtcgaggccgaccagtcgctgatcaccctggaatccgacaaggccagcatggagatcccctcgccggcctccggcgtggtggaaagcgtctcgatcaaggtcggtgacgaagtcggcaccggcgacctgatcctcaagctgaaggtggaaggcgccgctccggcagccgaagagcaaccggcagccgctccggcccagtccgcggcgcccgccgccgagcagaagcccgccgcggcggcccctgcgccagccaaggccgataccccggctccggtcggcgcacccagccgcgacggcgccaaggtccacgccggcccggcggtgcgcatgctggcgcgcgagttcggcgtcgagctgagcgaagtgaaagccagcggtcccaagggtcgcatcctcaaggaagacgtccaggtcttcgtcaaggagcaactgcagcgcgccaagtccggcggtgccggcgccaccggcggagccggcatcccgccgatcccggaagtcgacttcagcaagttcggcgaagtggaagaagtggcgatgacccgcctgatgcaggtcggcgccgccaacctgcatcgcagctggctgaacgtgccgcacgtgacccagttcgaccagtcggacatcaccgacatggaagccttccgcgttgcccagaaggccgcggcggagaaggccggggtcaagctgaccgtactgccgatcctgctcaaggcctgcgcccacctgctcaaggagctgccggacttcaacagttcgctggcccccagcggcaaggcgctgatccgcaagaagtacgtacacatcggcttcgccgtggacactccggacggcctgctggtcccggtgatccgcgatgtcgaccggaagagcctcctgcaactggccgccgaggccgccgagctggccgacaaggcccgcaacaagaagctctcggccgatgccatgcagggcgcctgcttcaccatctccagtctcggccacatcggcggcaccggcttcacgccgatcgtcaacgcgccggaagtggcgatcctcggtgtgtccaaggcgaccatgcagccggtatgggacggcaaggccttccagccgcgcctgatgctgccgctgtcgctgtcctacgaccatcgcgtgatcaacggtgccgccgcggcgcgcttcaccaagcgcctgggcgagctgctggcggacatccgcaccctgctcctgtaa

SEQ ID NO: 354436 - DNA, 2700 bp, Pseudomonas aeruginosa
atgaaaagtcatcccgatgccgccagccgttcggcggccgaggttgtcacgcagctacccgtgccgtcgcggctcgggctgctgcgtttcgagcggctgaacgagccgagctgggcactgctgttcctcgatcctgcctgcgagcgccagctcgggctgccggcgactaccctctgcgcactgctcgatgcgccttacgccagcctgatggaacccgaggcccgccaccgcctgcacgagcagatccagcagcaactggtgaagcgcccgcactaccaggtgagctacaagctgcacacacccaacggcgtgctgaccatgctggagttcggcgaagccttccagcagcatggccgccagttgctgcacggctacctgatggtcgaggagcgagcggagagcgccgagcgcagcgaacagttgctcgacctggaatcgcagaacctgcgcctgaaggcgtccctggacctctaccagcgctcccaggacgaccacctgcaacacctgctgcgctcgcgcacccagcagaacctgatcgtccgcctggcccgccatcgctacctgtccagcgacccgctgctggaggccgcgcaactgatcacccaggccgcctgcgaagcctacggcaccgcgcgcgccggcatctggcgcctgctcgacgaccagcgcctggaagcggtgaccgtctaccgccgcgacctcgaccagtacgagaagccccaaagcatcgacgccagccgctaccccgcctacctcgaggcggtacacagcgggcgcgccatcgacgcccacaacgcccaacgcgacccacgcacccaggaactctacaaggactacctgaagccgctgggcgtcaacgccctgctcgacgccaccatccgcatcggcggcgaggtggtcggcgtgctgtgcctggaacacgccggcgagaaccgcatgtggcagagcgacgagatcgccttcgccggggaactcgccgaccagtacgcgcaggtcctgatgaaccacgagcgacgcaatgtctccagcgccctgcacctgttccagcgcgcggtggaacagagcgccagcgccttcctgctgatcgaccgcgacggcgtggtggaatacgtcaatccgagcttcacctcgatcacccagtacagcgccgacgaagtgcgtaaccgacgcctgtccgagcttccggcgctggagaacctcagcgagctgctgttcgacgcgcgttccgcgctgacccagcagaacagctggcagggcgagttccgcagccgccgcaagaaccacgagccttactggggccagttgtcgctgtcgaaggtctacgacgatctcggcgagctgacccactacatcggcatctacgaagacatcacgcagaacaagctggcccagcagcacatcgagaaactcgcctaccgcgacaacctcaccggcctggccaaccggcactatttcatcggcgccctcgaggaacgcctggaaagcagcggcgaccgcccgctcagcctgctgctggtggacatcgacaacttcaagcggatcaatgacagcctcggccaccagaccggcgacaagctgctggtcagcctggcccggcgcttgcgcagttgcctcggcgacggcgccaccctggcgcgcttcgccagcaacgagttcgccgtgctgctcgacgacaccgcggtggaaaagggcgaaagcatcgccgcgcaggtcctgcacatgctcgacaagccgctgttcgtcgacaaccagttgatcaacatcaccggctccatcggcctggccagcgccccgcagcacggctgcgacccgcagaccctgatgaagtacgccggcctggcgctgcacaaggccaaggccaacggcaagcaccaggtccaggtgttcaccgaggcgctgaccgccgaggccagctacaagctgttcgtcgagagcaacctgcgccgcgccctggcgcagaacgaactggcggtgcactaccagcccaagctgtgcctgcgcagcggccagttgctcggcctggaagccctgctgcgctggcagcatccggaaaaaggcatgatccgcccggaccgcttcatcagcgtggccgaggaaaccgggctgatcgtgccgatcggcaagtgggtgatccgcgaagcctgtcgccaggcccgcgagctggccgaggccgggctgggcgagctgcagatcgccatcaacctgtcgcccaagcagttcaccgacccggacctggtcggctcgatcgcggcgatcctccacgaagagaacatcccggccagccagctggaactggagctcaccgaaagcctgttgctggacgccaccgacgatacccgccagcaactcgaacgcctgaagagcctcggcctgaccctggcgatggacgacttcggcaccggctactcgtcactgagctacctgaagaaattccccatcgacgtgatcaagatcgaccgcagcttcatcaaggacatcccggacagccaggacgacatggaaatcacctcggcggtgatcgccatggcccacaacctcaagctcaaggtagtcgccgaaggcgtggagagcgccgagcaactggccttcctccggcgcaaccgctgcgacatcggccagggctacctgttcgaccggccgatccccagcgacctgctcaataccagcctgctgcgctatccatgccgcaccctgcactga

SEQ ID NO: 354437 - DNA, 543 bp, Pseudomonas aeruginosa
atggcaactgttacgcacgtcctgtccggcgccggggagccgctcgatccgccccccagcatcggcgctcactacgtgaacacgaacaacggcgcgctatacatggcgaagggcaccgcgagcggtgccgattgggtgaagctgggtagtggcggtggcgctccgaccgaagtgcttcgcatcactggtgcgggcgacttttcgcttgggccgcagcacgctgttgtcgaggcgcctctgaataacattcctgagaacgagatcggggctgtcgatatcgatccagcctcttctcggcagtttgatttgcacgtcaaggggaccgcagattcggtgtttttcgtcagtaccgctggtggcgccgacttgccgggtgggacgttcatcgtcgggatgcagaggaattgggcttcaacccgagagtatggattccaaatccgaggtgtggacctggctggcgaggcctgggcgcgggtgtattacgacgcaggcgccggaacgatgaccatgcttgtgctcgctgacgtgccattaccggcataa

SEQ ID NO: 354438 - DNA, 879 bp, Pseudomonas aeruginosa
atggatggacaggcggatcgcgcgggggaactggtcggccagcagcgcgccccaggcccagctgcgctggatcaccccgtaggcgcgctccttggcgtcgcgttgcagggcagtcttcgagccctggtagtcgggggtcaggccgtcctcgtagaggaaacgggtgatggcgcggtacagcagcaggccttcttcgctggccagcagggtctcgcggatgctttccagcggctcggcgtagccgtcgatcagcaactggcggagctgctcgtggttgtcgcgctgggcctcgaaggcgcgtacgtcctccaggttgaacacgccgatatgggtggcgccgatctcctcgatcatcaggcgcaaggcatcctggtaggcgctgatgtgcgcatcgccgatcctcaccaggtcgccgaacacccggccgtcggagcagacggtgatcttcgcgcccggtgcatagaacagctggatgcgctggcacaggtggttgaggaacgacagcgacaggcgctcggccatgtccggacggctgtcgagaaccttgccggggttcggcgacttggccggaaacgccggcaggacgaattcgatgggctcgccggcttcgatgaaggcggcgatgcgcggcaactggacctgttcgatgcggcggatctcgtccgcttcgctggcgctctggcgatgctcggggtaacggcggcgatagagcaacagttctttcaatacgcgtgcgggaagggtgtcttcggcgatggcgtacatgcaggtgtttcctccttgtgggcggatgccggcggggccggcagcggaaggcgacatcctgtggactcgccgccgggggataaaccggggaaggccggaaacactgttcgctga

SEQ ID NO: 354439 - DNA, 333 bp, Pseudomonas aeruginosa
atgcagatgcacagcgtcgacgtggtactggtcatggccctggtgctccagcaccacggtacggccgacgctgttcgccgcgccgccggtcagcttcgcgacagagtatgtgccgagcaccggcccaagatgaccgcactcatgcgtatgcaagatgacgcggcggcgctgcaggtggcgctcaacatcgtccagcgcgccaccggcgccctgggcatcctggcgggaaagccgtatccggccagaccttcgcccagcgaaagcccaccggatcaagggcacatgcccgccaaggctggtcccgtcaccggtgagccagtgcatcctacctga

SEQ ID NO: 354440 - DNA, 975 bp, Pseudomonas aeruginosa
atggaaggatgcgcgcaatgcatcgtgtcgtcgggccacctcgcgccaggctgcctcgaagcgcggcatatcgatgtcgctgtcgatgacatagcgatcctgcatgaaatagatgccagagttcggctccatcagggtgtgcagcagcaaaccttcctgcatcggagtcagtggatagatgtcttcgatttccccataaggcagggacagcgcatcgagttgcgcctgatccaatccggcaagagggaagtcggacggcgtcactcctccggaagcaggatcgcaacaatgctcgatcaatccgttcagatcggccgcgaaggcgtcgacgagctcctgcaccgtctcgtcggagaacatatcggggctgaaggtccaagtcaggccgagttgcccctgatagacctgcccttcgacagagagccagtttgcaagcggcgcacgttcgtcctgtgcactgccggaacgctccgcggctggcacccacagggcctcgtcggcgaactgatggtcgaactggccgagataattgaaggttatgcgtggttgcggcgaccgagccagaacttcaccgcaagcagggtctgccaggtagcgcaacaggccatagccgatccctcggtcgggaatcgaacgcagctgttccttgacgctcttgatcgcggcgccaggctcgacagccggatgcaggtgcaccggatagagactggtgaaccaaccaacggtgcggctcagatccagctcgccccccaattcctcgcgcccgtgtccctccagttgcaaaagcagactttcgtgaccgctccagttacaaaccacacgtgccagggcggtcagcagcaagtcgatgacctgggtgcgataggctgccggggcctcctggagcagacgtcgggtagcctcggcatcgagggtcagggccagcttgcgggcgtggcggttctccaaaggagcatgaggattctggcaaggtag

SEQ ID NO: 354441 - DNA, 588 bp, Pseudomonas aeruginosa
atgcgccagggcgcgggcgatggcgacccgctggcgctggccgaccgacagcgccgccggtttcttgtccagctggtcgccgatttccagccgctcggccagcgcctgcacgcgctcggcggacggggcgccgagcaacgcgcagggcaggccgatgttgcgccgcacatcgaggaactcgagcaacccgccgctttgcagcacgtagccgcagtgctgccggcgcagcgccgccaagcggtcctggcggccgtcgcgccagagcgcggcgatgtcctgcgggcgttccccggcgaggaattcgaagcgcccgcccgggtccggcgccagggccagcgccagcaggtcgagcagggtgctcttgccgcagccgctggggccgacgatggccagctggcgacccgcgcgcaattccagcgccggcacccgcaggcggtagcgctggcgaccggcgccgtggctgcgggcgacctcgtgcaggcgcaggatcatggcagcgtcgacagcggcacgcggtacagcgcgtcgccggcgtcggcgtcgccgaaccggacccagttggcgacgtcgttgtggaaggtttcgtag

SEQ ID NO: 354442 - DNA, 648 bp, Pseudomonas aeruginosa
gtgaccgcggagcgcacccgcctggtgttcgtggagggccagcgcgaggcctcgttgctgctggtcaaccagaatccctacccggtgctggtgcaggcgtgggtcgatgacggcgccctcgacggcgaaccggataccgcgctggctccgttcctgccgctgccgcccgtattccgcctggagccgggacgccagcgcagcctgcgcctgctggctaccggccaggcccaggcacgggatcgcgaatcgctgtactggctgaacatctacgagatccccccgcaagccaccgccgaggccgctggccggccccggctcacggtcaccctgcgaacccagatgaaggtgctgtaccgcccgcacggcctgcatccgcacgccgaggacgcggccgccgaactgggcttcgcgctgcgcgacgagaccctgcgggtggacaacccgacgccgtacttcgtgtccctggcggggctggcgctggagataggggagacgcgcctggatctgcccggaacgctgctggctccgcgctcgcaacgacgcctcggcctgccgcggcgggtggacggcgggacgcgcggcgaggtggcgttcgactggatcgacgacaacggcgtcagccgccaggaaaggaaagctctacagtga

SEQ ID NO: 354443 - DNA, 813 bp, Pseudomonas aeruginosa
atggccaaggttaccgtcgcctgttgccagatcgctccgcggatcggcgcacaggagcacaacctgcgcctggccgagcgggcgatccgcgaggccgcacggcgcggcgccaacgtcgtggtgctgcccgagctggccgccagcggctacgttttcgccgatcgcggcgaagccctggccctggcggaaacccgcgacggaccgagcctggggttgtggaaagcgctggcaggcgaactcgacctggtcatcgtcggcggcttctgcgaacgcctcgacccgcagcgagtggcgaacagcgcggcgctggtggacgccgacggcgtgcgggcgatctatcgcaaggcccacttgtggaacgaggaaggcggcatcttcgaggccggcgagcagccaccgccggtggtcgctacccgcttcgggcgaatcgcggtgatggtctgctacgacctggagtttcccgaatgggtgcgcctgccggcgctgtccggcgcgcaactgctctgcgcgccggtgaactggccggcggcgccgcgtcccgagggcgagcggccggcggaagtggtcagggtgcaggccaatgcctcggtcaaccgcctgttcatcgccgcctgcgaccgctgcgggcaggaacgcggggttgactgggtgggcggctcggttatcgtcgacgccgacggctacccgctggacgggccgctgcagggcgaggcgggtatgctgctggcccgtctcgaccttgccgaggccgacgagaaacgcatcagtgcgcacaaccacgtgcaccgcgaccggcgacccgagctgtattga

SEQ ID NO: 354444 - DNA, 696 bp, Pseudomonas aeruginosa
atgtgtataagagacagcttccagcagcgcgcggagcaggacgcggaacatcaggtcgccgagatagggcagcggctcgcgccgtgcggtcagcccggcgtattcctggcgctggcgggcctgggcgtcggccgggtcgaggtcgaaggcgcggctcaggtagtcgctgcgcagggcgaggaactcgggcaacggcaggttcggcaccggtcccatggtcagcgggtcggcgaacatccggaagccgccgcgaaagccggcgagcttcaggccgtgggcgatgtcgttgccgcagcgcaggtgcagggtcgcggcctcatcgccgccgaccagatcggggtggcggctggcgaaggcgatggcgtcgacatgcgccttgagtcgcggccaactggcgaagcccagttcgcgcgccacctgccactgggcgtcggccaggcgcggcgcctgccccggaagccctgtacggctggccgggtcgcggcgccactggcgcaacagctccttggcgcgcttgcgttgctgttcgagattgatccggccgtcgccgagaatgcgggaaaaggacatacgatctcctctgcagccttgtccgccatcaggcctggagtcgcatgcgcgatgcgtggggtggatcgcctgggcgctgccctttccgcggacgggaggcgtggagaacgccgaggccgactatag

SEQ ID NO: 354445 - DNA, 1443 bp, Pseudomonas aeruginosa
atgcccagcaccgtctcgtcgtcgcggctcggcctcgccgggctctgcatcctgctggcggggcaactgttgccgatgatcgatttctccatcgtcaacgtcgccctcgacgccctcgcccattccctcggcgccagcgaaaccgaactggaactgatcgtcgccgtctacggcgtggccttcgccgtgtgcctggcgatgggcggccggcttggcgacaactacggccgtcgccgcctgttcgatctcggcgtcgccctgttcgccgtcgcctcgttgctttgcgggctggccggttcggtctggctgctgctggtggcgcgcgccctgcagggcgtcggcgcggcgctgatcgtgccgcagattctcgccaccctgcatgtcagcctcagcggccacgcgcattcccgcgcgctggccgcctacggcgccatcggcggcctggccttcgtcgtcggccaggtgctcggcggcttcctggtctccgccgacatcggcggcctcggctggcgcagcgtgttcctgatcaacctgccgatctgcctcggcattctcctttgcagccgccgctgggtaccggagacccgcgccgagcatgccgcccgcgtcgacgcgccgggcaccctgctgctcgccgcgctgatcctctgcctgctgctgccgctggctctcggcccatcgctgcactggtcctggccctgcgccctgctgttggcggcggcggtgccgctgctggcctggctgtggcgcaccgagttgcgccaggaacgccgccaggcctggccgttgctgccgccgtcgctgctgcgcctgccgagcatccgcttcggcctgttgctggcgatcctgttcttcgcctgctggagcggcttcatgttcgccctcgccctggccctgcaggccggcgccggtctctcgccggtacaggccggcaatgccttcatcgccctcggcgcctcctacttcgtctcggcgctgctcaccgcccgggtggcggcgcggatcggcccggtacgcctgctgctgctcggctgcgtcatccagatgtgcggcctgctcggcctgatgctgaccctgcaacgggtctggccgcagccgggcatcctcaacctggcgccggcgaccctggtgatcggcttcggccaggcgttcatcgtcagcagcttcttccgcatcggcctctcggaggtgccggccgcccaggccggcgccggcagcgccatgctcgccaccgtccagcaggcctccctcggcctcggctcggcgctgctcggcgcggtgttcgcgcacaggctggagcgccatggcgactacctggaagcgacgcagacgaccctggccgtcgagttcgtcctgatgacgctgctgctcggcgccacctgcctcttctacctgcgccgcgtgcgcacggtgccattgcgctgcgactcgccgggcaactga

SEQ ID NO: 354446 - DNA, 1197 bp, Pseudomonas aeruginosa
atgaccgaaaccacccagccccagcctcgtctgcgtccgttcgccgactcctctcccgccgccgtggtggccggcttcgtcgccatgctcaccggctacaccagctcgctggtactgatgttccaggccgggcagaacgccggtctcagcagcgcgcagatttcctcgtggatctgggccctgtcgatcggcatgggcctggcgaccatcggcctgaccctgcgctaccgggtgccgatcgtgatcgcctggtccacccccggcgcggcgctgctgatcagcagcctgcccggagtgccgtacagcgaggcgatcggcgccttcatcgtctgcgccctcctgatcaccctgtgcggcgtcaccggcagcttcgaacgcctgatgcgccaggttccctcctcgctggcctcggcgctgctggccggggtgctgttccgcatcggcatcgagatctgcaacgccgccgagcaacagaccctgctggtgctggcgatgttcttcagctatctgctgtgcaaacgcttctcgccgcgctatgcggtgttcgctgcgctactggtgggggtgctgctggccgggatactgggccaactggacttcagcaggttccgcctggaactggcggtaccggagtggaccacgccgagcttctccctggccgccaccatcagcatcggcatcccgctgttcatcgtcgccatggcttcgcagaacatgcccggcatcgccgtgctgcgcgccgacggctaccaggtgccggcctcgccgctgatctcgagtaccggcatcgcctcgatcctgctggcaccgttcggctcccacgggatcaacctggcggcgatcagcgcggcgatctgcaccggtccctcggcccacgaggacccgcacaagcgctataccgcggcgctctggtgcggcttcttcaactgcgtcgcaggaaccttcggcgccaccctggcagcgttgttcgcggcgttccccaaggcactggtactgtccatcgccgccatcgccctgctcggctcgatcatgaacggcctggccaactcgatggccgacgagcgccagcgcgaggccgcgctggtgaccttcatggtcaccgcctccggctttaccctgctgtccatcggctcggcgttctggggcctggtggccggcctgctgactcagttcgtgctcaactggcggcgcggctga

SEQ ID NO: 354447 - DNA, 1152 bp, Pseudomonas aeruginosa
atgctcggcatggatcagcatcgacatcaccaccggcgcggcgctcaggtgggtcaccgcatgctcggcaatggcggcgtggatcgcatctggctggaccttgcgcaggcatacgtgcgtgccaccggacagcgtcaccgcccaggtatggctccagccgttgcagtggaacatcggcaaggtccacaggtagacgctgcgcggccccaactggaagatcagcgcgccggcgcaggcgttgaggtaggcgccgcggtgatgcaggaccacgcccttgggatcccccgtggtgccggaggtgtagttgatggcgatcgactgccattcgttctgcggcgcactcagcggccgccccgggtcgccctgggccagaaacgcctcatagtccaggtcgtgggcgaggtcggctcgctcggcctgatcatcgtcgatgcccaccagcaagggcggcgcatcgagcatggccagcgcctgctgggccacggcaccgaactcacggtcgcagatcagcaccctggccgcgcagtggcgcaggatgaaggcgatgctgcgtgcctccaggcgaatgttgatgcataccagcaccgccccggcaccgggtacgccatagtgggcctcgagcatttccgggatattcggcgccagtatcgccacccgctcgcccgcttgtacgccgacccgctccagggcactggccagggcgcaactgcgctcgtgcaactggcggtagctgtagcgccttgcgccatagaccaccgcatcgcgctgcgggtacacctgcgcggcacgcttgaggaacgacagcggcgacagcgggacatggttggcttcgttgggagcaagctcgtgctcgagggtcggaaccatcatggcagccacctcatcgacacattgctcgggtcttgcacgcacatacatacctcctgttcttgttgttattgcgccagggcgcgttacaggctgctgcacaggtggccgccatcgaccacgatctcggcgccgctcatggcccgcccggcatcgctggcgagcagcagcaaggcgccgtccaggtccgccggcacgctgaagcggcggctggggatacgcgagcgcaacttgtcgccggcctcgctggccaggaaggcctcgttcaggtcggtcatcacgtag

SEQ ID NO: 354448 - DNA, 432 bp, Pseudomonas aeruginosa
atgcacaacggcagcagcgcgagcatgcccatcgcatcgcccacgtaccagcgcgcccacatttccgggaaacgccccatgccgaagacgctgaccagcaccgcgcccaccgaggcgccgagcaagggcggaatcagcgcgccggcccagagcacgcgaaccgccgaatgcaggttgaattcgaagtcctcgcgcacccggttgatgcgtaacagcatcgcggcgaagatcgcttcgctcaggttggccggcaggaacgccgcgctcatccacaggctgtcgccatacaggcagttggccgccaggttggccacggcggagcagagcaggatcgctggccactggcgcagcggcgcgcgcagcagggcggcggtgaggatcgcgttgggcagccagatcgcagcgatggtggcgggctggcgcgacaggtag

SEQ ID NO: 354449 - DNA, 837 bp, Pseudomonas aeruginosa
atgcacagatatgtcgtgatagacgccttcgccagcgaaccgctgcaaggcaacccggtggcggtgttcttcgactgcgacgacctcagcggcgagcgcatgcagcgcatggcgcgggagatgaacctgtcggagagcaccttcgtgctccgcccgcaacaggacggtgacgcgcgcatccgcatcttcaccccggtcaacgaactgccgttcgccggccacccgctgctgggcaccgccatcgccctgggcgccgagaccgacaaggacaggctgttcctggagaccaggatgggcaccgtgcccttcgccctggaacgccaggacggcaaggtggtggcctgcagcatgcagcagccgatccccacctgggagcacttcagccgcccggccgagctgctcgccgccctcggcctgaagggctcgacctttcccatcgaggtctaccgcaacggcccgcgccacgtgttcgtcggcctggagagcgtcgccgcgctgtccgcgctgcaccccgaccaccgcgcgctgtgcgacttcccggacctggcggtgaactgcttcgccggcgccgggcggcactggcgcagccgcatgttctcgccggcctacggcgtggtcgaggacgccgccaccggttccgccgccgggccgctggcgatccacctggcgcgccaccggcagattccctacgggcagcagatcgagatcctccagggcgtcgagatcggccggccgtcgcgcatgtacgcccgcgccgagggcgccggcgagcgggtctcggcggtggaagtgtcgggcaacggcgcggccttcgccgaaggccgcgcctacctgtga

SEQ ID NO: 354450 - DNA, 813 bp, Pseudomonas aeruginosa
atggcgttcgcccggtcgcaggctgaccaggttgaacaccagcacggcgaaggccaccccgagcaccgtcgacagggcgttgttgaggaagtgcgcgaggtcgtaactcatgctgttgctcggcgcgacgttcttcacgaagaagatgcagaacggcgaggcgatcccggccaggctcgtccggttcacgcacagcgcggcgaagaacagcggtacgcccaggcccaggcagagcagcgggaagccgtccacgccgggcaggtagaacagtgcgacgaagccggccagcgggatcgacaggaggatcccgcgaaggaagttcaggccggcctgggccgggttgtcgcggctggcgaagagactcagcaccaccccggtgatcgacaccgcgcccaacccgctcggccaggcgctggccagccagaacgcggccacgcagaggaacgccagggcgctgcgcaggccgaacagcacgccgcgctcgatgtcccggtgccaggcgatggcgcccggcgcctggcgggtgggcgcgccatagaccagcgcctcgacgctgcgcccggccgccctcgcctcgccgagcaggcgttcgaggcagaccaggcacaggtgcaactgtccatgcgccgcgtccagcgccaggcgcaagcgctgccggcaggcctcgaactcggcctggcggccctcgcgcaacagtgcctcgagttcttccagccagggctgcaaggcgtgcgcgctggccggatcgagcagcctccgctcgcgagccaccttgcgcgccgcgcgcagcaggccgagcaggtcgaggcctag

SEQ ID NO: 354451 - DNA, 1014 bp, Pseudomonas aeruginosa
atggccaccgccgaacgggtcgccgcggcgatcctccgcgcggccgagcgcaccggcatgccggcgggcgtgttcaacatgatctacggcggcggagtaggggagcggctggtacgccaccccgcgatccaggcggtcggcttcaccggttcgctgaagggcggccgcgccctctgcgacatggcggccgcccgggcgcagccgatcccggtgttcgccgagatgagcagcatcaacccggtggtgctgctgccggcggcgctgaagaagcgcggcgaggccgtggccgacgaactgagtgcctcggtggtgctcggctgcggccagttctgtaccaatcccgggctggccatcggcatccgctctgcgcaattctcggcgttcctcgaacgcttcgccgcccgcatggacgaccagccggcgcagaccatgctcaacgccggcacgctggccagctatgaaaaaggcctggcggcgctgcacgcccacccgcgcgtccgccatctcgccgggcaaccgcaggagggccgccaggcccggccgcaactgttccaggcggacgtcagcctgctgctggagggcgacgagttgctgcaggaagaagtcttcggcccggccagcgtggtcgtcgaggtcgccgaccacgccgaactgaagcgagcgctgcatgggctgcacgggcagctcaccgcgaccctgatcgccgaagcggaagacctggcgtccttcgccgacctggtaccgctcctggaacagaaggcaggacgcctgctgctcaacggctacccgaccggcgtggaagtctgcgacgcgatggtccacggcggcccgtacccggccacttcggacgcccgcggcacctcggtgggcaccctggccgtcgaccgtttcctgcgcccggtgtgctaccagaactacccggacgcgtggctgccggaagcgctgaaggatggcaacccattggggattgcgcggttggtggacggggttgggacgcgggcggcgattgactga

SEQ ID NO: 354452 - DNA, 1686 bp, Pseudomonas aeruginosa
gtggagaaattccccctcgccgccgccgacctgcgccgcgccctggcgctatggccggaactggcgccctggagcgaggccctgctgggccagtaccttgccgtgcacccgggcttccagcgcctggcgttcgcgggcggaagggtcggcctgaccctgctgctgggcgatgccctggagtgcctgccgcagctcgacgcgcgggtcgacgcctggttcctcgatggcttcgccccggcgaagaacccggacatgtggtcgcccgtactgttcgccgaactggcgcgactgtcggcgccgcaggcgaccctgggcactttcaccagcgccggtttcgttcgccgagggctgatcgaggccggtttcgccatgcaacgggtaccgggctacggacagaagcgcgagatgctcagcggcacctaccaggggccgccggcgaacgccggcaagccctggtacgcacgccccgcgccccacgccgggcgccgcgcggcactggtggtcggcggcggcctggccggctgcgccagcgccgccagcctcgccgcgcgcggctggcaggtgaccctgatcgaacgccatcccggcctcgcccgggaagcctcgggcaacccccagggcgtgctctacctgaaactctcggcccacggcacgccgctgtcgcgcctggtgctcagcggcttcggccatacccgccggctgctcgaacgcctgcggcgcggccacgactgggacgcctgcggcgtactgcaactggccttcgacgccaaggaagcgcaacgccaggcgcaactggccgcagccttccccgccgacctgctgcacggcctggagcgcgagcaggccgagcgcctcgccggcgtcgccctgcccgccggcggcctgttctatcccgaagccggctgggtccatccgcccgcgctgtgccaggccctggccgccacccccgggatcaccctgctgagcggccgggcagtacgcttgcgccgcgagggcgacgactggtgcgcctacgccggcgacgaatgcctggcccgcgcgccactcgcgatcctcgccaccgccgccgacatccgcgacttcccgcccgccgccgagctgccgctgaagcgcattcgcgggcaggtcacccgcctgccggccaccccgcaaagccgggcgctgcgcaccgtggtctgcgccgagggctacgtcgcaccgccgcgtggcgacgaacacaccctcggcgccagcttcgacttcaagagcgaagacctggcgccgaccctcgccgaacaccagggcaacctcgaactgctgcgggaaatatctcccgacctgctgcagcgcctgggcgccgacgacctgccgctggagcgcctggaaggccgcgcggcattccgctgcaccagccccgactacctgcccctggtaggcccgctggccgagcgcgcggccttcgacgaggcctacgcggtgctcgcccgcgacgcccgccaggtgccggagcgtgcctgcccctggctgccaggcctgtacctgaacagcggccacggctcgcgcgggctgatcagcgcgccgctgtccggcgaactgctggcggcgtggatctgcggcgagccgctgccgctgccgcgcgcggtggccgaggcctgccacccgaaccgcttcctgctgcgcgacctggtgcgcgggcagcgcggctga

SEQ ID NO: 354453 - DNA, 609 bp, Pseudomonas aeruginosa
atgaaacacgaaatactcgagaagaacgtcggcctgctggcgctatgcatggccgtggccgtgagcatcggcggcctgacccagatcgtgccgctgttcttccaggacgtgaccaacaccccggtcgaaggcatgaagccctataccgcgctgcaactggaaggccgcgacatctatatccgcgaaggctgcgtcggctgccactcgcagatgatccgtccgttccgcgccgaaaccgaacgctacggccactactcggtggccggcgagagcgtctgggaccaccccttcctgtggggttccaagcgtaccggtccagacctggcccgcgtcggtagccgctactccgacgactggcaccgcgcacacctgttcaatccgcgcaacgtggtgcccgagtcgaagatgccggcctacccgtggctggtggagaacaagctcgacggcaaggacatcgagaagaagctcgaagtgatgcgcaccctcggcgtgccctataccgacgaagacatcaagggcgccaaggactcgctgaaaggcaagaccgaaatggatgccgtggtcgcctacctgcaggtgctcggcacctcgatcaagaacaaacggtga

SEQ ID NO: 354454 - DNA, 4788 bp, Pseudomonas aeruginosa
atgccgtcccgttcgccgtcgtccgcccgttcctcccgcgcgctttacgcgccgcgcctgaagccgctggcccaggccatcgccctgctgctggtcgcagggggcgcccaggccgccgggcagccgttcagcgccacctggttcgccgccaagggcgcggctcagggcggcgctgccggggcgccgcgaccgggagcgcagttgccgggggcgccgccgccgctggcgcagcagcagcgggtcaaccagcagttgcagcgttcgatggccaacctgaacaacaccgtcgccgccattgccgcccagcaggccgcccaggccgccggacgccaggcggcgctgaacctcccgcaggatgttccggacgggctcggcgagggcggcctcaaggtcgacgcctcgctgccgttcgagcaggcctggcagaacgccaagggaccggtgcagacccaggccgccggcaagaccacggtgagcatcgagcagaccgccgacaaggcggtgctcaactgggaaaccttcaacgtcggccgcaacaccaccgtggacttccagcagaacgccgactgggcgctgctcaaccgggtcaacgaccccagcgcgcggcccagccagatccaggggcagatcaaggccgacggcacggtgatgctggtcaaccgcaacggcgtggtgttttccggcagcagccaggtggacgtgcgcaacctgacggtggcggcggcgaacatctcggacgaacagttccgtcagcgcggcctctactacgacaacgccggcagccgtccgaccttcaccgacgcggccggcgccgtgcgcgtggagcagggggcacagttgcgtacggcagcgccgtccggctcgaccaggggcggcggctacgtcctgctgctcggcagcgaggtagacaacgccggcagcatcgtcacaccgaaggggcagacggtcctgtccgccggcgacagcttcgtcatccgccgtggccagggcaccgacggcaacctgacctccaccacccgcggtaacgaggtgctgccgggcttcgccgccgacagcagtgccggccgggtgcgcaacagcggcctggtgcaggccgccaccggcgatatcagcctcagcggccgcgaggtggagcaggccggcgtattgctttccagcagttcggtggacagccgcggcaccctgcacctgaaggccagcgagcggatcaccctggccgaaggtgccaccagcgccatcctggtggatagcagcggcagcgccgccctcgacagccagcgcgaggccttgctcaagccgttgaacggctccagtgccgccgtcagtcggggcgacgacgaccgccgcgacctgtcgcgggtggagatcgactccgccggcagcgtcgatttccgcgacggctccatcaccctcgccagcggtggccaggtggcggtcaacgctggccagcgcgcgctgctgcgcgacggcgcggtgatcgatgtctccggcgcgcaaggcgtgcaggtggcgatggagaccaacaacatcaaggtcaacgtgcgcggcaacgagcagcgcgacgcctcggtcaaccgcgagggcggcggtctgaacagccaggacgtgtgggtcgacgtgcgcgacctggtacgggtgcctgccggcaccaacggctatgccagcgaccgctggtacaccgctggcggcctgctggaggtcggtggctacctgggcacccagggccactcggcgggcgagtggatggcccagggcggcatcgtcagtttcaccggcaacgacgtggtgacccaggccggttcacagatcaacctgtccggcggaaccctcgatgtgcagggcggctacatccgccagacctggctgaagggctcggacggacgcctctacgaactcggctcggcgccgggtgacctgctctacgacggcatctaccgcggctacgaggcacacagcgagcgctgggaccagacccgttatttctacaatccgctgatcgcgccgacccagcgctacgagaacggctacagcgttggccgcgacgccggcagtctggtgatcggcagcgccaatgcgcggctcgacggccaggtggtcggcgatacctatcgcggcgagcggcagaccgaagcgccacaggccggcctggacggctacaaccagtcgcagaatgccgtggcgcgcggcgcgcagctggtcgtcgggcgctacaccccctactacgtgaagagcagcggcctgctggagtacgctctcggcgccgatgccggcagcctcaagcaggtggtcatcggtaccggcgaggtggcggccgaggagccgcccctggacgctccggtggccgccgagcgccagggccgcctgagcctggacagcgaactgctcaacggcttccagctgggcggcctgaaggtggcggccggcgagagcatccgcgtcgacagcgcgctgaccctggccaatggcggcgaggcgatcctgttcgccaacgacgtggcgatcgacgccgacatcaccgctcatggcggcagcctgcaggccggcaacgtactggcgcagatttccccgaacgggacgatcgatggtttcgtcgatgccggccgcgaagccggcatcttgcgcgtgggcgatggtgtacgactggatgccagcggcttgtggagcaacctgctgctggcgccggaggacaacgatacgttggcctaccgcgacggcggacggatttccctgcgcagcggcggcgacctgagcctgggacagggcagtctgctcgacgtgtcgtccggggcggcgctgctggccgacggcaagcgactgggcggacgcggcggcgacatcgccttgcatgccagtgccgggctggcgcaggccagcgatggccaattgcagttgggcggcacattgaatggtctcggcacgagtggcgccggcacgctgtcgctgcagagcggcaaggtgcggatcggcggcgacgacctcggggatggcagcctgcaactggccgaagatttcttccagcagggcttcgccagctaccgggtggtcggtcgctccggattgacggtagccgaggatgcccaggtgcgggtcgcgcggccggtctaccgtttcgccagcggggccggcgaggtcgcggctggcgaggcgccgcgagaggcgctggaggcctggataccgccgctgtacctagaggatgccttggccggacgcttggtccaacgcgaaggggcggacctgtacctgcagacaggcggcgacggcaatatcctcgggcagctcgatcccgccagccagacgctggagctggggcgcggttcgctggtcgaggtcgatccggggcgcgccatcgtcctgcgcggtcccggacagatcaccttggatggcattctgaacgcttggggcggacgcatcgacgtgcgccagcagcagttcggcgcgctcgacgttacccaggacaatcagcccaaggcgcaaggccagccccatgctcgctccatctggattggagagcaggcattgctggatgttgccggccgcgctgtcactgccttggatgggcgcggtcgccgctatggagaagtgcagtccggcggcagcatcgtcatcggcggcgagatcgatccgggcaaggcgatcgcgacctcggcggatgcgttcgtcatcgtacgccccggtgcacgactggaggcctccggcagccaggcacagctggatgtaccgggactgggaagggttttgctggccggcgacggcgggcgcatcgctctcagttcctacaatgggctgtatctagacggctcgttgcgcgccgcagccggcggctcgggagcggcgggcggcagcctggagatcattgcggacgctcccctgtaccaaggttttactgtcgtggatgaccgggtattggccatgcgtgagctgatcctgacggcagggcacgccgattcgggattaccgaccttgctgcaaccgggaatggacgattcggctctgcgctatggccagagccgagttgggactcagtcgctgacgggcggcggattcgaccaactttcgttgttcagcaacggtccgctgtcgttcgaggggaacatcgatcttgcgatggggcgcagcctgaatctgtacgcggggacgatagccgccacaggtggtgggccgagcgaggtgaagttgcaggcgccctatgtccgcctttccggcatcgggatgtatgggcagcaggcctctggcgagtttcgtccgcgtctcacgtacgggccgaccgcgacagcggagcaggttcgcttgcaggtttctgccgggcgcctgctggatatcgccgggcgcttgtcattcggtagcgacggggtgatcaatggggtcaacgcagaggctgtccgctatcagcgaccaggtttcgagaaggtaacgctgcgcagcgagggcgacctgcgtttcgctggcgactatccagagaatggcgatccgtcggggcgcttgataacccacggcgatctgcaactgactgcggcccaactctatccggtgacgggagcgagttcgaccctctatgccgggtatggactggatgaggggggcaggctgtcttcgatgccgaacggcatttggctatcgaacgtagcggcgagtccttgccggacactccgctgtcggtattcggcagtctggcgttcatggcatcgaatatcgagcaggggggggcgtggtgcgtgcgccgctggggctcatccagttcggcagcaatctggatcgtgccccgggcacggtaaggttgttgccgggtag

SEQ ID NO: 354455 - DNA, 1596 bp, Pseudomonas aeruginosa
atgctccatccgttgctccgacacctgcccctggccctggcgctatgcgccgccggcgcggcccaggcgaagaacctggtggtctgcaccgaggccagcccggaaggcttcgacatcgtccagtacaccggcgcggtgaccgccgacgcctccgcggaaaccgtgttcaaccgcctgctcgccttccgccccggcaccaccgaggtgatcccggggctggccgagcgctgggacgtcagcgccgacggactgagctataccttccacctgcgccccggcgtgaaattccataccaccgactacttcaagccgacccggagcctgaatgccgatgatgtgctgtggaccttccagcgcgccctcgatccgaagcatccctggcatgcctcggcgctgcgcggctacgcctacttcgacgcgatgggcatgggcgagctgatcaagtcggtggaaaaggtcgacgagctcaccgtgcgcttcgtcctcaaccgtcccgaagcgccgttcctgcgcgatatggcgatgcccttcgcgtccatctattccgccgagtacggcgaccagttgctcgccgccggcaagcagggccagctgaacaaccagccgatcggcaccgggccgttcgtcttcaagcgctacgccaaggacgcccaggtccgctatacggcgaacccggactactacgccggcaagccgccgatcgacaacctggtgttcgccattaccctcgatcccaacgtgcgcatgcagaaggtccgtgccggcgagtaccaggtctcgctgtacccgaaaccggaggacgtgccgcgcctgaagcaggacccgaacctggcggtggacgagatcgatgccctgctgaccacctacattgccatcaacacccagcacaagccgctcgacgacccgcgcgtgcgccaggcgatcaacctcgcgctggacaagaaggccatgctcgacgcggtgttcggccccggcgcggccagtccggcggtcggtccctatcccccgaccctgctcggctacaaccattcgatccaggactggccgcacgatcccgaacgcgccagggcgctgctcaaggaagccggcgcggaaaatctcaggatcaccctgttcattcgcaacggcacctcgcctaccatccccaaccccgccctggcggcacagatgctgcaggcagacctggccaaggccggcatccagctgaccattcgttccctggaatggggcgagctgctcaagcgttcgaaggccggcgagcacgacctgtcgctgcttggctgggccggcgacaacggcgacccggacaacttcctcagcccgaacctgagctgcgccgccgccgagtcgggtgaaaaccaggcgcgctggtgcgacaaggacttcgaggcgctgatgcgcaaggcccgcgaggtgagcgatccggccgagcgggcgaaactgtacgagcaggcccaggtggtattccacgaacaggccccatggataccgctggcctacccgaagctgttcaacgtccggcggaacacggtgcagggctacgtgatcaatccgttgagcaacaacaacttcgccaccacctcggtgaagccgtag

SEQ ID NO: 354456 - DNA, 231 bp, Pseudomonas aeruginosa
atgaacgccatgcacaacgctcccgccagcgacccgagcctggtctacccgtccccgctgaaggaattctggcaggccttcgcgcacaacaagggcgccctcggcggcctgctgttcatgctgctgatcgtgttctgcgcgctgttcgccccctgggtcgccccctacgatccgagcgagcagttccgggacttcctgctgaccccgccatcctggctggaaggcggctag

SEQ ID NO: 354457 - DNA, 366 bp, Pseudomonas aeruginosa; identical to SEQ ID NO: 349242

SEQ ID NO: 354458 - DNA, 1161 bp, Pseudomonas aeruginosa
atgagtttcttccacggcgttacggtaaccaacgtcgatatcggtgcgcgcaccatcgccctgccggccagctccgtcatcggcctctgcgatgtgttcacgccgggggcgcaggcaagcgccaagcccaacgttccggtgctgctcaccagcaagaaggacgccgccgcggcgttcggcatcggctcgtctatctacctggcctgcgaggccatctataaccgtgcccaggccgtgatcgtggcggtgggcgtggaagccgcggagactcccgaggcccaggccagcgccgtcataggtggtgtcagcgccgccggcgagcgcaccggacttcaggctctgctagacggcaagagccgcttcaatgctcagccgcgtctactagttgcgccgggtcattcggcccagcaagcggtggccaccgccatggacgggctggccgagaaactgcgggccatcgccattctcgatggtcccaatagcaccgacgaggcggccgtcgcctacgccaagaacttcggcagcaagcgcctgttcatggtcgacccgggcgtgcaggtttgggacagcgccaccaatgccgcacgcaaggccccggcttcggcctacgccgccggcctgttcgcctggaccgacgccgagtacggcttctggtcctcgccgtcgaacaaggagatcaagggcatcaccggcaccagccgtccggtggagttcctcgacggtgatgagacctgtcgcgccaacctgctcaacaacgccaatatcgccacgatcattcgcgacgatggctatcgcctgtggggcaatcgcaccttgtccagcgacagcaagtgggctttcgtcacccgcgttcggaccatggacctggtgatggatgcgatcctcgccgggcacaagtgggcggtggaccgcggcatcaccaagacctacgtgaaggatgtcaccgagggcctgcgcgccttcatgcgcgatctgaagaaccagggcgcggtgatcaacttcgaggtctatgccgacccggacctgaacagcgccagccagctgtcccagggcaaggtgtactggaacatccgcttcaccgatgtgccgcctgccgagaaccccaatttccgtgtcgaggtgaccgatcagtggctcaccgaagttctggatgtcgcctaa

SEQ ID NO: 354459 - DNA, 2091 bp, Pseudomonas aeruginosa
gtggaagagaccggcttcgacggtcgtcgccaacgctatcgctacaacgccgctgacgaactgatcgcccgcgaggatgccgacggtcgcgagaccacctatgcctacgaccgcgatggccgcctggcgagcatccgggttcccgccaccgagcacgcaccggccctggtcgagcgttaccgctggttggccgacggccgcctggccagcgccggcggggcggattgcgaggtgcgctacacgtacgacgaggtcggtaacctgcgcctggaaagccaggtacatgccgacggttgggtctacagcgtcgagcacagccacgacgcgctaggcgtgcgccagaccagccgctacggcgacgcgccgccggtcgcctggctgacctatggcccgggtcatctgcacggcgcgctggtcggtgcggtcgagctggccttcgagcgcgatgccctgcaccgtgaggtgcgtcgcgacgcccgccgcgacgggcaggatgacgcgttgttcacccaggagcgccagcacgcgccgctgggacgcctgcagcgcagccgcctgcgtctggccggcggtttcgactggcagcgcggctatcgctacgacggacttggacaactggtcggcatcgacgacaaccagtatccgtcggtgcgctacgaatacgacctcggcggtcgcctgctggccagccggcgcgctggcgcggcggccagcacctaccgctacgacgccgccggcaaccgcctggagggcgtcggcgagtacgcgcgcgaggacgctcgccaggcattcgccgagaacgaactgtaccgctccggtttcagtcgctccgaggtgcgcgcgaaccaggccggcgaaggcccggcgcgctgggccggcaaccgcgtggagaggatcgccggcaaccgctatcgcttcgatgcgctgggcaacctggtcgagcgtatcggcgccgacggcgagcgcctgcgcctggcctacgacggcgcgcagcgcctggtccatctgacgcgcgattacgccgacggcacgcggctggaggcgcgctaccgctacgacgcgctgtcgcgacggatcgccaaggtggtgctgcgcgacggtgtcgagcagcaggtgcgcttcggctgggacggcgatcgccaatgcgccgaagcctttgcgcgggaactgcgcaccaccgttcacgaaccgggcggtttcgtcccgttgctgcgcctggagcaggcctgcgagcccgatcccccggagctgctgcaactgcgccaggcgttcgccgccgaaggccagccgctgccggcgcaatgcgtgccggcgctgggcgaggcgcggatcgctttcttccacaccgatcacctcggtacccccctgcagctgagcgacgaacgtggccaactgcgttggcagggcgttccggacgactggcgggcggtagcgccggaacgacagccgggtgcgcagccgatccgcttccaggggcagtaccacgatgaagaaagcggcctctactacaaccgctaccgttactacctgccggaagccgggcgctatgccagccaggacccgctcggcctgggcggtggccccaacctctatgcctatgcgctgaacgcgcccacgctggcctacgatcccaccggcctgatcatcccgctggtggtgatcggcgccttcgccgcccgcgccgcgatcggagcggcgctgggcgccggcatcgagctggggatgcagaccggcaagcaggtgctggggcagatgaaggacaactgggacagcgatcgcgacctcaccgatatcaagtggaagtgcatcgacatcaactggaaacacgtcggcgcctcggcggccatcggcaccgtggcgccgggcatgctcagcaccggcaagaccgtggtgcagtccgccaaggcgatcaggaccctttccggacaggcggccaacaccgccaaccgcgcggccaagctggccgcgcgcaaggccgcccatgccgataccatcaagaaggccgtggccacccaggccgcctggcagacgggcaagcagatcgtcaaatgcccgctgaaggacgaagaagaggagtgcccgccgcaatga

SEQ ID NO: 354460 - DNA, 2349 bp, Pseudomonas aeruginosa
gtgattcttctggaaaagggtgaaagcacaccagcgccatggatcaatgtcatcgccaatccccggttcggcttccaggtctcggcggagggcagtggctatacttgggcggagaacagtcgcgaaaatcaactgacgccctggtccaacgatccggtcggcgatccctgcgtagaagcgttctacctccgcgacgaggacagccgggcgctgtggagcgtcactgcgcggccgattcgcgacgatgggctctacagcgcacgccacggattcggctacagccgtttcggccatcgctgccagggcatcgacatggatctggtgcaattcgtcgcgctggcggacccgatcaagatttcccgactggtgctgcgcaacctctccggcaagtcacgacggctgtcgttcaccagctatgcggaaccggtactcggcagcgcccgggcgacatcggcggccttcatcgagacctgccaggatgtcgaaagcggtgcgctgcttgcgcgcaacccctggaacgccgcctttcccgggcgtgtcctgttcgccgacctgtgtggccgccaaagcagctggagcggtgatcgtcgcgaattcctcgggccgctcggtgacccctcggcgcctgcggcgctgctcggcgaggcgggactttccggatgcacgggggccgggctcgacccgtgcatggcgcagcagtgttcgatcgagctggcaccgggggaggtggtggaaatcgtcgcattattcggccaagcggactccctggctcatgcccgtgatctggtcacgcgataccgtcggactgatccggaagagacgctggcgggtgttggtaggcactggcggaccttgcttggagccgttcaggtgagcagtcccgagcgttcgctggatatcctgctcaacggctggctgctgtaccagaccctggcctgtcgcgtctgggcgcgctcggcgttctaccaggccagcggcgcctatggtttccgcgatcaactgcaggatggcatggctctgtccctggccgctccggcgctgacccgcgagcatcttctgcgcgccgccggtcggcagttccgcgagggtgatgtgcagcactggtggctgccgcactcgggacagggggtaaggacgcggatttccgacgaccgggtctggctggcgtatgctgcctcgctgtatctcgaggcgacggccgacatcgggattctcgacgaagtcctgccgttcatcgaagggccgccgttgcaagagggcgagcaggacaccttcttccagccgatgctgtcggagcagtccgcgtcgctattcgagcactgtgcacgaggcctggaccagtgtctgacgctgaccggtaagttgggcttgccgctgattggttccggcgactggaacgacggcatgaatcgcgtcggtgccggcggcacaggagagagcgtctggctcggctggttgctgctggagactctcgcgcgcttcgatggctatgcccgttcgcgtgaccctgagcgagcccgtcactggcgcgaacatgccgggcggttgcgtctggccatggagcgcgaggcctgggacggccactggtatcgccgagcgaccttcgatgacggaacctggctgggttcgaaggatggtgaagcctgccgcatcgattcgatcgcacagtcctgggccgtcctggcgggcgccgacccactgcgggcgggaatggcaatgaccgcactggagaggtacctgctacgtccagtcgatcgattggcgctgctgtttacgccccctttcgacgagaggggcacggatcccggctatatccgcggctacccactgggcctgcgggagaatggcgggcaatacagccacgcggccatgtgggcggtcctggcatttgtccgccagggcaaaggggacaaggcggggacattgctttccttgctcaatccaatcaaccacgcgctcacaccggaacaggtggaacgctatcgagtggaaccctatgtggtggccgccgatatctactccgaggcgccgcatgtcggccgtggtggctggacctggtataccggctctgccgcctggatgtaccgcgccggactcgaaggtttactgggaattcgccggcagggtgcctggttgctgattgatccgtgcattccggtgacatggtcgggcttcgaggtaagcctggaggtggagggggggcactacgagattcaggtggagtccggagaagggcgaagccacggcgtgcgcgaggctttcctcgacggcgtcgaagtggagtgtatcgatggccaagtgcgggtgcctctcgattgtcagcgacaccgcttgcgactgagcctttag

SEQ ID NO: 354461 - DNA, 2457 bp, Pseudomonas aeruginosa
gtggtcgaacaccagcgtgaccgcctgctttccgctgcgccgttgctggaggctcgcgtgcggagcgtggcgaagcaggcccgggccttcgtcgccgggatggatttcgcgttcctcttcaataccgagcgtgacctgttttctatcggttattccctggccgacaacagcctggacagcagttgctacgacctgttggcctcggaggcgcgcttggccagcctgatagccatcgccaaaggcgatgtccctacccgccactggttccgcctgggtcgtacggcgacaccggtggggacggcatcggcgctgatatcttggtctggctcgatgttcgaatatctcatgccatcgctggtcatgcgggcgcccgtcggcagcctgctggaacagagcaatcacctggtggtggaggtgcagcaggcctacgggcggaagaaaggtgttccctggggcatctcggagtcggccttcaacgcgcgggacctggagttcacctaccagtactcgaacttcggtgtgccggggctggggcttaagcgcggtctggccgagaacctggtggtggcgccgtatgccacggggttggcggcgatgatcaagccgcgtgcggcgttgtttaactacgcgcgcctggccgaactgggtgcgcgcgggcgctacggcttctacgaagcgctggacttcacgccgtcgcggctgcccgacgcgacggcggtggcgctcgtccacagctatatggcccatcaccagggcatgagcatcgtggcgatcgccaacgccctcgatgaggggcggatgcgcactcgcttccatcgcgagccgatgatccgtgcggttgagctgctgctccaggagcgcattccctccgatgtcttcctggcccatccgcgcgctgaggaagtgcgcgtctcgtcatacgaagccggaatcgaggcctcgacgcttcggcgcgtagcattgacgccgggcgagtcaccagttacccacctgctttccaacggtcgctattcagtaatgctgtccgcttcgggcgctggctacagtcgctggcgtgacatcgccgtgacccggtggcgagaagatccgacgcgcgacgactggggctactatgtcctcctgcgcgacgttcatgacggccgcacgtgggcggccaccacccagccgagcgggcaggtaccggtcagcggagagatcctcttcgacgaagaccgggcggaattcagccgccacgacggtagtctgagcagcgtgctagaagtcttagtctcgggcgaggacgacggcgaggtgcggcgcattaccctggtcaacaacggtcgtcgttcacaggagatcgaactgacttcctacgctgagttggtcctcgcgccggctgccgctgacgatgcccatccggcgttctccaagcttttcgtgcagaccgagtacgtcgccgagtacgccgccctagtggctacccggcgtttgcgctccggcaccgagacgccggtttgggccgcgcatttcgcggtggtggagggctccctgaccgcacctgtcgaatacgagtccgaccgtgcccgcttccttggccgcggaaggaccttgcgcgatgtcttggcggacctgcggcagccgttatccggcagcgccggcacggtgctcgacccggttttctctctgcgccggcgattgcgtatcgcgcctggggaaatggcgagggtgtccttctggatcgtggtcgctgagacccgcgaggcgctcttcgacctgatcgacaaacaccacgagcgcagcggcttcgaccgcgccaggacgctggcctggacccaggcgcaggtacaattgcgtgatctcgatatcgccgccggagaggccgccgatttccagcgcctggcggcgccgctgctgtatgccgacgcacgttaccgtgcgccgcccgagtcgatccggcacggttcagggcctcagtccgggctctggcccctggggatatccggagacctgccgatcctgcttctgcgacttgacgacagcgacgaccttgaacaattgcggcagatcctgagggctcaccaatactggcggacgaaaggcctggaggtggacctggcagtcgtcaatgagcgcgcttcgtcctacatccaggatctccaggtggcgatcgagaccgccgtgcgcagcagcccgtcgcgtacccgtgagggcgaagacgcggcgcggcgcggtcaggtgcacaccttgcgcgccgatctcatgagccaggagggcagggcgctgttgctggcggtcgcacgcgtggtactgctcgcccggcgagggccgatcgccagtcaactggccgccctgtgctcctccaggcctataccgactccggctgcgactgctggtacggcgcgactggtggccagcgacgaggggggggggcggataagacgagtctgggtgaggctctcgagttcttcaatgggctag

SEQ ID NO: 354462 - DNA, 1344 bp, Pseudomonas aeruginosa
atgaacgctcggctgtgggacggcacactcctgcaactggggcccactgccggtactcaggccccattcaccttggtctacaggcatgcggacggcgtacagaagatgatcctaagcaatagcgacccacagcgcctggccgaagcctatttccgcgacgacttcgacatcgagggcgacctcttcgctgccctggcgctcagggagcacatgcaaacccagcgcaaggtctggcaccgacgcgcacgcctgttgttcggcgccatcatgctgccgagctcggtcactacggaatccgacagacagaaagggttcttgcgccaacagattacgacggggatgcactcggacgcagaaaaacccgacgccaccaccttccgctacgacctgtccaatgcgttctacggactctggctggatccggcgatggtctactcctgcggctacttcgagcaaatcgacgatagcctcgaacaggctcaacgggccaagcttgagctgatctgccggaaactccagctgcatcccggcgagcacctgctcgatatcggttgtggctggggcgcgttgatcctccatgcagcgcaataccacagggtacacgcccatggcatcaccctaagccgggaacagctggccctggcccgcgaacgaatagacgcggcggggctccaggcgctagtgacggtggaatgctgcgactaccgcgacctaaaaggtcagcaggtatacgacaagatcgccagtgtcggactgtccgagcaccttggcccggacaacctgccgctattcttcgacacggtacaccgccttctcaaggattctgggctgtttctcaaccagggcatcactcagtgcccggacggggggcaacggaccgcgtcagcccgcctgatcaatcgctatctcttcaccgacggccagccggataccctgggcagccttgtgcgcaggatggaacaggcgcagttggaagtcaccgatgtcgaatcactgcgccgtcactacggcctgaccctgcgcctttgggtctctcgcctagagcagcggcaggggcttgccgtcgaatatgtcggcgaacccacctaccgggcctggcgcctgttaatggccgccagcgcgctggtgttcgaggccggggaactgggcgtcttccaaatcgtaacgagccgacacaacggagcccccagctctctgcccctgacccgccgccccttgtatcgcgacgactgctccattcagaggctcagcgaggcagtggacgcaacgccatccgctcacccgcctcgcgcaaacgccgacaggcccggtcgcagtcgaccctgctcggtaccacgaaaatag

SEQ ID NO: 354463 - DNA, 777 bp, Pseudomonas aeruginosa
ttgtttacctatccttcggccggcgcctgcgcccaggtgtcaccgtctcgcgcacagccccaggcgcagcggggctgccgcgttaccgccgggggcgatggaacgcactgtctaccgaccggctgttgcggctgggcgcgccggggctggctcgctataatcgcgcatttccctgacgccagatgccgagaccatgaccgagtccgtcctcgactatatgagccgccttggccgcgatgcccgcgccgcctcgcggttgctcgcgcgcgccgccaccgcgcagaagaaccgcgccctgctggccgcggccgatgcgctggacgccgcccgcgcggagttgtcccacgccaacgagcaggacctcgccgccggccgcgccaatggcctggagccggcgatgctggaccgcctggcgctgaccccggcgcgcatcgacgacatgatcgagggcctgcgccaggtcgccacgctgcccgacccgatcggcgagatccgcgacatgcgctatgtgccctcgggcatccagatcggcaagatgcgcgtgccgctgggcgtggtcgggatcatctacgagtcgcggccgaacgtgaccatcgacgccgccagcctgtgcctgaagtccggcaacgcgaccatcctgcgcggcggctccgaggcgatccactccaaccaggcgatcgcccgctgcatccagcagggcctggccgaggccggccttgccggccgccgccgtgcaggtggtggaaaccaccgaccgcgccgcggtcggcgcgctga

SEQ ID NO: 354464 - DNA, 810 bp, Pseudomonas aeruginosa
atgctacgcccgccggccaggttctcgaagccgtcggccagttgcgaggccttgtccagcagggtctgcgaaacgctgaagatgttgttcgccgcttcccggacctggaacaggtcgggcgaggtctcgaggatctcgtccaccgaaccggagacgaactcgaagagttcggcgatctcgttcaggcgatccaccgcctcggcgttggtcaccttggagatgctcatcgccgcgttgccttcctgcatgcccttcagtacgcggccgaacaggctggcgtcgcggccgaagctgtcggcggcctgcaccgagttctcgtcgccggccagcaccttgttcaccgagccgaggatacgttcggcgagcagcgactggcgctgggcgaccgcgacctggtcggccggggcaccgttctccagcaggatgtcgaccacctcttcgtattccacctgcagctgcgggatggtttcggcgagggtcgaggccacctggtgcagggacagtacggtctgttcgctggcgaggatggagtcggcgttcttgcgcaggccgtcccagtcctgctgcaccacgtccatctgcggcttcaccgcttcggggctgggcggcagggatgtgctctcgtcgccgttgaccaggatgttccagcgtttctcgaagtcgttgcgcgcatccttcaggagcttgaacgcctcgcccttgcccgccgccgcttcggtggcgttcttcgcgatccgctgcgacaggacgcgcagttcgccggcatggccgatgtactgcttgtcatggttcgactgggtgttgaggtag

SEQ ID NO: 354465 - DNA, 1254 bp, Pseudomonas aeruginosa; identical to SEQ ID NO: 319169

SEQ ID NO: 354466 - DNA, 1431 bp, Pseudomonas aeruginosa
atgaagcgttttatccagggagagcatcgaggccaaagctcgctgcttcccgagagcctggatgactacgtggcggacaccaacccggtgcgggtggtcgatgttttcgtcgatgaactcgaccttggccagctgggtttcgacggcgtcgtcccggctgaaacaggtcgtcccgcttaccatcctgccgacctcctgaagatctacatctacggctatctcaatcgcatccagtccagccgccgtctcgaacgtgaggctcagcgcaacgttgagttgatgtggctgaccggacgtttgatgccggacttcaagaccatcgctaacttccgcaaagataacggcaaggcaatccgcggtgtctgtcggcagttcgtggtgctgtgccagcagcttggcctgttctctgaagcgctggtggccatcgacggcagcaagttcaaggcggtcaacaaccgcgaccgcaatttcaccagcgccaagcttcaacggcgaatggaggagatcgagtccagcatcaatcgctacctgagcgcactggataccgctgatcgtcaggaacctgccgtggcgcaggtcaaagccgaacgcctccacgacaagatcgcgaccttgaaagcgaagctgcaggagctcaaggagatcgaggttcagctcaacgaaataccggataaacagatctccctgaccgatcccgatgctcgttcgatgaaaacgcgtggcaccggaatggtcggctacaacgtgcaggcagcggtcgatgcgaagcaccacctgatcgtgacgcacgaggtcacgaacgacggagtcgatcgagaccagctgagcgccatggccaagcaggcgcgagaggccatgggtgtcgaggaactctcggcggtcgcagacagagggtatttcaaaggcgaagaaatcctcgcctgtcatgaggctggaatcactgttttcgtgcccaaaacgctgacctcgggcgcgacagcggcgggccgcttcggcaaaggtgatttcatctatgacgcagcaaagaacgagtaccgatgccctgctgggcaaagcctgatctggcgtttctctagcgtcgagaaagggctaaagctgcaccgttactggagttcacactgccaaggttgtgccttgaaagaacactgtacgcctagctcagagcgccgagtgagccgctgggagcatgaagcagtactcgaagcgatgcagagtcgcctggatcaagcgcccgagatgatgcggatccgccgtcagacggtcgagcacccgttcggcacgctgaagagctggatgggtgccacccatttcctcaccaggacgctcgaccgggtgagtaccgagatgagcctgcatgtgctcgcctacaacctcaaacgcgtgttgaccatgctgggcagcggtgccttgatggcagcgatgaaggcctga

SEQ ID NO: 354467 - DNA, 321 bp, Pseudomonas aeruginosa
atgccggtttcgttacccttcgagcaagtcgatgtcttctccgaacagcccttcaaaggcaacgccgttgccgtggtgattggcgccgaccgcctgagcagccggcagatgctggagttcgccgcctggacccagttgagcgagacgaccttcctgctgcggccgaccgttgccgaagccgactatcgcgtgaggatcttcaccccgttgcgggagttgccctttgccgggcatccgacgctggggagctgccaggtctggctgaaccagggggcggcaatgctgctgacgagatcgtccaggagtgtctggcgggcctga

SEQ ID NO: 354468 - DNA, 603 bp, Pseudomonas aeruginosa
atggcgcgctggacgacccgcaacgcctgcggcatttcctgcaacgacaccagcacaccctgcgcgaagagatcagcgcccgccagcgcctgctggcggaactcgaccgaaccctggcgacgctcgcccactggaggatccgcaacatgcatgcacgaatcgtcgaacgtcccgccttcagcgtggtgggcatggaatacttcggcagcgcccccggcgacaccatcggccagctctgggaacgcttcatcccgcgcgagcacgagatcgccggcaagcacgatcccgaggtctcctatggcatctgcgcgcagcagcccaacggcgaattccactacgtcgccggcttcgaggtgcaggagggctggccggtgccggagggcatggtgcgcttccaggtgccagcgcagaagtacgcggtgttcacccacaagggcacggcgccgcagatcgccgagagcttccaggcgatctacagccacctgctcgccgaacgcggcctggagcccaaggcggggggtcgacttcgaatactacgaccagcgtttccgcggaccgctggatccgaactcgcaagtcgacctgtatatccccatctactga

SEQ ID NO: 354469 - DNA, 183 bp, Pseudomonas aeruginosa
gtgggcagagaccagttctgcgtgaccgccgacatcggctgcgactatggccattccgcacgccatcgcctcgtagagaaccagtgcgataccttcgccggccgatggcaggaaaaatatatcggaggcctggaacaactcgcgcaacgcagcctctatagaaaattgaaaatcctgagttag

SEQ ID NO: 354470 - DNA, 210 bp, Pseudomonas aeruginosa
atggacagcctggccgcccccaggccaggcaccggactatccgtgcaaacgccgcatggagtcgaaaccggcacgcgttccagcaactcccgcaaacgccgctcgaaaagagacaaggtgaattcttcgcggatgcggcgtgcggagttctgccccatccgcctcagcatttccggttcgcgcatgaggctctcgagcctagcggcgtaa

SEQ ID NO: 354471 - DNA, 1116 bp, Pseudomonas aeruginosa
atgattatcagaaacagcggtcttacgccgatcggcgctgtgctaggcgacgttggcggcctgctggatcgcattgaggccatgaggcggcagcagagggagcacatcgaggctgctgcacgtcctggcgagacatacgaacacgttgccgcccgcttccagcgtgaagcggaaaaggtaggccgtccgaccgtttctaatcagcaaccggcgcccctcgtgcgcaaaccgcccaagggcgacgagcagccggatttcttcatcccggccttgcgtgaagttggcacgcgtgacagccgcagcatgatggatgtggccgtgttccgtctgtccaagaaggataaacgggcgggtgaggtcatccgctacgagctgccggacggccacgtggaggtcaaggcggggccggatggcatggcctcgatttgggactatgacattgtgctgatgctcgtttcccacctcacagaagccatgaaccgttatcgagaggggaagggggataaacccggccgcgtgtttaaaccgcacgtttcggacattctgaaattttgtcgcaaaggtgacggcgcgcgtcagttcgagcaggtcgaagcagcgctcgaccggctcaagggaaccacgatcaagagcgtgcgggaagtatcgcgcgacagtaagcgcactacgcgcgaggtcaaatcggaggggcttatcagctcctacgagatcgtatcgcgcacggacacaggcaaggtggccagagtggagatcgaggccccaaactggatttaccgcgagatcaccgagggcaagcagccggacgttctaactgtacacccggactactttctgatcgagccgggtattggtcgctttgtttatcgtctcgcgcgtcgcgccgccgggaagggtaaggcgaaatgggcttttcggacgatctatcaccgcagcggaagcgccggcacgtttaaagagttctgccgcatcctacgcaagcttatcgttgccgacgacctgcccgagtacactttacgtgaggaggcagggcagagcggccctcaattgctcatgcggcatcggagcgaagcgcctgacgcgttactgcatgatatggcggtgtgtaatagacggtga

SEQ ID NO: 354472 - DNA, 201 bp, Pseudomonas aeruginosa
atgaagaagcaaggccgcccgatcgcgatgaaaaacaaggccaccatgcctttgaattccggcgggagggttctgatgaagcgtgtgaacttccagttaccggccgaccaacacatgaagttgaaggtatatgccgcccagcacggcaagacaattaccgagcttttgactgagcacgttgggcggttgatcggtgagtga

SEQ ID NO: 354473 - DNA, 2607 bp, Pseudomonas aeruginosa
atgacgactgaagtggaggccatggccagtatccttgcatggtctgccgatattcccggctggcaacgcgacgcactacgccgactcgcgacgcaggcgaatttggagccggccgagctcgacgaactggttgccatctgtaagggagaccgagctgcggctccacttgaagcagggcatttacgcaatcccaaccgcgatcagggtgaagtttgcctgcggcagatacacggagttcggcatgtcaacgccttagctcctgagcagcggcttacgcttcgccaggagggattgaccgtcatctatggcgacaatggatcaggcaaatctggctatgcgcggattctgaaaaaggcatgccgggcacgtatgccgaaccgtgccgaagagatcatagccaacatctatgacccggcgccgggtacgccaagcgccattatcgaatacgctatcggcggtcagaatcgtacttgcatgtggcagctcggacaggtttctgacactgcgctgtcggccgtcagcgttttcgactcccgcaccgccaacatccacgtcgatgaaacgaatgatgtggcgtacacgccgttcccgctcaaattgcttggtgcgctggcgcagctctgcaagtcggtcagggacaagctggctacagaagtcacgcagataaaggcgcaaacacccgaagcgattaggacgccggcttgtggccgagaaacggcagtcggtaggctcatggcccgccttgccgccggtgccgatcctgcggctatcgaagcgctggccacgctgacccaagcagagcaagaccgattggcccagctcacggcagaccttgccggtgatccagctcgcgcttcccgtcaactcgccgccttgaaggcgaaggttgaggcgcatattgcgctccttgaccggttgtttgcttcgatcagcgacgatgccgcgaataacttgcgtcgtcttgttgctgcccgcgacgcggcgcggcaagctgccgaggctgcgtccggtgcgcttttccggggcgagccgttgccacagatcgggtcggaggtttggcaagcactatgggccagtgcgcgggcattttcggatgaggaagcttatcccgacaggcgcttccctgtcaccgatcccggcagcgtgtgcgtgctttgccagcaagagttgaccccagttgccgctgaccgactcaatcgctttgaggcttttgtgcgcgatgacagccagcagcgcgctgaggctgcgcgagccgcatacgacacggcgctcacggcgttcgaaggcgcggcggtatcgcttgcggaccttgcgagcatcatcgcgactatccgggatgaactccggcaggatgccttggcggtagagataagagacgctgccgtacgcgccctgtggcgccatcgccagattagacggcggcatgtaaatcccgctggtgctttcgacgttcccgctgctgcatatcagcgtcaggcgttagttgatcaggctgcggacattggaacgcgggcgaacgcccttgccgccgaggcagggtccccggcccgtgctgctttgctcgccgaaaaggctgagctggcggatcgtcaatggcttgggggaatcaaagccgatgttcttgctgagattgagcgtcttgggcagattgcaaggcttgaggcggtccagcgcgacacggcgaccaatcgcatcaccacgaagagtaccgagatcgcacaggcactggtgacggacgctctgcgcgcgcagttcgcacgcgaggtggcgagtttcgagatcgcgggcttagctgtcgagcttcgccagcaaaacagcgttcaaggtatcccccgttttaaggtcgcactcactcggaagcctgacgcttccgtggggcaggtattgagtgaaggcgagcatcgttgtgtcgcgttggccgcgttcatggccgaacttgccactaccgaaaacaagtccgggatcgtgtttgatgatcctgtttcctctctcgaccatatgcatagagaggcagttgccaagcgactggttgccgaagcggctcaccgtcaggtgatcgtctttacccacgacttggcctttctcttcgagctgaatcgagcggcggatgatgcccagcccaagccgcagatggcgattagttctgttagccgcggcgcagataaggctggcttttgccgtagtgagccgccgttcaaagcacgtaaggtcagcgacatcaccgcaagcctgaccaatcagcttgcgaacgagcgatatcattttgaacaaggcaacgacgatgaatggcggaaaaccgtcaaatccattgccggagcgttgcgggatacatgggaaatcgcggttgaggaggttgtcggacacgttatccggcgtctgtccaacgaggtcaaaacgcccggcctggtcaaactgaccgcgatcactattgccgactgcgaggccatgcgggacgcgttcgggcgctgctcggagctgctgcatagcgcggcccctgctttgaaccgtccactgccaacgccagacgcgctgtcagccgagattgatgctctcgctacttgggcagataacctccggcagcgccaaggcgctgcaaagttgccctga

SEQ ID NO: 354474 - DNA, 345 bp, Pseudomonas aeruginosa
atgaccaggcggcgtaaacccctctacatctccaccgtcacgctggccgagttgctgtccggcatccaggccctgccgcagggcaggcgctggcacttgctggatgacacgctcagcgcgccactagggctgtccagggatcgtgtgctgtccttcgtcacggaggccgtgtggtgctacgcagagctggccgtggcggccaggaatggggggcgtgacctcgcggcgctggaatggatacatcgccgccatcgccgcatcgcggggcttcatcgtggcgtcacgcgataccgcacccttcgaggcggcgggggcggcggtcatcaatccgtggagctgacatag

SEQ ID NO: 354475 - DNA, 3291 bp, Pseudomonas aeruginosa
atgccgcgcggacgtcctcgcaagaacgatgcagcttcgcccagggcggctgcgcgcggccgggccgccgcggcccgcgcgtcgttgccgttcaaccgcaagctcgccctcaaccagtggctgctcggtctgttcggtgtcgagcgcttcgaccagctcgccgcccatttgaaggatgagtcgctggaaggactggacgcggacaacatccaccgcttccaccacgccctgtgcctgcacctgcccccggagaacaggccggagctgacggacgagcagctgctggagtacgaccaggccatcgtttcggttacgcagcacctcaacgaccgtcgcatcacccggggcgaagaaccgatcgtctggaagtacttccagtacctggcgctgctgttcacggagatctacctcgaccgctacttccgcgaccccgccggcctgcggcaggcgctcaacgcgcgcattgcggcgctgaacgagacgctcccggaagcggaccggagcgcggcagtggacgagtccgaggatccccgtctccagctcaacaagatcgccttctggatggccaccggcagcggcaagacgctgctcatgcatgccaacatcctccagtaccagcggttcctggaaacgcatggcctttcgcgcgagctgaaccggatcatcctgctcacgcccaacgaagggctgtcgcagcagcatctgcgcgagttccagaagtcgggtatcgaggcggagatcttcaacaaggacggacgcggcctgttcgccggccgtgcggtggaaatcctggaggtcaccaagctgaaggaggagatgggcgagaagacagtggcggtggatgccttcgagggcaacaaccttgtcctcgtcgatgaagggcaccgcggtgcttcggcaggcggcgacggggtctggatgaagttccgcaacgcgctgtgtgaaaagggcttctcgttcgaatattccgccaccttcggtcaggccgtggccggtaaccgcgatctgaccgacctctacgcgcgcagcacgctgttcgactattcgtaccgctggttctacggcgacggtttcggcaaggactaccacatcctcaacctggaggacgatcgcaacgaggaatggatgaggacctacctcaccgcctgcctgctgtcgttcttccagcagcagcggctgtaccgggaacaggagacgagcctgcgcccgttcaatatcgaaaagccgttgtgggtcttcgtgggcggcagcgtcaatgccgtgcgcaaggaggacaagaaggatgtgtccgacgtggtggccatcctgaagttcctggccacctacgtggcgaatcgccaggacagcaccgaacgcatccggcgcgtgctgaacgatgagttgctgacggccaccggcgagaagctgttcacaggccgtttcccctacctgaacacctgcggtctgtcgcctgaacagattttcgacgaaacacttgcggtcctgttcaacgctcccgcaggcggccagctgcacgtcgagaacctgaagggcgccaccggcgaaattggcgtgcgcgtgggcgacaacgcgttcttttgcgtcatcaatgtcggtgacgacaccaagctggtgaagctgtgcgaaaccagcggcttgcatgtcgccgaacgggaattctccggctcgttgttccacgagctggacaagccgcactccgccatcaacgtgctcattggttcaaaaaagttcaccgagggatggagcagctggcgcgtgagcaccatggggctgatgaacgttggccgcagcgagggggcgcagatcatccagctcttcggccgcggcgtgcggttgaagggttatggcatgagcctcaagcgcagcgtgcgagcgaccctccccacggggctgaagcggcccaggcacatcgacctgctcgaaacgctgcacatcttcggtgtccgtgccgactacatggaacagttccggaagttcctggaagatgaaggattacccgccaacgaagaacgcatcgaattcatcctgccggtcatccggaacctgggcacgaagccgctcaagacgatccgcctcaagaaggagatcaacggcatcaagaccgagtttggcgacgccttccgcaagctggggccggttccgaccctccagcccccgcgccccgaccttgagcccgccacggcctacctgcagaagaaccaggtggtgctgaactggtacccgaagatccaggccctgaagtccgacggggtatcgggcagcgaggacgaaggcgcccccaatgaggcgcacctgacgaagcagcacatcgccttcctggacctcgatcagctgtacttcgacctcgaacgtttcaaggccgagcgtggctggcacaacctcaacctgccccaggccggcatcgctgcattgctggtggacaccagctggtaccggctgctgatccccgcgtcggagctggccttcgactcgttcgaaaaggtgcgcgtatggcaggagatcgcccaggccctgctgcgcaagtacgtggagcgctactacaccttccgcaagaaagagtgggaattgccgcacctggaataccgtgacctcaccgaggacgatcccaacttcccgtccatcctgagtgaggatggcgccgaatacggttaccggatcctgatcgaggaatcgcagcaggaaatcgtcgcaaaactgaaagagctgaaagaggccatcgagcaagggaatctgaaggactgggagttccggggcctcaaggcgatctggttcgggcgacacctctaccagccgttgctgtttctggacggcagtgcagtcgagatctcacccgccccgctcaacaagggcgagcgccggttcatcgaggacctgaaggcgttccacgacgccaaccccggctattttgcggaacaggaactctacctgctgcgcaacctcagcaagggccgtggcgtcggcttcttcgaggccggaaacttccacccggacttcatcatctggcagctcgaaggcaaacggcagcgcgtgacctttgtcgaccccaaaggcatccgcaacgtcggcctccaggatcccaagatcagcttctacgaaacggtcaaggacatcgagaagcggctggggcagcctgatgttgtgctcgagtccttcatcgtctcgaacacgccctcgcatgaaatgagcaagctttggggcatcaccaagggcgagatgcagaaaaaacacatcctgtttcaggaggaagacagggagacgtacatccgcgcgttgctcgagccgacccgctag

SEQ ID NO: 354476 - DNA, 3249 bp, Pseudomonas aeruginosa
atgagccagaaatacgaaaaactgaaaaccctgctcaaggaactgttccagctcgaccagccggagctggacttcggcatctaccgcatcctgcacgcacgcagcgcggaggtgacgcagttcctggacaaggacctgctgccgcaggtgaagcaggcgttcgcccagtaccgcaccgccgacaaggccgaactggagaaggaactggccaaggccatcgaagccgcccaggccctgggcgtcgatcccgaaagcacgcagaaggtcaaggacctgcgcgcccgcctggccagcgaagctgtggacgccggggcgctggaagccgaggtctacgaccacctctacagtttcttccgccgctactactcggagggcgacttcctcagcaagcgcgtctacaagcccggcgtctacgccatcccctacgaaggcgaggaggtcaagctccactgggccaacgcggaccagtactacatcaagaccagcgaaagcttccgcgactacgccttccgcctgcgcccggaagatgaagcgaacccgatgcgcgtccacttcaaactggccgacgccgccgagggcgaacacggcaacgtcaaggaacaggccggcaaggagcgccgcttccggctggccccggcgtcctttgcggccatcgaggacggcgagctggtgatccgcttcacctacaagcccgagacggaaaagcagaaggacctgaacgccgaggccgaggccgcgatcctggccctcgacgacccggcgctggcggactggatcaaggccctgggcgcgcggcatgtgcgcgccgacggcacggcctcggagaacacccgcctgcgcgtgcacctggaccgctataccgcccgcaacaccttcgactacttcatccacaaggacctgggcggcttcctgcggcgggagctggacttctacatcaagaacgaggtcatgcacctcgacgacgtggaaagcgaaaccgcgccgcgcgtcgagcagtacctgtccaagatcaaggtcatccgccgcatcgcgcacaagatcatcgacttcctggcgcagctggaagaattccagaagaagctgtggctgaagaagaagttcgtcgtcgagaccagctattgcatccggctgggtgtgattccggaggagttctatccggagatcgcagcgaacgatgcgcaacgcgaggaatgggtgcggctgtgtgcgattgatgagttgaaggcgacagaaggaagccttctcgattcaggcaagccgggatacagcgtgccgctgacagtagagtttctgaaggcgcatccgacgttggtagtggatacgaggctcttcagcacagatttagctgagcggatgctcgacgctgtatgcgatttggatgggcacactgacgctgtgttgttacacagcgagaactcgcaagcgctacgccacctcatcacgcggtacgccgacggcgtcgactgcatctacgcggacccgccgtataacacgagtgaaataggtttcaactacaagaacgaataccggcattcctcttggtgcacaatgatcgctcaagccatgagtttggcgcaacgcgcactgaggaccaacggcgttatggcgactgctatcgacgactgcgagctccatcacttgggaatggtatgcgatgaagtccttgggagaaatacgagattagggacgctggtcgtagagattaaaccgtccggacgtactaacgacaatttcctagcgacgagccacgagtattacctactgaacagtcgcgacccaagtgctgccgaggcgtgcttttttccgcttagtgaggagcaacaacagcagtattccgaagtcgatgacaagggatctcacaagtggcgcgattttcttcgcacaggaggatattcaactccgcaggagcgaccgaactcattctacccaatctactttgagccgcaatcgaaccagatttcccttgagaagcaagcaggttgggaagtgatatggccaatcgacagtgaggggaggaagcgagtttggcgaaaaactagaccatcattcctcaagcacctggcggatggcgagattcgcatcgtctctaagcgaggcggtggttacaaggtagagataatcgatcgcattaaggatggcgttcgtccaaaaagtgtgtgggttggcaagcagtacgatgcctcatctcatggaactaagctcttaaagtcactcttcggcgagacaagtgtgttttcgtttccgaagtccctatatgccacgaaggatgttctatttgtcgctaccggcgacactggtgagggaattgttctcgactacttcgctggttctggtaccacaggccatgcggtggtgagccttaatcgcgaggacggcggacaacgcaagttcatcctcgttgaacagggtgaccacttcgacactgtccttgtgccccgcctgaagaaggtcaccttcacacccgaatggagaggcggcaggccaaagcgccttgccaccgccgaggaagccgaacgcagcccgcgcatcatgaaagtgatccgcctcgaatcctacgaggacacgctcaacaacctggagctgcggcgcaccgaggcgcagcagagcctgctcgacagcctgcaggcccagggggcggacggcttccgggagcagtacctgctgcgctacatgctggacgtggaaacgcgcggcagccagtcgctgctgaacgtgtccgccttcatggaccccacggcctacaaactgaaggtcaagcgcccgggttcggacgagtcccgcgaggtcaacgtcgacctgctggagaccttcaactggctgatcggcctgaaggtggaccacatcgccgcgccgcgcacctacagcgccgcgttccggcgcgacgacgacccggacctgccggcggatgccccgcgccggctgctgctggacggccgcctgaaggaggaccccgaaggcccgtggtggttccgcaccgtcaccggcaccacgcccgacggccgccgcaccctcgtcatctggcgcaagcgcccgggcggcgaggccccggaaggcatcgagcgcgacaacctggtgctggacgagtggttccgcaagcagggctactccagcaaggacagtgaattcgacctgatctacgtcaacggcgacaacaacctggagaacctcaaagccccggacgaaacctggaaagtgcgcctgatcgaggaggacttcttccgcctgatgttcgaaatggagggcgtgtga

SEQ ID NO: 354477 - DNA, 2901 bp, Pseudomonas aeruginosa
atggtgtcgcctgatgtcatgtccttgaccccgcaccacgccaagtactacgcctatgacctgacccgtcgggcggcctcgggcatggatcgcctctcgatggcactctttgatgcctcggtggatctcaacccccaccagatcgaggcggcgctgttcgcgctccagaaccccctctccaagggggtgatcctcgccgacgaagtcggcctcgggaaaaccatcgaggccggcatcgtactgtgccagtcctgggccgagcgccggcgccggctcctgatcctttgccccgcgtcgctgcgcaagcaatgggcgctggagctgcaggaaaagttcaacctgcccgcggtcgtcctggacgccagggcatacaggcaggcccgccgggaagcgcgcaacccgctggaccagggcgccatcctgatcctgtcctacaacttcgcccattcgatccgggacgaactgcgggccatccggtgggacctcgtcgtcatcgatgaggcgcacaagctgcgcaatgcctaccgccccagcaacaaggtgggccagggcatccgctgggccaccgaggactgccgcaagctgctgctgacggccacacccctgcagaactcgctgctggaactgtatggcctgtcgaccctgatcgacgagcacctcttcggcgatgtcgatgccttccgcgcgcagtatgcgggcgccggcagcgacctgggcgccctgcgccaaaggctgtcggcattctgcaagcggaccctgcgcaaccaggtcaccgagtacatccgctacaccgagcgcaagccggtcacccggcccttccgtcccaccgacgaggagcacgccctctacgaaaaggtgtccgagttcctgcggcgcgaagacagctatgccctgccccgccgccagcggcacctgacggcgctgatcctgcgcaagctgctcgcatcgtcctcggccgccattgccgccaccctggacatcctgcgccagcggttgcaggccatgctcgacgagcgcacttccggcaccgacgacacggcggacctggcggagctgctggccgagaacgaagagctggaaaccgacctgctcgacgagatcctcggcgaggacgaggacaaggccccgggccgggataccgatgcaccggtcgaccgccagaaactgcgggaagagttcgccatcctcgcacgccttgccgaggaagcccgcagcatccgcgtcgacaccaagagccgcacgctgctcaaggcgctggaaacagggttcgagcagatggcagcggtcggtgccgcgcgcaaggccgtcatcttcaccgaatcccggcgtacacaggagtacctgaagcagttcctcgaggccaacggctacgccggccagcttgtcctcttcaacgggagcaacaacggccccgaggaaaccgccatctatgaacgctggctcgagcgcaaccagggttcggacaaggtcaccggctcccgcgcagtcaacgtgcgcacggcgctgatcgagcatttccgcgaccatgcctccgtcctgatcgccaccgaggcggcagcggaaggcctgaacctgcagttctgctcgctggtcatcaactacgacctgccctggaacccgcagcgcatcgaacagcgcatcggccgctgccatcgctacggccagaagcacgacgtggtggtcatcaacttcctcaacgagcgcaacgaggccgaccgccgcgtgctggagctgctggagcagaagttcaacctgttcagcggcgtgttcggcgcctccgacgaggtgctgggcaccatcgagtccggcgtggatttcgaaaagcgcatcctggcgatctaccaggcgtgccggacccccgcggagatcgacgctgccttcaaggccctgcaggcggagatggaggaacagatccgctcgcggctgaaagacactcggcgggcgctgttcgagcactttgacgaggacgtgcacgagcggttgcgcatccggctcgcggatgcccaggcccagctggaccgggtcggccggcgcttctggtcgctcacgcgccacgtgctggccgaccaggcgcgcttcgacgacatcgtcttcaccttcgacctggtcagcccgccccgcaaggacatccccgccggccgctaccacctgatttcccgcgtccacccgcagacggaagctgccggccagttcctctaccggctctcgcaccccctgggcgagcatgtgctcgcccaggcgcgggatgccgatacacctgccgccgagatccacttcgacatcagccgccacccaacccgtatcgccgttgtcgaagctctgcgcggccagtgcggctatctgacgctcacccgcctgaccatcgagtcctacgaacgggaggagcacctgctgttctcgggcttcacggacgccggggctgcgctggacccggaaaccatggagaagctgttccagtgcggcggccacgtcgcaggcaccgcaacgatccctgacacggtttcccggcgtctgactgcggagagcgagcgccatgcccaggccaccctcagccgctcgctggaacagaacaaccgttatttccacgaggcgcgggagaagctggaacgctgggccgacgacatggtgctctccgccgaaaaggcgctggccgacaccaaggaacagatcaaggccctgcgccggcaggcacgacaggccaccacgctggccgagcagcacgcgatccaggagaagctccagaagctggaacggcagcagcgccgccagcggcaggagatcttccgcatcgaggacgagatcatggaaaagcgcgaccagatgatcgaccagctggaacagcggctggcgcaacgcacgcacgccgaaacccttttcaccattcgctgggccgtcgtctga

SEQ ID NO: 354478 - DNA, 858 bp, Pseudomonas aeruginosa
gtgggggcagcgcaacgtcgcgttcggtggggcatcgagcgccgactcgagttcatcgagttccggctgttctgggaaggccatgtcaaccgcggcgacctgatggccgccttcgggatctcgatcaaccaggcctccgccgacctgaaccgctacctcggcatggcgccgggcaacatggtctacgacaagagcgcccgcacctacgtccgcggcgaccgcttcgagcccctgttcctgagaccggacccggccagctacctgtcccagctgcggtcgatctccgacggcatcgccacgcaggaggaaacctggatcggccagctgccggccttcgacacggtccccagccctgttcgtggcatcgatgcccacacgctgcgccaggtcatcgaagcgatccgtgccaagcaggcgctggaggtcgagtaccagtccctttccaaccctgccccacgctggcgctggatcgcgccccatgccatcgcgttcgacgggttccgctggcatgcccgggcgtactgcttcaccaacggctgcttcaaggacttcctgttggcgcgcatcctcggtatccgggacagccgccccagcgatatcgacgacagccaggatgccgactggcacacgcacgtcacgctgaagatcggtccgcacccgggcctgtccgacgcgcagaagaaggtggtggcgctcgactatggcatgcgcgacggcaaggccagcatcaccgtccgcaaggcgctgctctactacacgctcaagcgtctcgggctggacactgacccgtccacccggagcccggcggaccagcagatcgtgctgttgaacggggaggtgggcgatggtgtcgcctga

SEQ ID NO: 354479 - DNA, 330 bp, Pseudomonas aeruginosa
gtgaagttcgacttcgacaagtccaaggtcaaagagaacagctgcgctgacatcaagaacctggctgacttcatgaagcagtacccgtccacttccaccaccgttgaaggtcacaccgactccgtcggcaccgacgcttacaaccagaagctgtccgagcgtcgtgccaacgccgttcgtgacgtactggtcaacgagtacggtgtagaaggtggtcgcgtgaacgctgttggttacggcgagtcccgcccggttgccgacaacgccaccgctgaaggccgcgctatcaaccgtcgcgttgaagccgaagtagaagctgaagccaagtaa

SEQ ID NO: 354480 - DNA, 204 bp, Pseudomonas aeruginosa; identical to SEQ ID NO: 319110

SEQ ID NO: 354481 - DNA, 222 bp, Pseudomonas aeruginosa
atgcgccgcctgctgatcggcggactgctggcgctgctgcctggcgcggtcttgcgcgcgcagccgctggactggcccagcctgccttacgactatgtggcgcagggcgaaagcctgcgcgacgtgctggccaacttcggcgccaactacgatgcctcggtgatcgtcagcgacaaggtcaacgaccaggtcagcggtcgcttcgacctggaaagcccgtag

SEQ ID NO: 354482 - DNA, 915 bp, Pseudomonas aeruginosa
atggaactgcccaagggttccaccgcggtcgacttcgcctacgcggtgcacactgacgtcggcaacagttgcatcgcctgccgcatcaaccgtcgcctggcgccgctttccgagccgttgcagagcggccagacggtggaaatcgtcaccgccccgggcgcccggccgaacccggcctggctgagcttcgtggtcaccggcaaggcgcgcacccatatccgccatgcgctcaagctgcaacgccgctccgagtcgatcaacctcggcgagcgcctgctgaacaagacccttaccggcttcgacagccacctcgagaagattccccaggaacgcatccaggccgtgctcgccgagtaccgcatggaagtcttcgaggacctgctggaagagatcggcctgggcaaccgcatggcctacgtggtcgcccgccgcctgctgtccagcgagggcgaggaagcgccaagcgccgagggtccgctggcgatccgcggcaccgaaggcctggtcctgagctacgccaagtgctgcacgccgattcccggcgacccgatcgttggccacctgtccgccggcaagggcatggtggtgcacctggaaagctgcaagaacatcagcgaagtacgccacaacccggaaaaatgcatccagctcagctgggccaaggatgtcaccggcgaattcaatgtcgaactgcgcgtcgagctggagcaccagcgtggcctgatcgccctgctcgccaccagcgtcaacgcggccgacggcaacatcgagaagatcagcatggacgagcgcgacggccgcatcagcgtggtccagctggtcgtcagcgtgcacgatcgcgtccacctggcccgcgtcatcaagaagctgcgcgccctcaagggagtgatccggatcacccgcctgcgtagctga

SEQ ID NO: 354483 - DNA, 2892 bp, Pseudomonas aeruginosa
atgagccaatacctgttgagcttcgcaagggaaaatcttgacggtaagccggatgcgtacctggcgttgctgtggtgcatctacaaattcaatggttccagtggccggtattcagaccatatcaaatcgcacttgagtgccgcgtccgagcacttgctttccaccgactatcagaaactcgcccgtcggataaaaaccatccttgattcaaagcccgaattggattgggttgcgccttcgggccttacgcccttggctagcttgcaggtgaaaaatttcagagggtttggcgaccttgggcaggatgacaaagggacgttcctgcgatttagcaagagtaagaatatcttctatgccccgaatggcggaggtaaatcgtccctgtgcgaggctctggagtatggcacaacgggacatatcaaagaggcggatcgtcgaaagacgaagatacgtccatacgttgcgcggggctcggccaaatcgaccctaattttgatgagtacgaacaaggcgagtattgtaaaaagcatcacttggtcgagttgcttcattgatcgaaatcgcttacaagagttttccttgctgggctccaaggataccggtagcgcagaaagcgatgtccttgccactctgttcggactggaggagtttcaagaagtcatatctcgctttgttagacctgaaagcttcaaattaagtacatacctgcggcctgacaatacgatggctatggccactttgacgcagcgatggggtgcacttatcgagaaacgccgagagctattcgagacaatcgcggcgctcaattctagagtctgccaaacacttggtttggaaaacgagcaccagtacgcggttaaggccagatttacgcgcctcgaaatgcttagggagctgaaagtcaaagcggccgatcggctcaaaaattcggagtcacctgttctattctccttgaagcagttagcccgagcggcctccgtttcaatacgcttactggagcgcaaagccaacattgacttagcactccttcgggacgcctcagcactgaactatagggcggtgttcgaagctatccaggctatagaacaggccgatgctggagatgtctgccccgcctgcacgacaccattgcgcaatgttacagagaacccttttgaaaaggctcgacgagagcttcagtccctcaaaaatctaacgaggctacaacaggctgatcgacagaatcaggatcgtatcgtccaactggcaaacaggatttctgccggcgtgctcggagtggattccaataccagacagggcgtgtcttgcacactctctcttgaaacgctacgagctgcgactgcaacctttcaaaacgccaccgcaaggacggatgcagcgttgctggtcttggagtcgttcaatcaacttattgcaagcagcgatgagaagctaaggctgtatgtcagtgcgtgcgaacgtaagttcaccgaggtcgcccaagctgatgccattgtggctaagctcgatgtcgaagtcagagcgattaagcaagtcgaggagtctcttcgagtacttttcgatgaaaagagagtggcccaacgcgacttggctccgacaggagcccagatgacagatatcgcccgtcaacgagctgagatttttgccagcgatgcgggcaatgtgcgtttcaattcattcatccaggcacttcaggtcgagtacggaaacctttatcacgacctgatcagctacaagctatcccttgagagggctcgtctctcaggcattgagtcgaaagctgccgagtactacaaagcgatcaataatcatgatgatgagcacgaacgcattgatgctatttactttgaaaaggccagcgacagctatcggataaagatttctaacagtaatgggacttctgttgacgccttctcggttctgagcgaaggccatttacgagcgctcggcctttcacttcttttggctgtggccgagaagaacaaatttccgctgattgttttcgatgatgtggtcaatgccatcgatagtgagcacagatcaaacatcatcgatcttatcttctcagacccctacctgtgccgtacccagatggtcgtcacgacgcatgaccgtcttttctgggagcgtttctgcatcatcgctgaacggcaccggcaggcggatcaacacaccagtagtgtaatgagctatacgaataagggcatcgtcttggtagatcatgctgggggatttcaggaaaaggtctaccgagcgctggctgtattcgatatcaggcaagcgttggtgtactgccgcatttggttcgaatcgatggtgctggagtactgcgtggaaaacggtctgtctgtaactgctagatttggaaagtcacagctcaaacagaatatgtacctgcagctcagcctcgaaaaaaccttcggacttgtcgagcagcgtatctcctacgacctcactcacttccgtttgatcaaaagcgatttggtgaattggcgcgggcagaatcaggagcatcatgcatttgaagagggcagtctgaacttcgtccactcaaaaaccagcaaagaggtcgtcaagatctacgacgcgctccgactgctccagtgccagcttttccctgatgcgaagagggcatctggtgagaagctcctcatcgacctgaatgagcgcatagaacgtggagctcggaaaatcgaagggctcggcggtgcccctgcagaagtacagcagcaacatgcccggctactgcaggagctgaaaggccttgccgcggatgtcactcaagagttgctgtacatcgagcaatgcattgctgccaatcagctacagaatcctgatccaggtggggcgaatgtggagcttgaagtgcctgatgccgccggacagggctag

SEQ ID NO: 354484 - DNA, 1050 bp, Pseudomonas aeruginosa
atgatcgaggacggctatcggcccaacgcgcgtggcagcatggctccagcagccatgtcgttcatgcgcgaccacggcgtgctcaaggacatctacaccgaacgcgatggtgactcgcacaagaccgcccggggcaagaagctctcggtacgcacggtgaaggctcccggcttcggcccgaagggcatccaccgcttcgtattgccgttcaccgtgttcctaaagctcaaggatatcggtggcaacgtactgcccgactaccaagaggagttcgtcgacgtgcccatggcgcctgagcaggcttcggcctatcagcgcctggctgccacgctgacagcggagctccgccaggctctggcgcgacgagataccacgctcctaggcgtggtcctcaacgtgctgctggcttggccggactgctgtttccgaccggagatcgtcaagcatccgcgaaccagggacaccctggccttcgtgccagcgatcttcggcgacgagcagctgatgcccaaggagcaggtgctggtagatctctgcctcgaggagaaagcgaagggccgcaaggtcctgacctacacggtctacagcgggacgcgcgacaccacgtcccggctgaagaaagtgctcgagcaatccgggctgaaggtggcagtgctacgtgcctcggtcgatacctctcggcgcgaggactggatcctcgaccaggtcgatcgcggcatcgatgtgctgatcaccaacccggagctggtgaagaccgggttggacctgctggacttcccgaccatcgcgttcctgcagacggggtacaacgtgtacaccctgcagcaggccgcgcgacggtcgtggcggatcgggcagaagcacccggtgcgggtggtgttcttcggctacgccggcagctcgcagatcacctgcttgcagttgatggcgaagaagatcgctgtggctcagagcacgtcgggagacgttcccgagtcaggtctcgactcgttgaaccaggatggggattcggtcgagatggcgttggcacgacaactcattgcagcatga

SEQ ID NO: 354485 - DNA, 2100 bp, Pseudomonas aeruginosa
atgccatacatcaacctagaagacaaggtagatattactacttacccgtttgactaccacaaccacttctccggaatactaccattagaaagttcgacccactggaccagagagagaaaaacatttcaaacaagtgattcaacaacagaaataaataaaaaccaagagctttcacttataggagtaatcctagcatcccaaaaaagcaataaagaagaaaacaaaatagccacgcagacacaaaaaaatgaagctcatgtcgagctattcaagctggccttagagttaatgttagaaagcaacccctttaaaggcctcagaacagaagattacattagaggagaatgcgtagcagaaaacatatatttggcatgctcaataattcaaggtcggcttacaaagtggcgcacagagttccacatcgaaactccagacatctaccaagccacaaaagaccagcttaccccgccttactccgcagaagttattgagatcatcaaatactttaatagaaaaatctggagtggcaacaagtatactcctttcgatgatgcttattgggctagaggtgtaatccgcaaaaaataccccttcatctatagttctctaacactgtgtttcctcctggagacaggaacagttttcactcaaactgcaatgggaacaagtgattttaaaagcctaaacagtacaataaacgaattcaacagaaatgagaaaaccgcctatagaattctagcacacaccgcacacagctatacaacagccgaacaatttttaagtgagctaaaaagtataaccaacttattctcttcgacaaaagaaccaagtttactggcaggtatagatctactcggagcagagactcaaacaggattttatgaactcttctttgaacacatgataaaaaacgaaaccaatataaaaaactatctaaagaaaacagaatctaccaaaaaaatcgtcttacacattcactgcggcgaaggaaccggaatatcagaaagcaaccgatccttaacgggctgctttctatacacgaacaacaaagataacacagccaccttatcatcgcagctattcacacatgcgataacctgttataaaaactctttaagaaaaagtaataagaacctgagagagcaaaaaaacttaagcataaaagaaactccacccagtaacctatcaggtctatttgatgagcttttccatacaaacaaattaatagtagacagtaaagaggcaagtcgtttcaacatcactagcgaaacaacccaaagcttgacttcatactatgcaaaaaccaacattataaatctttgccaagcacttgaaaaaccgtacaagaacggaaaaagttattatgaatggctcaccgacaaagaaatctttaccattcgtatagggcatgcatactactacaggtcatatgtagcctacaaattcccaaaaatatattttgacacaaacctcggcagcaattttataacaggctcgtccaccttattcagttcaacacaagagtacaaaattaacagagggttacgccacctcaatggttatatagaaaccgaaaaactccgaaaattagaggagaggttattctttcccaggacgaacgaactagagagcgcagatcacaatgatcaaaacttatcgaagacatgcccacccaaagtcatgaaggcaatatataagtacataaattcccatccactctcttgcactcccccccaaaaaaatgaggtagccacaactcaggtttccgacattgtttccaactggcgatcttatattctcggagcagacggccaaggcgttgaacattccaacatgcagcatgagttcatcagaatgatagctatgctgacttataggcagcacaactcaggaagaagaattccagtcatagcaattgaggctatacaggatctcttaatagacatcgcaaaaatctactgggaagagacaattgggccagtaggaacatccatctcgacaaagcgtcacacaatagaacgtctagaaggctttatagcccctcactctgtcatccacattagaaccaaggagaaaccggaagaacgcaacgacatatag

SEQ ID NO: 354486 - DNA, 1320 bp, Pseudomonas aeruginosa
atggagaagagtgtgacggtgaagtcaagtagttttcatagctgtaatccagaagaggtatccgagtttattgagagaatatacgcagataataaatttagagcgcagagcagtgagagaaaagatgtagttatgtttgggcagtcgtggcgcggtataggtatatatgatgtagactatgagatgccttttaagtttcattcagaaagtgggcggcctaactatctgttcctgtcctgtgttagaggtggtgcctgttattcctctgacgatggatctcatagtcagtgctcagttggggatgttattccgatctcgccaggagggcgatcagattgtgtaacgaagcctgaggggtttgggcatctttccgtaattatcgattcgagtgatttgaatgaatttgttaccctttggacagggaaggaactttccgagccagttcagtttgacctcaagtccgtttctggtggaaaacaatgggtagctgctgcggattgtctgcgtcggatgatgctcatgtcgccaatgccgtacgaggcagcatctgctttatatgagtatatgctgaagctaatagttacgagccatagtagtaattatgatgagttgattggctcggataggtgtgagaacgatcgcatcgctcaatctgcacttgctaaaataaaagacaaccctatgctctggatgaccttgagctcaattgcctccgcgcttggttgcgctacctgctggcttgaaaatgcaattcttaggctcactgggaagagttctattagtctttttgaagagtcgcgtttagatcatgcgcggtttgcactccttacagatgaaggaaggacgatggttgatattttccattcttatggttttgttgtatcgaatcgtttgtttttattgtatcagcagcgctttggagaatcgcccatagatacttatcgacgaaatcctaattctgcttctgatgagactgcgtttaaaaacattaaaggtgtgctttgtgagaaagagttaatagagtttattgatgcacgtattggtgaaaaaattagcttgagtgatttggcaaattttttaggtcttagtgaatatgcaacgattaaggtttttaaggagcgatttgcttgtactcctatgaactatataaatgaaagacgtcttgagaaagcccgctttctgctgtgcttcacaaaggaaagcattgtttcaattgcactgaggtgtgggtttggtagccagagttatctgacaacgcaattaaagcgccgttatggtgttacaccccgtaagctacgcatacaatcgggcggggattaa

SEQ ID NO: 354487 - DNA, 2163 bp, Pseudomonas aeruginosa
atgaaaacggagacgaaggtgatcaagggacgccagggcatcgcccgcaatcggcacaccccgttgtgcctggggctgctgctggcgctgagtccgctggccgcggccgtggccgacgcgcgcaaggacggcgagacggaactgccggacatggtgatcagcggagaaagcacgtccgccacccagccgccgggggtgactaccctgggcaaggtgccgctcaagccgcgcgagctgccgcagtccgccagtgtcatcgaccatgagcgcctcgaacagcagaacctgttcagcctcgacgaagccatgcagcaggccaccggggtcaccgtgcagccgttccagctgctgaccaccgcctactacgtgcgcggcttcaaggtcgactccttcgagctggacggggtgccggcactgctcggcaataccgccagttcgccgcaggacatggcgatctacgagcgggtcgagatcctccgcggctccaacggactgctgcatggcaccggcaacccggcggccaccgtcaacctggtgcgcaagcggccgcagcgcgagttcgccgccagcaccaccctcagcgccgggcgctgggaccgctaccgcgccgaggtcgacgtcggcggcccgctgagcgccagcggcaacgtgcgcggccgagcggtggccgcctacgaggaccgcgactacttctacgacgtggccgaccagggcacccgcctgctctacggggtgaccgagttcgacctgagccccgacaccctgctcaccgtcggtgcgcaataccagcacatcgactcgatcaccaacatggccggggtaccgatggccaaggatgggtccaatctcgggctgtcccgcgacacctacctcgatgtcgactgggaccgcttcaagtgggacacctaccgcgccttcggctccctcgaacagcaactgggcggcggctggaaaggcaaggtcagcgccgaataccaggaagccgattcgcgcctgcgttacgccggctccttcggcgccatcgacccgcagaccggcgacggtggccagctgacgggcgccgcctacaagttcaagagcatccagcgcagcctcgacgccaacctccatgggccggtgcgactgttcggcctgacccacgaactgctcggtggggtcacctacgcccagggcgagacccgccaggacaccgcacgcttcctcaacctgccgaacaccccggtcaatgtctaccgctgggacccgcacggcgtgccgcgcccgcagatcggccagtacacttcgccgggcaccaccaccaccacccagaaaggcctctatgccctgggtcggatcaagctcgccgagccgctgaccctggtggtcggcggccgcgaaagctggtgggaccaggacaccccggccacccgcttcaagcccggtcgccagttcacgccctacggcgggctgatctgggacttcgccagggactggtcgtggtatgtcagctacgccgaggtctaccagccgcaggcggatcgccagacctggaacagcgagccgttgagcccggtggaaggcaagacctacgaaaccgggatcaagggcgaactggccgacggccgcctgaacctgtcgctggcggcgttccgcatcgacctggagaacaatccgcaggaagacccggaccatccggggccgcccaacaatccgttctacatcagcggcggcaaggtgcgcagccagggcttcgagctggaaggcaccggctacctgacgccctactggagtctctcggccggctacacctacaccagcaccgagtacctcaaggacagccagaacgactcggggacgcgctactccaccttcaccccgaggcacctgctgcgcctgtggagcaactacgacctgccctggcaggatcggcgctggagcgtcggcggcggactccaggcgcagagcgactacagcgtcgactaccgcggcgtgagcatgcgccagggcggctacgcactggtcaacatgcgcctgggctacaagatcgacgagcactggacggcggcggtcaacgtcaacaacctgttcgaccggacctactaccagagcctgtccaaccccaactggaacaaccgctacggcgaaccgcgcagcttcaacgtcagcctgcggggcgcgttctga

SEQ ID NO: 354488 - DNA, 1533 bp, Pseudomonas aeruginosa
atgagcctcggcgaactgctggaaacctgccgcagccggcgcatcgaactctggagcgaggcgggccgcctgcgctatcgcgccccacagggcgccctcgacgccggcctcgccgagcgcctgcgggccgagcgcgaggccctgctggaacacctggaaggcggccctggctggcgcgccgaacccgacctggcccaccagcgcttcccattgaccccggtgcaggccgcctacgtgctgggccgccaggcggccttcgactacggcggtaacgcctgccagctgtacgccgagtacgactggccggtcgacaccgatccggcgcgcctggaggcggcctggaacgccatggtcgagcgccacccgatgctgcgcgcggtgatcgaggacaacgcctggcagcgcgtgctgcccgaggtgccctggcagcggctgaccgtgcatgcctgcgcggggctcgacgaggccgctttccaggcgcacctggagcgggtccgcgaacgcctcgaccacgcctgcgcggcactcgaccagtggccggtcctgcgccccgagctgagtatcggccgggatgcctgcgtactgcactgctcggtggatttcaccctggtcgactacgccagcctgcaattgctgcttggcgaatggcgccgccgctatctcgatccgcaatggacggcggaaccgctggaggcgaccttccgcgactatgtcggcgtcgagcagcgccgacgccagtcgccagcctggcagcgcgaccgcgactggtggctggcgcgtctcgacgcgctaccggggcgtcccgacctgccgctgcgggtgcagccggacacccggtccacgcgcttccggcacttccacgcgcgcctcgacgaggccgcctggcaggcgctcggcgcgcgcgccggcgaacacggcctgagcgctgccggcgtggccttggcggccttcgccgagaccatcggtcgctggagccaggcaccggcgttctgtctcaacctgacggtactcaaccggccgccgctgcatccgcagctggcgcaggtgctcggtgacttcaccgcgctcagcctgctggcagtggacagccgccacggcgacagtttcgtcgagcgtgcccgacgcatcggcgagcagatgttcgacgacctcgaccacccgaccttcagcggcgtcgacctgctgcgcgaactggcgcgccggcgtggtcgcggcgccgatctgatgccggtggtgttcaccagtggcatcggcagtgtgcagcgcctgctcggcgatggcgaggcgccgcgcgccacgctacatgatcagccagaccccgcaggtctggctggactgccaggtcaccgaccagttcggcggcctggagatcggctgggacgtacgcctcgggttgttccccgagggccaggcggaagccatgttcgacgacttcgtcgggctgctccggcgcctggcgcagagcccgcgcgcctggaccgacggcgatgccacggaacccgtcgaggcgccgccgcaggcgttgcccggtag

SEQ ID NO: 354489 - DNA, 825 bp, Pseudomonas aeruginosa
atgaggccaagcaaacaatgcacaagatcctcagcagacagcatcaacgcccaccggccacctcccccaaccatgcagctccgggaggccagtaatccgatgcgcgcaaccaaaatcaaaatccagggtctgtcgattccaagtctgatcagcagcgacaatgagcgttactggccgatacgccccatttgcgaagctatgggtcttaactggcatgctcaagccgccaaactgcagccccctcgctacagcccgaccgagcatgacgttgccctgcctggggaaccactgctgaaacgaatgctgtgcctgccgcagtcggaattcgagttctggctgaaaagccttagctcgcgcaaggtttcccccggcgcccgcatgcgactcgatcagttgcgcgcacatttctttggtgagcccacaccgctggcagggccgacaccgccaactgcaacggcagcacctgcggtgctgaagcggattctgaactggcgagcgcaacaggctgagccaggaaaccgcaaagccgtgctcaaagagctctccgaccaattcagtgcgaaaaacggttttgaaattgctgaagcgcaggagcaccagttgcgtggagccgtcgcttcgctcagcacgatcatttatcagcatgaccgctcgaaatcgccaagccagatgcctgtttcacaacgggtcgacgcgatcatcaaatccatcgtggatgcccgccctcagcgcattcatctactcgactcggactttgcggccctgttgtgcagcattgagcttgaggagcaccaccatagcagcgctcagcacgaacagccttag

SEQ ID NO: 354490 - DNA, 627 bp, Pseudomonas aeruginosa
atgcgtaagtgcccccttaagtgcccccatgcacgtatttccgatgagcggttatttgaggagttgaactggcgtcctgagttatcgtttcgcgaccgtgcgaggcctgtcaaccaccgggaagcattcaatagagtcggtcggtacagcataacctcggttatgtggccaggagggtttgagcccagctcagaccgggtgctgggtagatgtcaggtcacgcagttgggttttttccgcggtagcgcaccatgggctcatctaggacgatttgagctgaggtgcggtatgagacactcgatggttacctgtcacaactgtggcaaagcgatggttccgagagcgtcatatagccgtggtttctgggggtattcgccttcgtccaatcattgccccttttgcctgagtgagaactggcacggcggaaatcctgggttaggggctcggctgctcgctttggttggcctggctcttggtgttctggcctgcgtgttggtaggagctcttctgttcaaggtgcagtggtggcttggtgtcgaaggacagtggcctctattgacgctgggcacatgtgctgtatcggttagcgcgggataccatttctacaactggtttgttgattgctga

SEQ ID NO: 354491 - DNA, 771 bp, Pseudomonas aeruginosa
atggtgagaggccaggacaatcctttcaaggacgaactgagcctcgtcgacaacctgcttaaagctggggatgtaattctgagcaccggaaacaccaccggcgcgaaaattatcaccaaagggcaaaaacttggctataagcacgcaagatccagtcacgtcgcgctggttcatgcagacttcgtctgcgtcgatgctatgcctagcctgggtgtttccaataggctggtgtcagatgtcttgagcgatgtgaagcctgattggcgggtaattcggtgtaagaaacttggctcggaacacctcgacagtatttaccaggcatgtgcgttctatctggcgcagccctacaaaatcctgccctctaaaaagccaatgaaagccgcagcctactgctctgagttggcccggaaggtgtttctgcatacaggtgttacggggatcggcatcccaaatgacagcgtattgagtcccggaaaatttgatgagctggctgacaatcatcttcagtgggaagacgtcaccgagcaagtcagacccgcgatcgagttctgcttgaaataccacaaattgatgagcatcgcctccaggctcatgattgaagggctcaagctgaatcgcaagcgcttcgaagaccggaaagcccaggtcaaagaaattcagctggcagccagcaaaggcaccatccctagggaaaaagcaaaggagttgattaaatccatccgggaaattgagaccaacatgaaccaccagttctgggatcattcgaagtaa

SEQ ID NO: 354492 - DNA, 2715 bp, Pseudomonas aeruginosa
atgagttcggctcggcatgactaccagcaattcctaacttggcttcatcttccagaacgcggtgctaccgaagacactcgacggtttgcaaatctggtcgaccaagatttcgacaccgtggccgcacactcgcgcgctatgagccgccgatcggtgctattggctgccaaggctaaagagtctctgctccaaaccgacttcacacctcccgcagttgcgggagcggttactgttggtgagtgggcatggagcgcactgcatagtcttaccgtcggcccttttcgtggcttccgagtggctgagacgttcaattttcctaagcgaattaccatgttctacggccctaatggcagcggcaaaacgagcctctgcgaagcgttagagctggcactcttgggggccgtagatgaggcgtcggctaagcgaattcctgctcaacgctatttcgcgaaccttcacgaagataggtatgaagcccccaccctcgctgcacgaggcgcggaaggtcaggtgtcggcagtgcaagcggactcagaggtctatcgattctgcttcgttgagaaaaaccgcatagataacttttctcgaatcgcatctaagagcgcaggtgaaaagaaggatctgatagcggctctgtttggtatggagcagttccatgacttcgtcactaacttcaacgagtcgatggaccagcagctcaatctagttgcgatccaacagcaggagctcgaaacgcagcgtgcagcgctgcagcgcgatcaagcaacaataaatggcgagctccaggcagttcagacaatcgcgcaagaggaggctgcctatgctggagcgtatgctgccggcctctcgtaccagcagcttcttgaactcatcggcagcgatgccgctccaggtcgtctgcattacctcaatgcgcaactggatgggccaacgccaggtctctatggcgtcagcagcgaggcgttggttgcggcatatcaggttgcggatcgtgagcaggagctgctcgaggatgtggacaaaaggctaactgccaagactggtgagacctccttccaaaatctgtacaacgcggttcttggcttacaagccttgtcgcccgataactgccccgcttgcgggacgccaatcaatggtgattataacgttgtacgtgacccatacgtgcaggcgcgtgacggtctggctcagcttcaagagctcgctaacctgcaggctgaaaaaaacgcagtacgaggcgaatgggaacgtgcgtcccgaggcttggaggggctgttaactgccttcggtcagcgcgttagcgctcagcctgatcatgccgatgacagggtgcgatatctcgcatctccgggtgctgaccaccgtgctgcctggtggaaagcgaactatgtaaaacaaggcgatgcgccttcgatggcgcagaggatcgtcgacttagcagtcgaatgcgaaaggatcgatacccagacaaaccaggtactggcagatcgcgcggcactggcacaagagcgcactcggcttgttcaggcagcgcaagatgtagctggttttcaaacacgtcgcgctgaggtagcccggcaagtcggcatagctagacagacaattgccaactttgaccaagcgaatgcagcgctcatcgatgctgtgcagcaagaggcagtgcagctcgtactcagtcgacgcattaaagcggcctatgacgaattcttgaggctgctcaggcagttcagatcagagctgcccggtacgctcatagctgggattaacactgtcgctctggagatctataacgagttcaacagacgcgatcatgacggcgacaagctagcggcactttatctgccgaccaacgaagaagagcgtatcgggctggcgtttcgcgctgccccagataccagggtagatgctttgcacgtcctcagcgagggacatgttcgttgcctgggcgttgcaatccttcttgcaaaggcactgcatattcaggctccgacgatcatctttgacgatgcgatcaacgcgattgacaccgagcaccgtgaaggcatcagagaggcgatcttccagagtgatcgcttcgcagcaactcaaattatcgtcacgtgccatagcagcgaattcatcaaggatctgcagaaccatgtcgagaaaggccaatggacggcctactacttcatgcctcatatcggggatcaccggccgcgggtaaaaggtaacgagatcaccttcaactacttggagctggcccgtgccgccttggacattggtgactggcgcaacgcactgggcgcatccaggcaggccctggagatgcttacggacaagatttggaagtggctcggcaagaacgacctcggagtaataaccctgccgttagctggccgcggggcggagccgaatctgagaaatctctgcgaggctttgaaaagacggctcgatgactcgagaacatttgtgcaccaggacaagcccgccgtcgttcaggggcttagtgacgtcataggtgttccggtgcaatcgaacgtatggacgtatctaaacaaaggcgtccatgaagaggctgacagagatgactacgatccgaacctcgtccgcaccattgtggagaaccttgaaaggatgaatcagcttcggcttggctcaatgcctgttgctatcgctggagccgcccaagcggcagttatgcaagcggtcgctgacgtggctaatccgctataa

SEQ ID NO: 354493 - DNA, 1053 bp, Pseudomonas aeruginosa
atggagtgcttcagagtcgacgaaagtggctataccggatttgacctgctaaatctcgagcagaggtttcaaggggccgcagccattgccattgatgatgatcaggccagacgcttgatccaagagcactttcctaagctacaagcggaagagctcaagtaccgggctctgtcacaccggccagccaatcacccacggcttctggcgttaatgcgtgatgtcctgacccatcacaagtgcgttacctacgtctgtgataagcgctttctgctgctgctgatgtttctggattacgcagttgaaccgtactactacgagcgcggatgcgacttttataaggatgggcagaactacgcgctcgggtcgctgctttatgtggcgggccccacccttcttggagaggcagcctttgagcagttgctcgtttgtttccagcgcgcagtaaaggaaaaaagccctgcagcacttatcgacctcgtggctgctgttcgcgccacacgctggcaggaactaccggaagctttggggcctttggcgcagtatgccgcgccggaatgccttcaagcgatcgccacatcaggtgtcaccactgacgccgcttttgtggtgttgcaatcgctgataagccggatggaagtcatggctgatggcccctacttggttgagcatgatcagtccaagaacctgctcacttaccatgacttgctgctgcgctttattaatcacaagaacgaggtcacatttcgccaatcggagatcgcgagcctcacctttccactcaagctccagtcagtgacacaagtcgactcgaggaccagtcctgcagtacagctggcggacgttgtgattggtgctgccattgaggcgactaacacgcttacgggacagcgcgccggagggttgaatcctcatgatgttatttccctctacgcggatcatcagataatccacatgctgccttcgactgacttcgaagggctgaaacgttttcgccagggtacgcaggccaatgaggtaatagattacttcagcaaaaatttcagtaagccctaa

SEQ ID NO: 354494 - DNA, 1056 bp, Pseudomonas aeruginosa
atgcagcgccgaacacctcaacaaccgggctggatgatagaactcacagcagcggtcgatattccagcggaaaaaatccagtggatttggccaggctggctgccaaaggcaaagttatccattcttgccggcgcaggtggatgcggcaaaaccacgctggcaatctcgctggccgccacgctcagcagaggtggtgactggccagacggcagcaaatgtgaggcagcaggcaacatcgtaatctggagcggcgaggatggtatcgctgacacgatcattccccgccttacggctgcagatgcagacctaacccgcgtgcacataatcgaagggctaagtgatcagcgcgggaacaggcgacagtttgatcctgcagccaactttgcccttttgaatgaggcagccgcacgtattgacggcgtttcattgctgattttcgatccactgatcaatcttattcgtggggatatgcaccgagcaaacgaggttcggcaagggctacaaatggtagtggattttgcagagcggcattgttgcgctgtcctcggcatatctcacctgagcaaaggtacggcccagtcctccgccgctaatcgtgtaatcggcagccaggcattctccgcgctcgctcgcactgtactggtggcagagaaggatcaaaattcagaagccagggtgcttgtccgagccaagtccaacgtttcgattgataacggaggaatcgagtatttcgttgagcccatcgttatagacgagcagttggagacaacctgcatccgatggggagaggccatcgatggtagcgctgaagccattctcgctgccatcgagcaaacgggtgacgccagacccgcatcagctactcaagaagcgcgcagctttcttgaggagacgttgcaagctgggcctgttgcaatcaatgcgttgatggctttagctgaagaacgttgcatttcttcggcgtcacttcgcagagcccagaaacagctaggtatacgttcacacaaaacaggtatgcagggcggatgggcatgggagcttcccaccgctccctga

SEQ ID NO: 354495 - DNA, 798 bp, Pseudomonas aeruginosa
atgagcagtcaggtcgacatcatcaagcccgaatcgcgcatcgtcgtccagttcagttgcggcgcggcctctgcggtcgccggcaagctggccctggcgcagtacggcgatacccacgacgtccagttcctcaatgcctatctggccaacgagcatcaggacaaccggcgcttccttgccgactgcgaggtctggactggccggaaaatcacggtgctacgcgacgaaaagtacggggccgacgtactcaacgtcttccgccgcgagcgctatatgaagggccgcactggcgcgccctgcaccaagctgctgaagcgtcgcctgctggacacctggaagcgtcccggcgacgtgatggtgctcggcttcactgcggaagaagagcaccgcctggacgacttccgggagcggaaccccgaccgcccggtgatcgcgccgctgattgagcgcggcctgggcaaggaggactgcaaagccatcatcgcgcgcgccggcatcgaactgccggccatgtaccgccagggctacgagaacgcgaactgcatcggctgcgtgaaaggcggagaaggctatttccgggcgatccggcaggacttccccgagcagttcgaagccctgtgcaaggtgcaagacgagcttggcccgggttcgtacctcttccgcaaccgtaagaccggggagcgctactcgctccgcgaccttcctgctggaccgatccgccgcaacgaagccatcccggcctgcagcttcttctgcgagctcgccgaggccgacattatccataaggagccggcatga

SEQ ID NO: 354496 - DNA, 1896 bp, Pseudomonas aeruginosa
atggacaaagctgtgcaaattattagcaacaacaatgtgtacggccggatctatcaacgcgcggccgacgtgactgagcctctccgagcggtgccgaggattagctgggtaacgagcgtgttaaccacacttgcggatcttagtattctgaagccaattcactcgaagtctgcaatggcagtaaatgcattggctagatttgttgtcacatgcgggaagtcgaatgaaattatcaatcttccagcgaaaagcctaactaactcaaagatttatgagttcatgtgtggtttcgagactttcctagaatctgaagaccaatcagaaaatgccaaaaacacagccagtgtagagaccttgaggctgatattggttggtcttgagaatttcaagacaaaggaagttcttcacaggaaggcgatcaatttcagatccagatttgctcaaggaaaatttaatacgggcttgataagcgatgtgggagatataaaagggctcggggtagattttgtgccggttggagcgatatctcacgagtcatttttagaactgtataaagaaataaagtcgagaatagatcaggacttggatcacataatcgattgctgcgtaagtgatatacaacgatttgcaaatgtcagaaaggaaatgtccaggctggcaaaaactcatgttgaacaggatgtagtcgcattcatcagaaaatgtatatcccagccaaaaggcatcaagaaagaggatatggagcgctacgagtcaatatcggcagagttaatcttggccgcacatatacaaatattagatggaatgacggctgacaaatcaatattaagaaaggaagcatattttaacaagctcgacagggcggtagaagaagtctttggggacatgtctggatattttgcgtcagcaagatcaacgctggagagtcgctatagatgcactgggcaggaactattatcaatctttattttactgctctgtcacactggctggaatcctggggggttaatcggaatgacccgggaccggatggaaaagagtggttctacttgggaggttcaaggtttcaaaagtaagacagatgacgataccccagtggaatacttagggaaggaacatgctggtgctaatgaggcattgtcagcgctggattggcatcacaagagaatggtcactgatcatatcattaaagaccaaaccctttggtacacctcatttgtccctggaggtgaagttaagccgaatgttgggatagtccccaagtcattgttctttaggcgccacaacttaccaaaatttaaattaattcaaattcgtaatcaggttcttgagaaaaatcggctggaagggcgaagcctcgaacaggtacggcgtaaggctggccataaagacgcccaaactactgtaagctatctcgacaatctagttaataggcgaatgtattcttccattaattttgagttctctcgtcgattagaggagaccgtaatatttcgacttcaagaagtggggaagctcggcgatatagattgtgacaagggtctggttcgtgaatcgctgttaatgcctatcggtgatggctcatattgtactaatcctaagacagctccggactccgccattattaatgatggactatgttcggccttaacttgccacgtaggagaaggctgtcctaatcgtaggatagttatcgataatagtagtttggaatctttaattaggaaaagaaagtactatattgataattgggctcgcctagagtcaaataatccctcggcctttagagagtttcattgggaaagtatgttgtttgtttttgggctctatcactacattttcaactcatcctatagggtttatattgaaaatctggaagagaggatgatgctgtga

SEQ ID NO: 354497 - DNA, 2265 bp, Pseudomonas aeruginosa
gtgaatgtctcaatgccaggtttttctttacatgtaaaaaatgcatttgagggatttcctctacatgatgatttggctgtcttggcgccaggtatcattggcgttaagcgttgggatgttagggccgacgaagagtggcggctctatgataaatatgttttttcggactattggcttccggcgaatagtttgtatccggccccgcaatgtctactagatcgtgacgaatttgtagtggctggaatttatttaattgatgcttacttaaagagatcagctagcaagaagacaggggctctaagggtaaggtggcagtttaaggtatttgttaagttccttgagtacatctggattaatgatatttactcattgaaggatgtgtctagagagttaacggatgagctggctatccagctttccgaagagggttggataaatgcgctagggattaaaggacgtgttgcggattattattacgatttggtcggaaagtatggggaaaatcatgctcgtgaagtcgcttcaggaatgcgtggcgaaagtattcggcgcagtttgtccacaaatttggagtctaaagaaatagggaaaagtatacgatatttgaatgagtttgccttctgggaaagtgaaaatgaaggtctgcgagaagagattttaccgagcggcaaagatgtaaagtttggaagttctatgcttagacaaacgttaggcgccattaatagactttttcatcttcctcgaggatacggcttgcccatttatccatatgagagtgttaatgatctggccagaaggctgtctggtaattcagggcgtacaaaaaatgtcagcccttcgacggcagctaaactctttaccgcgtcatttgagattgtatatggcgtgtctgaagatattctccgccttctatccgaggtgtgtgatgcggttattgataaccatgccgaggaacgggatgttttagggtataacctgaaagatctcgtcgctgactcaaagtacgcagagtctatataccaaaagactggtattcggctagataatttagattcagttcttgagctccgaggtcttaggtcttgtattcagcttttgatgtgtgcgtgttttttgattattgccgtatgtaatgcgcgacggcgagatgaggttgagcatcgaaagtttgggttgcatcgttcgtgcgcgaaggtaattaatgaggagctggggatttatttttctgtattttatatagagaaaagtatccagggctatcatgggttctatataaacaaatcaacatataagtgcattcgtattttggagcgaatgcagaatgcttatcgtcgagttgacttggctctcggtcgtgatgtcaatccagtacctcctttggagcaatcgttattctcttatcggagactcagtcgaatagaaggggtcggtaaaaagaattgttggtttagtttttcagacgtccatcgtacttatgttaagcattttctcagatttgctttgaagggtgatcaggttccagatatatctgcgcatatgttcaggcgattatatggattgatatttatgtatcgtcatgagattccggagttgcaggcgctatcctaccaatatatgcatgatagcctttcgtcaacgcttatttatgtgactgatgctcatgttaaatctgacctagagtctataggttatctatatggcgacgcttctgctcggatagaggttcatgatagtcacgtttcagatattgagtcagatctaagagaaatcggtagggaaagaattgaagagattgtcagttgtgttctcactggtgtagacggtgcaggtggtttctcgaagttcctaaaaattgcctatcgccgatatcaaaagtctgtggagtttaaagatctgtctttggctgatggctcagaatatatcgcgtctaaagttgttggtcgagggcatttcccccgcccttatcgacacagtatatgtatggcaggtagtgtaagaagttctcgtttggcaaattgcagtgcgaagaaaaaaggggaaggaatccatcctgagttagcttgcccttcggtttgcagtggctgcccttttcaatatatgaacaggcggcatcttgataatctcatccacgatcatgagatcatggagaaagagttgaagtcacttctgccgggatctgtccagtatgataatttacagcgggatcttgtttatctgaatgagattatcgttgggattaaagaagagattggcgatggaaagtag

SEQ ID NO: 354498 - DNA, 624 bp, Pseudomonas aeruginosa
atgagattatcgttgggattaaagaagagattggcgatggaaagtagagggcaaatcaataagcgcgctgctttgagtaatattctgttaaagaaagatatcttgttgtcttggaaggaaaatggcattcccggcgctagcagcgaaatgaccagttcagattgtttggaatatttccctaggtcaataaggcagtttaatgcctgggatttatctaaaaatagcgatgttgttcgtaacctgtttccaggtgtgaagcgtaatgctaatgatacccttaataactacccgtctatcaggctggagatctctggtctgctaagatcactaagatcaatgtcttcgttgaaaagaggcaagcctgagcggttggtcgataagcagaagcagatagacgagtcgcgatcttatatctcgcttttggagcgtgaattaattcagattagaattgagcgatctgatttggtttctcagcttaaaaaggtcaagtcgcgtgatgcatctattgttggcgagctaaagtctgtagtttcgcggttggagtcggaagttggtcatctgaagagagagaattctgacctgattgcaaccctggcaaaaattgctcctttgcgggaggtttag

SEQ ID NO: 354499 - DNA, 1245 bp, Pseudomonas aeruginosa
ttgagtgtaaggatcaagctgtcttgggtgaggtatgatggcttaagttatgctgttgcccgtgatgaaaacagcaagcgactatttttggagattacagattactctgtatatctctctaagatacgccgatttagctcggtaacagttgagagtgagatgtatcatgtcagtacatttctgctgtatttgtttggtctgggtaagcaggtttctgaagttaacgacatttctcttagagagtttagggattccgaactcaagaggctgacgatatccgggaacggctcatctcctgaaagagtgtatatgaggacggtcaatgctagattgagacgagtctatcgtttcttaatgtggtaccaagatttcaaccttggggtgtcggggcttatcggtcctcatggagccgtgacttgttattattcaatgggggcatcgggcgaaagccaaagaagcaaaaatgtatatccactattgctggtgtcgtcagggtcgtcaagtcgccatcgcttaaatttcgtggcaaccgaagagcatctaagaaagcttaggacatattttgccaaaagatttgatggttatcttaggcataggaatcttttattgattgaagtggcgaacgttgttggtcttcggcgaggctcaattaattcattaacttgttctctttttctggattcggttgctcagagcgaagggattgatgatgcgcgcttagttccgccttctcaaaaatttggatatcagaatgagtacgagtttccattcactttggtatctaatgtcttacagtttattagtggtccccttaaagagttcaaggaggatttgggtatcactgacaaagtgacaaaagacaggatttttctttcatcgaaaactggcaagcctttgaccgatcgtgccatcaccgacatttttagcaaggccttacgagagattggtgtttcgtctggatcaattcatggtttgagacgcaaatacgccaacgatgaaatcgacaaagaaattaactaccggatcgaaaagggtttagacacttctgtagcttcgatttgtgcggcagtgtccttcaggctggggcacgcttcccctgagtcacttcacccttatgtttctgctcgactacagcggcgtatgaaggtcgaaagtcctgaacagaaaatcgctcgccttgagaaagagctggcggagacgcgtcgagagttggcagagcgttcacctcttaccccattcaagtaa

SEQ ID NO: 354500 - DNA, 690 bp, Pseudomonas aeruginosa
atgtgcggcagattcgctcagtaccggggcatgcaggactacctgcgggagctagatagcgagcaggaggtgatcggcctggtgggcgatgcaccgattgagcgctacaacatcgcccccagcacacaggtgcagctgctgcacagcaaggctggcgggctggtggcagccgcggtgaggtgggggtggatgccgcattgggcgaagggcaagatgccgccgccgatcaacgcccgggtggagaaggtggccacgggcgcatacttccggcagatctggccgcaccgggccctggtggcggctgacggctggtacgagtggggcaagggcgaggccgccccgaagcacaagcagccgtatttcatccgcctacgagatggctcgccttgtttctttgccgcgatcggtcagtaccccgacgaaggagagccgcgcgaaagcgacggctttgtgatcatcactgccgacgccgagggaggcatggtcgatgtgcatgatcgacggccggtggtgttgaccccagacctggcccgcgaatggattgactcagctaccacgacccaacgggctgagcagatgttgctgcaccagggcagaccgcccgaggacttcgcgtggcacccggtcgaccgagcggtaggcaacgtacggaatcaaggagcggagctgatccagccaacaggcgattga

SEQ ID NO: 354501 - DNA, 438 bp, Pseudomonas aeruginosa
gtggacagcgtcaccatcctcgggccggtcgattcgtcgtcgacgcccattcccttcttcctgccttccgtgccggcgggcttccccagcccggcccaggaccaccttgagcaacgcatctcgttggatgagctgttcggcctgcaccggccgcagatctatctggtgcgcgtgggcggcaacagcttgcaggcgctgggcatccacgatgaagatctagtgctgatcgacaaggcgctcactccgcgccgcggcgatgtgatcgtggcttgcctgaacggcgaaccgctgctgaagatcctcggcggcgacaagcaccaagtcattctgcagtcggccaatccccagtacccgccgcggtacgtgctcgaagccgaggacttccaggtctggggcgtgtacatcggcctgtgccgggctgggcgcgccagtggctga

SEQ ID NO: 354502 - DNA, 1278 bp, Pseudomonas aeruginosa
gtggctgaccacatctatgccctgatcgattgcaactcgttctactgtagctgcgagcgggtcttccggcctgagctggcacacacgcccattgtggtgctgagcaacaacgacggctgcgtggtgagccgcacgcctgaggccaaggccctgggcatcaagatgggcgtgccctggttccagatccgccaggccttcgaggcggccggcggcatggccttcagctcgaactatgccctgtacggcgatctcagcgagcgggtgatgaccgtgatcgagggcatggtgccggcgctggaggtgtacagcattgacgaagccttcgccgagctgaccggtgtcgtgggtgacctcgaggctctcggccgcgagatccgtgcccaggtgctggcctgcaccggcatcccgacgggggtaggcatcggcccgaccaagaccctggccaaactcgccaactatgcggcgaagaagtggcagcgccagaccggcggggtggtcgacctgcgctgcccggagcgtcgcgccaagctgctggccgtgacgcctgtcggcgaggtgtggggagtcggccggcggctgaccgaacgtctcggtgccatggggatcaagaccgctggcgatcttgccggtgccgatgtctggagcctgcgcaagcaattcagcgtgttgctggagaagactgcccgagagcttcgtggtactgcatgcctcgaactggacggcccagcaccaccgaagcaggaaatctgctgcagtcgaatgttcggccagcgcctgagcagaatcgagccgatccgcgaggccgtggccacctacgcggccagggcctgcgagaagctgcgcgcccagcgctcggtttgcaagcgggtacgggtgagcatccgcaccggcatgttcaatccggacgagccgaaattcgcccggggcgtgctgtgcgagctgccatacccgagcgacgacacgcggttgatcacccatgcggccctggtcggcctggagcagatctaccggcccggcttcacgtttgccaaggcccaggtgctgctgatggacctatgccagcgtggcgagtacacggatgacctgtttgccgctacccagccggccgcctcggagaaggtcatggccgtgctggacgcggtgaatgcaaagtggggaaggggaaccctgcggccaggcatagtgccaccgacgccagcttggggaatgaggcgggagatgatgagccagagctttacgacccggctcgatcagctttggagtgtaagggctgactaa

SEQ ID NO: 354503 - DNA, 768 bp, Pseudomonas aeruginosa
atgtctgatcaagatgatatcgatgataatgattattatggcaactatacaccttatcaagcccctgaaaacatcgagcagatggcgatatacacggctttaagaagccttgttttcttcgggagcaatgtcaatctcaacaaccaggcaatgaatctcactattgttgatgaattcattatggatctggagtatggctatcttcgtagcaaatgtgatgaatcaaacacaccttaccaagtcatctttttatcggctcagtcgcagatgtgggtattctctgcctatgagttgatgcgcacttggcgggagaaaatcagcaagtacctcaaggcagccaaaaacggcgggttgccgctaatgctgaaggagttgcagaagccccgcgactacgagaattacgaaactcagcgtcggattgacgaagtcacctttcttatcaacaatccgaagctagtcgaggccctgcaaaacgaactcaaacgtactcagattctgttcacgcagatggaattattgaggatgtctctagccaagcatcagatgagaaagaagcctaacgcccacgtcctgactccaaccgttgggtacatgaatcgtttttgtggttctctggagttccagatcaacagtggccaggtgatcatccaaaacatcagccgcagggacattgctgatggtattcgcgctatcccaacgtcgaccgccccctctgacgaatatctagcctcgttcgaagctgctatgcgtgggccgagcgatgattag

SEQ ID NO: 354504 - DNA, 1107 bp, Pseudomonas aeruginosa
atgggcgccgcgtactacaaagttcgcgatgagatgcgacgccaaggcgtgatcgcgcgctccagcaactacacgttgtatgccgacatcagcaaccgagtgatgcggatcatggctgacatgctgcccagcattgaggtgtactcaatcgacgaggcctggggcgacatgtccggtgtagccgatccagctgggttgggccgcagcattcgcgagcgcctggcccgtgagattggcatgccggttggcgtgggcataagcacgactaaaacgctcgccaagctcgccaactgggcagccaagaaatggaaaggcactggtggtgtgctcgacctgactgacccagttcgccaagagaagcttcttcgcttggcgccagtgtcagaggtatggggtgtgggccatcgctccgcagccaagctagctgctctgaaaatctccactgcctgggatctgtctcagttcgatatcagcacgctgcgaaagacgttcggtgtgaccatggagcgcaccgcgagagagctgcgcgggatcagctgcatcgacttcaacgagggcccaccgccgaaagaggccatctgctccagcaagatgtttggggtgcgccagacagaactgccgcctattcgcgaggccctggctgcttatgtagcacgcgccgccgagaagctccgcgctcagaactcgctatgcagcaccattcaggtaggcctccagacgcagctggctgatctcgatgggccgcgttacgccaacgcagtgaccttggctttgcctgcgcctaccgatgacacgcgtgagattctcgcgctcgcccagcaaggcctgaatcagatctaccgccctagatatccgttctcgaagtgctccatcttgctgatggatctgagccggcgaggtgagctgacgcctgatctatttgcgcccaaaccgcgccgtggcgctgacaggctgatggaagtcatcgaccaaatcaaccagcgagagggacgaggcaccgtgcgcattggccgagtgccggcgaagcccatctgggcgatgcggagagagatgctgagtcagaggtatacgacgaggtgggatgaggtgattggtgttcgtggctag

SEQ ID NO: 354505 - DNA, 870 bp, Pseudomonas aeruginosa
atgtcgacctttcttcgatttgtcatacggtgggtgagctatccactcgtgtttggtggcgctgccgccttcatgatctgggcgctgtatgccggcgtaccgtattggcccaccactcccatagccgccgcgataggactgttgagcatcgctggcttggagcgcatccaaccttttcgcgaagcctggcttgaggatcatcaagacaccgcgacagatctgctgcacatgctggtgaacctttccgtcattcaattcaccgcggaaatcctggccaaacttggcgatgcggtgccggcttcggttcgtctctttccgatcgagagtccgctgtggctccagttgctactggtcgctgccgtgctcgatctgggcctgtacgccatgcatcgaattagtcaccgagtgcaatggttgtggcgttttcatatgattcatcacagcgccgagcggttgtattgggtgaacggggagcgacgccatcccctgcacgcggcgctcatggccggcccggggctggtgattctgctcgcattaggcgccccgtctgccgtagtcgccacctggtttggcattctgaccgtgcacttggctttccaacattcgaacctggactaccggcttggatggctgcgtcatttgatcggggttgctgaaattcatcgctggcatcacaagcgcgactttgaagatgcccaggtcaactttggtgagtttctgatggtctgggatcgactgttcggcaccttcttcgacagtgcggggaagctaggggaggccgaggtcgggttgcatgaaaaggactaccccaaaggctaccttgggcagttcgccgaaccctttgggctagatcgtagaagcaaaggctag

SEQ ID NO: 354506 - DNA, 747 bp, Pseudomonas aeruginosa
atgaaaagctcgccttcgacggacacagtgcgctgggtaggccatgcatgggtcggacccggtatcggagtctttcatgggcgtgccggtcaccaaggctggcaccaccatcaggcgcatcagatctcagtgggcctcgattcaaccgtagcggtcgaaaccccgctgggtattcattcaggggcagccatcttcattccggcaggcttgaaacaccggctgagcgccggtcgagttctgtcgatctatgtggatgcgctgtccgaggaagctcgtgctttgcggggtaccgaagaagcgagggtgattgagatcacgccggcggatgtagcggcgattatcggcgcgctgcgcgagacaggacacagtgctgtacagctgaaggctggggtgcgccaggcgctgcggctacccgacccaccgatctcagatcctcgcttgaccaaggtgattgaagcgctgcgtagaggccaaatgagacgcgaagaaatggccgcactggtgcatttatcacccacacggttttcccattggttcgtggaacagacaggtctgccgcttcgcagctatgcgaaatggttacgtctcacgcaagccctacagcacctggccaaaggggggcggctgaccgaagcggcgcatgaggcgggcttttctgactcggcgcatttctcccgaacattccggacgctgctgggcatcgatccatcatctgccctggctgaagtcgatctccaggaatcctag

SEQ ID NO: 354507 - DNA, 513 bp, Pseudomonas aeruginosa
atgagctcttctcctgaaaggtcacttttcggcgctccttggctttggtggtcgttatcgctagcaattgcgttagccgaccaggtgttcaagagcacaattgagggttcgctcccggtcggctccgtgactcctatggccacgttcttcaatctggttcatttctggaataccggcgctgcgttcagcttcctggctgacgcgggcggttggcagcgatacgtcttcatcgccctggccgtcatcatttcgatagtgctcgcgctgatcctgcgtaagcccaggcccaagagcgaagcgctgggctatagcctcatactgggcggtgcagttgggaatctgattgaccgcgcattccgtggtcatgtgatcgactacctggatttctactggcagtcctggcattggccggcgtttaacctggcggatatcggtatcgtcggtggcgccgccatgttgatcctgagcagtttgctgaacccaaaagcggaagtggaccgagccagagaatga

SEQ ID NO: 354508 - DNA, 192 bp, Pseudomonas aeruginosa
atgctgagggctggctggcagttgcgcgactatcgggaggtgctcggccaagtgcctcggatcattgcggcactgctgttctcctggatctgggtgccactcggaaacaccgggcgggccagggttagtgctttcgcgccgatgcccgtctcccaggagttgcagcgacttcttcaaggagagtcgcgatga

SEQ ID NO: 354509 - DNA, 414 bp, Pseudomonas aeruginosa
atgcgcataggccaacttgcaaagctgacgggggcggacattcagacgattcgtttttatgaacgtcagggactgctcccacctcctaaccgtcaggacaatggctaccgagcctacgaagcggatcatgtggagaaactgctgttcattcgccgatgccgctcttttggcatgtcactggaagaaattggtgttttacagggctttcaggagcagccgcagcaaccatgcacggcgatcaatacgctccttgatagacatatcgcccaggtaagggctcagatcgcatccttacatgccctcgaaaaccagttggtgacgttgcggggctgctgcgatgacgaacgacaaagcctggactgcggaatactttcgggtctggtggagggcggcactccacttcttcaatcctga

SEQ ID NO: 354510 - DNA, 1896 bp, Pseudomonas aeruginosa
atgtttctgcgagcgttagagatcgatggcttcaagtgcttcaacgctggtttttctatcgaattccacaacggactaaacgttctggttggggaaaacggtgcaggtaagacgggcgtcgtcagcgcaatccgtcagttgttcaatgactcagagtcaggcaagcgctcaattcacgagcgagacttttatcgcggcttcgaagctgactcggtacctgctgagaccattcgcatagaagcgactttcagcgagttgagccaggatgaaagcactgctttcattgactggtgcggcaaggatccggaagccaaactcaccttcaacgcaacaaatcgcgaatcccggggacgttaccggcaccagatatggggcggtcaccagcgtgtgaaaccggtagatccggaagcgctcgacttgatccactgcatctacctcccaccgctacgtgatgctgagataaagcttcgtgaagggcggcaatcgcgacttgcccgcctattgaaggccctgtgccgcaaggagctggatgcctgccgaaaggagggcactgcccatccgctggagcagcgcgtgggggccttcaacgaagagctttctgagagcgacgactacgccatcaagcaggcaaatcagcgcatcggggacaacctcaaggaagcgctgggcatgaacttgtctcagggcaccctcattcagttttcagaggtcaatttttccaaaatcgtcgaaggtctgaggctcctgtattaccccgatctgagtgaggcggacgctactcaattcaggtcgcttgaagaaaatagcatgggctacaacaacctcttgtacatagcctcaatcttggccgagttgatccttgaagcggacgaggaccgcggtgaggagacttatctgcggctgttgcttatcgaagagccggaggcacacctacatcctcagcttcagattcgcctgctcaaacatctaaaagcggtcgcggagaagcaagggatccaggtcatcgtgaccactcactcgaccgtcatttcctctgccgtatcgctggagaacatcattcacttgtcacgaaaggacgcaccagtagcggtaccgttgcggagctgtggcctctcagatgccagcaagaaattcattgaccgctggctcgacgtaacaaagtccaacctgcttttctcgaggggggtaatcctcgtcgaaggaatcgctgaggctattgttgtccctgagcttgctcgaattgtcctgaaggaatatggggaagggcgcaacaccctagaggactttggtgtctcggtgatcaacctgaacggcatctactttaaccacttcatgcagctgttctgcgatgtcgatggggagcaggaaagcctaaatattccggttcgatgtgcagggctaactgataacgatccaccgaaatccgtagagacagttgaggatgctgagggcaagaagactgcagtgccctatcttccgcacgccgataacttcatggcgggtgaaaaccacgcccttaagctcgtaccactgattgcaaaatctgagcatggaaggctgtttgccggaagctacaagacgttcgagtatgacctcgcgcttgaggggaacaatctcgcccgaatgtttgaggctgcatccagcaactggcctactcatggaccagtgaaaaatgggcttcatgccagatcggagctcaagtttgcagagatggggaatcaggaacgggctaattacgcgtgggagctcctagagcgcatcgactcagatgacatgggcaaggggctctacgcacagatcctggcagatgaactggcggcgaaccgggagagcgaattcctcgtccctgactatattcgtgatgccgtgctgtgggcctgtgagctaaacaaatga

SEQ ID NO: 354511 - DNA, 1749 bp, Pseudomonas aeruginosa
atgacgtttcctacccatgagcagcaggcctacatcggggcatcactgagtgagcatgtatacctgcgagcttgtcccgggagtgggaaaaccgaggtagtcgccgcgatgattgcgaaagccactcgggaatggcaacggtcgccatcggggattgcggtcctgaccttctgtaacagcgcgaccgatgagctgaaggatcgactgcatgagcatttgggcgacgcgctacctcatccgcactgcgtttcaacttttgacagctttctgctgaaccacgtcgtagggaatatcgctacccagctgacagggtatccgggtcgagatggcgattacaggatccggctactcgataagaactccaacatctacctgacccgtaccaagatcggtgaaaggaagatatctgcctgtaagtacgactatgacatggtgactaggcgcttcgagttcacgacgggaaatcggactgactctaagctgaatgccgttgagcaaagcccagaaatcattgatgacctaactgagaccaaacgacggttttggcgtggggggtttgccacttaccgcgacatcgacatgcttgcgctcatggcattgagagacgccgctttcgaggactattttgcgaaggtggttcgcaggttccccgtagtgatcgttgacgagtgccaagacttgtctgccgagcagttatcgattgtccggcagttggcccgaagaggcatgaaatttcactttgtgggtgatctgaaccaatccatctatggattccgaaagtcggatcctgccagggtgcgcatactgcttgaggaactcaaatttactgagtacgcgctgacagctaactggagaagcggtcaagccatcgtagatctctgcagtgatctgctgcgcgtagcaagaagcgcggggaatccagacatcgaacccttgaagcccctactgattcagtaccaagaatgcccatcggagctcagtccgaagattaccgagctcacacgtgcttaccaaaacgtcgtcattgttgctcgagggcacacaatgctccagcgctttacccgcggaacatctgacctttcggccatagaagaattggccctttcatgtgtcttgatcgagagccgaaaccttgaggaggtacggcaggcgcttaaatcatttgcggaatggttagcttccaagctgagttttgaggtttcgccgggcagcctctcatgcccaatacaggtcgaatcgaagctggaatggcggcagttcatcttccaatgtctcaaatttctgagcgattccggtgcctcgaatcttgagctcacatggaaagcgtgggctgctcaaacaaagcgagtgatacagacgctacctggccagccattcgtgccggtctctattctgccgctgctagaggggcttagagacgtgagcctgtcggctccagcaggtaagggggctgaagtggtcgccgaacagctgcttcaacttggtcagcaacccatctccaaccatcgggtcgccactatccatcaggttaaaggcgaatcccatgacgttacagtgcttctctcttcgcttaggaccggcttccagggacactggaaagactggctgcaagatccgctatcggaggctgcacgattcgcatacgtcgccagctcgagacctcggcacttactcatttggggggtcaaagcattgaagctagacgagcgagatcgaatagctgaattgggctttgagatcgttgattga

SEQ ID NO: 354512 - DNA, 894 bp, Pseudomonas aeruginosa
atgaatgcagagactcaaagcgcctatattagtttggccagtaatttttatgcgactcggatgcagggcgttgagcttgatgagctcaatattattggtgctttactacgggcggcccctgattaccgcccggattattatcggcgcctacgtaacgctttggcgtttgatcaaaagcatcgaggaaatttctgggctgcccaagaaatcaatcgtacgctcaatccggtcactgtgttaaatctgccgcgaaagaaaaagcagcgacgtccgcagaagctttctaccgctgatttcgaagcgtggctacggtgtctggctgaacgagatatgcctgtcgaagcgggagctttaatggtgatatctcttaccggagcgcgaccatgcgagcttaacggaatttctatcgatggccggcgcatccatatatccggtgcaaagcttagccacaacggtttacgcggcgctagccgaacgcttgaggctgatggagacgtctgcaatatcttgagaaacgctctcgctgcttttaaatgtcagccgcgcagtatggattcaatacgcgttgcgcttcaccaagtcgctactgagctattcggtaggaggaaggtgccgagtatgtacacacttcgtcaccagttcggctcaaatctgaaagcctcaggcatgtccgcaatagaaatggcatacgtcatggggcaccaggctaccgattcgattagccgctatggcgataaaagatttggacgtgcagaagcggttaaggttaagcctgcaagcgatgctgacttttcaaaggtgagagatacagtgcctgctcgaatgcgtgcggacgccgtggctcttaatgatcagcgagacttggatcgtaggactgaggtcgctgacggctga

SEQ ID NO: 354513 - DNA, 903 bp, Pseudomonas aeruginosa
atgctggagaaattcgagataccagaactgcaacctgacttcgtacagcgggttcaggtggatggccacgaggtggcggcctacagctacggcagtggcgacgaggtcctgctgtgcctcaacggcgggccaggcctgccctgcgactacctgcgcgacgcccacgcctggctgaaggaagagggcctgcgcatcgtcgccttcgatcagctcggtaccggcaaggcggaccgcccggaagacccggcgctgtggaccattgcccgctacgtagaggaagtggaaaccgtacgcaaggccctcggcctcggccgggtgcacctgctcgggcattcctggggtggctggctctccatcgaatacagcatccattacccgcaggcggtgaagacgctgattctggaaaacaccgtggcggacattccgcacctgtcccaggagctcggccggctgcgcgcggcactgggcagcgaaaccgtggcgatgatgcagcgccacgaagcgaaggggaccaccgatcaccccgagtaccaggccgcggtcaccctgctgaactaccgtcacgtgtgccgcctcgaggaatggccggccccggtgaaacgttcgctggacgactggaacatggggccttaccaaaccatgcagggaccgaacgagttcctttacatcggcaacctgcgcgactggaaccgactgaaggaaatgggggagttccgcatgcccatcctcatcaccaccggccagcacgacgaactcacccccgcctgcgccctgcgcatgaaactggccgcgccccatgcggaagtgcatgtattcctcaatagcagtcatatgccattttatgaagagccggtggcttattttccagccttgctctcatttctgaggcgtcacttttgttga

SEQ ID NO: 354514 - DNA, 954 bp, Pseudomonas aeruginosa
atgatccgcttcctgaccttagccctcgccttactcttctcgatcaccgctctgggcgagccgccttcaaacttcacagcggcgaaggtagtggccaagcagaagatcttcttcgatcgtgcccagagcgcagatggcgagctctactgtggttgcaagtgggattgggctgggaagtctggcggcaggattaatccggagtcctgcgggtatgaaacccgcaagcagcagtcgcgggctgaccgcattgagtgggagcacattgttccagcctgggtgttcgggcaccagcgtcagtgttggcagaatgggggccggaaaaactgcgtagccgatgaccctgtgttcagggctatggaagctgatctgttcaacctctaccccgccgtaggcgaagtgaacggcgaccgcagcaactaccaatacggcatggtaagcggtagcgtctcacagtacggcgcttgcattaccaaggtcgacttccgtgcgcgcgctgcagagcctcggaatgcagtcaaagggctggtcgcgcgggcgactttctacatgtacgaccgttatggcctgtccatgtcccgaaagcagcagcaactgctcatggcctgggatcgacagcaccctgtttctacctgggagaaaagttgggaaagccgcacagcggcggtaatgggccacggcaaccctttcgtaaccggagagcgttcctggaccttgggtcacaagccctcacgtgaaggtctcgtgactcaactggttgctcgcaaggctgcgccagtagcgcctcaagccgttgccgtcagcggcatcatcgtcggtaatcgcaacagccgcgtctaccacctcccccaaggctgcccaggctacaaccaggtggccgccaaaaactccgttcccttcagtagtgagggcgaggcgcgagcggctggctaccgaaaggctggtaactgtcgctga

SEQ ID NO: 354515 - DNA, 621 bp, Pseudomonas aeruginosa
atgaacacgcgggcaccagtggagcttccacagcgcgtcacggatttttgtagatcgatttctcctctacctccagtagttctacctgtagaagcgcaagacttcgccttaccagcagaatgctatgggaatgtcgaagaacaggtgaagagaaatggaggggagatagcttttggctggcagatctgggattgggccggagtattcaccgaggcagagtttcacgcggtttggagatcgccggcaggtactcttcacgacattactccgaaagccgatggagatagcgcgatagtttttctgccagacccctcaaggaaatatagcggacggcgcatagacagcatccgcaggccggcctcgaacaatcgcgtcatcggagatttcattcggttatgcgaggcgaatttctaccgttttggccagttgaggagcgggactaagttggacgaaatagattcggacctgtaccggtcgacggatcttgcgcgggtgtttatggttgaggtgattcagcgaggcgcgaatcgcaacgcggcttgcaattgcggaagtggtaagcgttacaagcactgccacgagccaaagctgcataagctcattgagacgctgagggagtga

SEQ ID NO: 354516 - DNA, 642 bp, Pseudomonas aeruginosa
atgtcgcccgaaaatgtctggtcgtactgcaacaaatgcagacagaagaccgcccacaccgaacggcaccaggtgctcaatgaacatacgcgcgacgactacagtcagtgggaagagaccttccgcatgctgcagtgccaggggtgtagagatgtacacatacgggtcgagtactgggaccaagaccacgacctagacgactcagactttcggtacttcccgccccgcatgcatcgcaatattcccggctgggcgagacggctccctagggagtggtactcgctgatgcaggagatatacgatgcacttgcagccaacagctaccggcttgcagttatgggcgcgcggacgctcattgatctttacctgacggagacgatagaaaatcatggcagttttgctgcccgccttgatcgcctcgtgcaggaaggccatctcggcaaacaccagcgggaaacgctcacggccgcccttgaagctggcagcgctgctgcccaccgcgggcacaagcccaacatcgaaagcttgaatgccgtactagatatcacggagcatcttctgcacgcgtatgttctcaaggatgtcggcgccgctctcaagagtgctacgccaccacgccccaagaagccaaccaatcagtag

SEQ ID NO: 354517 - DNA, 981 bp, Pseudomonas aeruginosa
atgtcgaagaaagatgaatcgaaggccaagggcggcaaggcacgtgccgaagcgctaccgaaatccgagcgtagcgcgattgcgaaaaaagctgccgctgcgcgatggggcctaaaggcatcgcacaaaggcaactttctccaggatttcggcgttgatgccgagtgctatgtccttgatgaccaagcaaaaactgcagtaatgacacagcgcggtattgctgctgctcttggtcttaagaatcctggcgggaatgactttgagcgtcttgttggacggaaaagccttgcaccttacgttggtggtgacttactcgaaaaaatagcacaacccattgaatttaaatggatttaccctggtgccaaacaagccgaagtaaccatcagaggctacagcgctgatgtcctaatcgacgtctgcaatgcaatcctaacggccgatgcagccggaaagcttgccaagagccaggccaacctggccatgcaggctcgcatcatcaccaacgcctcagccaagagcggtatcaccaatcttgtttacgcattggccggctatcagcctggcgtcgacgaggtcatccaggcattcaaggcttttgttcaggaagaggctcgcaaatacgagcaggaattcccgaatgagctttacctgcaatggcatcgtctctatcaaataccggtcccggcacgcgggaagccttggaagcttatgcatttgactcgcaagcacatctactacccgcttgccaaaagcagtggtcggattctcgagcttcttcgtgcactgcgagacaacgatccggagaagaagaagctattccagttcctcaacgaggtaggcacacgcgcactgcgtatgcacatgggtcggatacttgagatggctgaatcatcaaagtcagccgaagaatacgaagagaagttcatcacccggtttggcggtcagcaggaaatggacctcgtgccaacgaacggcgattga

SEQ ID NO: 354518 - DNA, 483 bp, Pseudomonas aeruginosa
atggctgacagcctcgaggctctggaagactgggcagggccgattctccgcgcccttgagccaggccctcgtgctgccctggcgcgttcgctcgcccgcgatctacggcgcagccagcagaagcgcgtaatggcacagcgcaaccccgacggaagcgcctacgagccacgcaagaagcgcgaactgcgcggcaaacaaggccgtattcggcgcaagatcaagatgttccagaagctgcgcacggtgcgctatctgcgcgccaagggcgacgcccaggcgatcatcttgtcgtactccggcagggcagctcgtatcgcccaagtacatcagtacggcatgactgatcgagctgagcagaactccccaaagattcgttacgcaaaacgccgtctcttgggtataactattagcgaccgagccactattagagatacgttgcttagcaaaatcaaacgaaaggtatctcagcagactagctattga

SEQ ID NO: 354519 - DNA, 765 bp, Pseudomonas aeruginosa
atgactacaaatgaatcattaagaaatctgtggatagcttctggctacaagagcgatatggctagcgcaattgccggggctccgccaacggatcaaggtaccatacggctatacaacttaaacaaaacagaacacgcattaaataatatcgaaaactctcgcctaaaggtatccaccttccaagatttaaacgaccccttcgaactattagcagcaaacttcaaagaatactccgcacgccttttagttcgaaactggaaagacagaaccagtcaagagaccggtttactttgcttttctgctgattggggagaacctgtcatgtggagtcactatgcagataggcacagaggaatctgcctaggatttaatgtgcgacgcgacttagtaaaaaaagtaagctaccgcgctgatcgtatccttcacaggttagatacagaagaagatcctggcagacttccagaaaaattaaaaaaacaattactatacacaaagtcggccaattggagctatgaggaagagtatcgagcactaataaatctaaaggatacaaacactgaaaacaacctgcagtttattaacttaaacaaagacatcgaactagccgaagtcatattaggcccgttatgccaagagtctatcagcaaagtaagaagaatcgtgcacagcaagcatccaaatgctttagtctataaagcaaggttggctttcagatcttttaaaatcgtccccaacaaagaatccataaaaagctcacatctttaa

SEQ ID NO: 354520 - DNA, 1101 bp, Pseudomonas aeruginosa
ttgaataccgaaagccttaaggagaaatttaaaactatagcctcaaaactaaaggaaggagataaagttgaagagatagcagttagagacttactagaactatttggctacaaacgccgaacctttgcatcttcatttaaaatcaggacacttcttacaaaagctggcatcgaaaccgttcctcatttcgacttcgtaacattagatgctcccgtcagctttaggcttattagtcataaggtcctctccctgccatccatagcacaatcgcaagctggccacccaactataaacctctcagcctcttcggaaattaatgagaaagaccactcaaatacggaccttatttacggggcaatttctgaaccggccttccttgtaagccgattgcctacagccaacatcaaaatcacgagcattaagcctaactccacactcgccgaagcaataactcttatgctacgtcatgacttctcacaactacccgtcatgactagcgaacgagatgtaaaaggtgttatcagctgggaaagcattgctcccaagatcataattggaaaaaaggactctggacttgttagcgattatatgaaagaacacaatgagataaatataaccgactctatttttacagcaatccctcgcattgttgagaactcatacgtacttgttcgatcaagtgacaaacgtatcagcggaattattacaaccactgacctaagcctccaatttaggcagatatccgagccatttctattacttgcagaaatagaaaaccacatacgctcgctcatagatgggatatttaccaagcgagaaatcacctccatagtaaactcttccgaaaaatttagagccattgagtcagtggccgatcttacatttggcgaatatataagaatatttgaaaaccccgacctttggaaaaaagccaacctcagaatagacaaaaaaatattcaccagagaattagacaaagttcgtttaatcagaaacaacataatgcacttcgacccggatggaatctccgaagaagaccatagctcattacataactttgttaaattcgtccatacaatagaacgactcactaaacagtaa

SEQ ID NO: 354521 - DNA, 165 bp, Pseudomonas aeruginosa
atgacctgctcgcggtccggctgcaggctgtcccaggaattctgggcgctgccgacggagacggcggtcgaggcgaacagcggcagcgaactggcgccgaggaggagcaacagggcggtacggggcagaaaacgcttcatgctgattcgactgatcgcggagtaa

SEQ ID NO: 354522 - DNA, 687 bp, Pseudomonas aeruginosa; identical to SEQ ID NO: 319938

SEQ ID NO: 354523 - DNA, 375 bp, Pseudomonas aeruginosa
atgatctgccgtccgttcactctttgtctggccctgctcggcctgctgagcctccccgtcttcgcggcagggaccgccgatgacctgctcgccctgcaccagatgcggctcgccacgcagaaatccctgaacgccttcttcatgtacgtcggccaggaaggcgatcaacgctacgccagcctgatcgaaagctcggcgcagacggcggaagcccgcctgcagcgactcgacggcgtgaacggcagcgaatcccggcgcctgctgggccagcttcgcgagcaatggcgggactatgcgcaagacctcgacaagctgaccggcgcggtgcgcaacaagggctacagcgacctgcaaccggtcgccgacctggcatga

SEQ ID NO: 354524 - DNA, 1224 bp, Pseudomonas aeruginosa
atgccgcgccaaactacgccactcaccgactccgccatcaaggctgccaagcccaaggacaagccctacaagctcgctgacgggcaaggtttgtacgtggaggtcatgcccaacggctcgaagctatggcgcttgaaataccgccatgcggataaggagaagcgcctcgctctgggggcatatccaaccgtgccccttcagaaggcccgccagcgccgcgaggaagcacggaagctgcttgcggatggcacagaccctggtctccagaaaaaaacagagaaagcggctcagaaggtcgccagccttacattcaaggctgttgcactagagtggtacacatacaacgcgccgcgctgggccgacaccaccgcctacaaggccaagctgtatctggacaacgacatcatgccgatcatcgggcataagcctttggcgagcatcacccgccccgatctggtagacctggtacgcaaggtcgaggcgcgtggcactctgaatgccgccggcaagattcgccaatggttgcatcagattttccgattcgcgctggcgcgaggcgtcgtagaaggcaatccagctaccgatctggatgtggttgcagcaccagcgaaggccgcccaacaccacccacacatccctttctccgagctgccagaacttctggagaagctagagacaaccaggctacataactttacccgcttggctatccgccttctgatgctgaccgctgtgcgccctggcgaactacgtgccgccccctggagcgagttcgacctcgatgccgcaacctggaccattccccaagaacgcatgaaggcgcgccgcgcgcatgttatccccctgccccgccaagcggtggcaatcctgcgccagctccatgcgatttccgggcgctataccctgctgctccctggccaacaagaccctgatcgcccaatgagcgaaaacaccatcaacaaggcactacgcctgatgggttacgaaggccgccagaccggccatggcttccgtcatctgctgagcacggagctgaacgggcgcggatataaccgtgactggatcgagcgccagcttgcgcacggcgatgccgatgaaattcgcaacacctacaaccacgcaacctacctggaacaacggcgcgacatgatgcaagcctgggccgactccattgacgatctatgtacaggcgccaaaccacttcacatcacgcgcacagcgtga

SEQ ID NO: 354525 - DNA, 270 bp, Pseudomonas aeruginosa
atggcaagcaccaccactcaaaaccgcaagtgcgctagcccctccaccacggatgaaggggtaccccagcgattcattaagctgctcgaagtcaaggcgctaacaacactgtcaacatccgagatttaccgccgcattgcgcgaggcacctttcccaaacagattttgctggggccaaagtccgctgtctggatcgaggccgaagtgctggcgtggcagctggaacatatctcaagccggaatgcagctccggcgagcgggtcagcctga

SEQ ID NO: 354526 - DNA, 1629 bp, Pseudomonas aeruginosa
atgactgacctctatgaccaacgccagcatcttggtagaaaactatcggagcgccacacgaccaggcattcagccgaacacacaccaaatggcaagttccgccaacaggaacaggacatttcggagtgtgcccggagcacgccagcgaatcgcgaaggcctactggccgaacctattgaacaggactatcccgaacccattcctcttctagccgagatggaggtcccttcctcctatcctctggatgctctcggcgatattttgggtggagcagccaaagctattgccgagtccgtacaggtaccggatgccatggccgggcaatccatattgaccgcagctgccatggccacccaaccgcacagcaacgtattgcgcgccgggcagcttattcctctgtcgctgttcggtctgacggtggctgaatcgggtgatcgaaagtccaccgcagaccgcctggcccttcgatctcactacgagcgccagagcaacctgctgatggctcacaagactggggccaaagcatatcgagatcgtcaggacgcctaccaaaaggcccgttctgccattctggataaaatcaaaagcaaccccaccgcaatgtcgatggaactgagcaatttgcaggagccggacgctcctcgattaccgttcatgctcgcggaagagccgacactcgaagggctgcagaagtcgctgctgcaaggacaagcgtcacaaggcttgttcagcgacgagggtggccagttcttcggcggctacgcgaacaaaccggagaacatgctcaagagtgcagcaggtctgtctaagttgtgggatggttcagccatctttcgcacccgagcagcggatggggaaaacgcctcgcgtagcggctgtcgactcagcatgcacttgatgattcagcccatcgttgcccaggccgtgctgaacaatccaatccttcaaggacaaggtttcctggctcgcttcctcgtcgcttggccgccgtccttggcagggacacgattctatcgggagatagacccgacacaggacagcaggctgctccggtactggcaacgcatgacggacctgctggagcaggagccgttaaccaatgcacatggggagttgtcccctgccacgcttcaccttacgcctgaggccctttgtgcttggagtattgagcatgacgccatcgaggcgcagctcggtcgaaacggcgattttctggaaatcaaagccactgctgccaaggccggagagaacctgctgcgaatcgctggtgttctggcagtggtggaagacgcctccccaataggcgtcaccctgattgagcgtgcgactcagctgattcgctggtatttggatgaggccttgcgcctaatcgccccaatcaagagtgatccgcagctgagtaaagcccagcaactgcttgaatggctgtgcgacaaaaaatggacacagtttgacgctcgaacattgcagcatgacgggccacgagccgtccgtgagagcgccaggaaacgcgacgaactactagcaatccttgtagagcacaaatacctgagcacccacgatggcaagcagttcaggctaagtcctaaggcgacaatggcgacaatggcgacaacacccaggtcatga

SEQ ID NO: 354527 - DNA, 1272 bp, Pseudomonas aeruginosa
atggcaaaggacggtaagacgacagtggcgccgaagttgcggtttccgatgtttcacaacgctcctgattgggaaatggttccccttgaaaaggttgctaaacgcgtttccacgaaaaatactgacggcaaaataacgcgagtcctcaccaactctgccgaatacggagtcattgaccagcgagattatttcgaccgagatattgcgggcgctgggaaggtagacggttactatattgtcgatgtcggcgacttcgtctacaacccacgaacctccatgattgcaccagtggggccgatctcgcggaacaacgttggcaaaggcgtgatgtcgccgctctataccgtgttccgatttatagaaaagaagacggatttctacgagcatttcttcaagtcaaccgggtggcactcatacgttagaaacgcggctagcactggcgccaggcacgatcgcatgagcatcactataggttctttcatgcaaatgcctgtgccaactaccgaccaatccgagcaacaaaaaattgccgactgcctgatctcgctggaggagcttcttgctgctcagaggcgtaaagtcgaggcattgaaggtgtacaaacgcggcttaatgcagcagctgtttccctgcgaaggcgagatcctccctcgcctccgatttcctgagttcgctagcactggctcttggcactcccaaaaaatttccagcttgctaagcaaagcctcgtttccggtaaatatagaatcggaaaaattttatcgagagatcggcattcgatctcatggcaagggtgttttccacaaagatccagtactcggaaaaaccataggtgaaaaacgcgtttttcaggtagtgcgcgacgcccttgtactcaatattgtttttgcttgggaacaagcggtagcaacgacttctgaaaatgaaatcggaatgattgcttctcaccggttcccaatgtttgtagcgaaaccgggaaaatgtgatgtcgagtacgtcaagtggttctttctcacgaaagaaggtaaacgcctaatgggggtagcatcacctggtggggcgggcagaaataaaactttgggccaaaaggaatttgaaaacctagaaatccctttaccggcttcagttggcgagcaagcgcgaattgctaactgcctttcttcattcgacgcaaaaatcgccaccgagaccgagcagcttaatgtcttgataactcaaaggaatggcctaatgcagcaactatttcctgcattagaagagatggaagcatga

SEQ ID NO: 354528 - DNA, 1143 bp, Pseudomonas aeruginosa
atgagcggccttaacacatacaggagccttaaaacattagtaaggcgcctacgcgatgatttaaacaacccgacaaaacctacgcatcttgttttggtctatgcctataatcgcactggcaagacacgtctttccatggaatttaaggatgcagggaagcgtaaaaatggcggcggatcagacacactctactttaacgcctacacagaggacttatttatctgggaaaacgatctagatggagacagcgcccgtcatctcaagcttaaccccaactctagatttttcaacggaattaaggacctctcactagatgagaccatcgccggctatctcaaccgttataccgatttcgattttgatatcgattacgatgaatggaaagtttcgttccgcaaagacgatgctgagaacataaaaatatccagaggagagcaaaatatcttcatctggtgtctatttatggcaatctgcgagcggatgctagatggtcacgtttcgtaccaatcaaataaatacctctacattgacgacccgatttcttcgctcgacgacaacaatgctatcgctgtcgcgtgcgacttggcagagcttctccggcgtgctgccagccgtaaggacgagaacggagctgccgcccctatcaaagtcgttttttcatcccaccatgcacttttcttcaacgtgatgtgcaacgagataggcagggcaaaagaggatcaacccaaggtagctcatcggcgttacttccttcaccgcccgagcggcgaagggatatatacccttcgagccaccgaagacactccattcttccatcacgtcgcgactcttgcggaactccaaatggccgcagacccagccaaaggtaagctatatacattccacttcaacgccctgcgcagcattatggagaagaccgcctctttctttgggcattcggatatttccttctgcctcaaggcgatcaacaacgaggaagacagagctctgtacaaccgagcgctcaatcttcttagtcacggcaagtatgccatccatgaccccgttgagatgggcgaagacaataaggatttgtttcgccgcattctccaggatttcttgacggagtttaaattcagcttgccgagtattgtgaaaccatga

SEQ ID NO: 354529 - DNA, 1638 bp, Pseudomonas aeruginosa
atgaccgaacaagaccagaaacagctaggcaaaaccctctgggcaattgccgaccaattgcgcggctcgatgaatgccgacgacttccgcgattacatgctctccttcctcttcctgcgctatctctcggacaactatgagcaagctgccaagcgggagttggggtcggactatccgagatttgtagagggcgagacgagatccccactcgcactgtggtacgacgttaatccagacgatgtaattgagttcgagaagcagatgcgccgcaaagtgcactatgtgatcaagcccgattacctatgggacagcattgtccacttagctaagatccagagcgacaagctgctcgataccctgcaatcaggtttcaagtacatcgagaacgaatccttccagagtaacttccaaggcttattctcagagattaatctcacatctgaaaagctaggccgccagtattcggagcgcaataataagctgtgctcagtaatctcagaactggcgcgtggcatgtccttgttctccaccgatactgacacgctgggggatgcctacgagtacctgatcggacagttcgctgcaggctcgggcaagaaggcgggcgagttctacactccgcagcaggtctcgaacatcctgtctgccatcgtcacgctcgacggccaggcgcccgaaacaggcccacgcaataagctggaaagcgtgttcgacttcgcctgtggttcgggctcattgctgctgaacattcggcaccgcatgagggatacgggcggtagcatcggcaagatctacgggcaggaatacaatgtcacgacctacaacctagcgcgcatgaatatgctgctgcatggtgtgaaagataccgagttcgagatctaccacggcgacacgctgaccaacgcctgggacttcctgcgcgagaccaatccagcgaagaaaccgcaatttgacgcggtggtagccaatccgccgttcagttatcgctgggacccgagcgacaccatcagcgaagacatgcgcttcaaaaatcacggcgttgcacccaagagtgcagcagacttcgcttttttgctgcacgggttgcactatctgaaggatgacggtgtgatggccattatcctaccccatggtgtgctgttccgtggtggcgctgaagagcgtattcgtcgcaagctgctgcaagatggacatatcgataccgtaattgggctgccggccaatctcttttattcaacaggcattccggtgtgcatcttggtgctaaaaaagtgcaagaggtcggacgatgtgctgtttatcaacgcggttgagcacttcgagaagggtaggcggcagaaccaactgacagaccgacatatcgagacgattatcgagacctacacgcaacgccccgtagaagttccgcgctatgcacggcgggtaagtatgcaggagctcgagaagaacgatttcaatctgaatatctcgcgctacgtaagcacggcagtggccgatgaagagatagacctgacggccgtacatgcagagcttgtggcactagataagaagatcaaaacagccaccagtaaacacaacgggtatcttaaggagctcgggttgccgctgttaccgtgcggctacgaggaatcacgataa

SEQ ID NO: 354530 - DNA, 126 bp, Pseudomonas aeruginosa
atgccgttccgcccatcctgcgacaacagacggcacagcaagaagggcaaacaccataaaaccgtggaccaaagcgactaccccctggactggcagtgccccagcaatgatggggctttacgctag

SEQ ID NO: 354531 - DNA, 1266 bp, Pseudomonas aeruginosa
gtggaagtgcacgaccggcagttctcccaggagatccgcctggcctcgcccaccggcggtgccttcgactacgtggtgggcgcctacgcgttcaggcagaacctcggcaacaagaccttcacctcctacggaccgttggccgacctgtacctgctcggcgccaatctcggcgcgctgaacgacacctactcgaaggccaacggcaagatcgagaccgacagtttcgcgctgttcgcccagggcacctggcacctcaccgaacgcctggacttcaccgccggcctgcgtggtacctacgaggagaagaacgccaaggtcgagcgcttcgctccgctgggcggcgcggcggtcggcggggtcggcgcggcggtgcgcaacggccagctcggcgcctacgattccggcgatctcagccagtacaacttcgccccttcggcgttgctcagcctcagctaccagttcagcgacgacctgctcggctacgccagcctgtcccacggcgagaagtccggcggggtcaacctggcggtgggcagcgcaccgagcgccggcgccgattcgctgctggtcggaccggagcgcgccaacgacgccgagctgggcctgaagagcacgctcttcgaccggcgcctgctgctcaacgccaacctgttctggaccggcatccacggctaccaggccaccaccctgtaccaggcgccgggctcgacccagttggtgcaggtgctggccaacgccggcagcgtgcgctcgcgtggtctggagttcgaggccaccgcgctgccgttgcgcggcctgaccctgaacttcaacggctcctataacgacgtcacctacctgtcgttcaaggatgccccgtgccctgcggaagtcagcacccggcccggcgcgccgagcagttgcgacctcaccgggcagcgcgtggtcggcgcctcgaaatggatcgccaatctcaatggcgaataccagtggcgcctcgacgaccgcttccaaccctacgtcagcgccagctacgcctaccgctccgccgccgagggcacgctggacaactccgacctttcgaagatcgacggctacgccctggtgaacctcgccgccggtctgcgcagcgatctcggcgacggccaactggacacctcggtatggctgaagaacgccttcgacaaggactactacctgagcgccttcgccagcatcaacggctcctacaccgcatcggtggggcagccgcgcacgctcggcgtatcgctgcgctacgacttctga

SEQ ID NO: 354532 - DNA, 444 bp, Pseudomonas aeruginosa; identical to SEQ ID NO: 321322

SEQ ID NO: 354533 - DNA, 630 bp, Pseudomonas aeruginosa; identical to SEQ ID NO: 321753

SEQ ID NO: 354534 - DNA, 276 bp, Pseudomonas aeruginosa
atgggcgggaaggcgaagggacaatttaatctcttccattctcacttcgtcttcgccatgcaccctccgaaaatcctgctgtggctgctgccgctggtctgcgcgttcagccttggagctcttgccgacacggccgtcgacccctcccaagccttgcatctgttgagttacctggcggccgactatccgccgaccgtggctgacggcaagatcgcgaccccagcgaataccaggaacaggtggagttcgtcggcaacctgcaggcattggtcctga

SEQ ID NO: 354535 - DNA, 942 bp, Pseudomonas aeruginosa
atgggcaatcaaccggcgcaaggtggtgcagcgctgcccggcggtgcccaccgcgccgaacaggatgccgcgcaccgccaggtcgaggtcggcgcttggcgccaggatcatcgcgttgttgccgcccagttcgaggatgcagcgagcgaaacgcgccgccacccgcggcgccacttcgcgccccatgcgagtgctgccggtggcgctgaccagggcgacgcgacggtcgtccaccagcgcttcgccggcctcgcggtcgccgatcagcaattggctcaggtgcgccggcgcatcgccgccgaaggcccgcgcggcacgctcgaacagtgcctggcaggccagtgcggtgaggggggtcttctccgaaggcttccagaccacggaattaccgcagaccagcgccagcgcggtattccacgaccacaccgcgactgggaagttgaacgcgctgatcacgcctaccacgcccagcgggtgccaggtctcgcgcatgtggtggccgggacgctcggatgcgatggtaagaccgtacaactggcgcgagaggcccaccgcgaagtcgcagatatcgatcatttcctggacttcgccgaggccttcctgggtgatcttgcccgcctcccaggacaccagttcgccgagttcggccttgtgccgacgcaattcctcgccgaacagccgcaccagttcaccacggcgcggcgccggcacctggcgccaggcgcggaacgcctgttcggcgcgctcgaccttggcggcaacggcggcgcgcccctccagtcgcaccgcagccaggcgactgccgtcgatgggggtatgcacggcaagctcgccatcgcgaaaggcattggggtcgaggccgagactgcgcagcaatccgtcgatcatgtgaggttctcctggctgttcgtttccgctcgttttagtcggtttgcccggtag

SEQ ID NO: 354536 - DNA, 480 bp, Pseudomonas aeruginosa; identical to SEQ ID NO: 323849

SEQ ID NO: 354537 - DNA, 660 bp, Pseudomonas aeruginosa
atgaacgacatggccaactccccgatgaactcctcccttgctcccgagcggattgacttcaatacgccagccctgcaacgcaagcgccgcatccgtgccctcaaggaccgcctgacccgctggtacgtgctggtcggcggcctggccgtgctggcggcaatcaccctgatcttcttctacctggcctacgtcgtgctccccctgttccgcggcgccgacctggagacccgcgaagcgctgactccggcctggatgcagcaggcgcaggtgcccctgctgctcagcatcgaggagcagaaccaggtggccatgcgcgtcggcggccagggcgagattctcttcttcaacgccaagaccggtgtcgaactgaagcgtgtcgctctgccgcttccggcgggcagcgagatccgctcgatcgcccaggaccagccgggcagcccgacggtcgccctgggcctgtccaacggacaggtgctggtgttccagcacacctacaaggtcacctacccggacaacaagaagaccatcaccccggagatcgccttcccctacggcgagaccccgatcggtctcgatccgcagggccgcccgctggagtcaatgccggcgacgacagcctgctgctggctggctccgtcgacaagcaactgctgctgttga

SEQ ID NO: 354538 - DNA, 1215 bp, Pseudomonas aeruginosa
  misc_feature (858)..(858): n is a, c, g, or t
atgcccactgccaacccacccggccgcaccctctggctgatggccgccatcgtcctggtcggcctcaacctgcggccctccatggccgccgtcggcccactgctgaacgccatgcgcggcgagatcgcgctcagcttcggcgccgtctcgctgctgaccgccctgccggtgctgaccctcggcctcggcatgttcttcggcctgggcatcgcccgccgcgtcggcgagtggcgttcggtggccctcgccctgctgctgatcggcgccgccagcgccctgcgcctgggcagccgaggcctgcccgacctgctcggcagcgccatgctcgccggtctcggcatcgccctgatccaggcgctgatgccggccctgatcaaggcccgtttcggcgcgcgcacgccgctctgcatggggctctacgtcaccgccatcatggctggcgcggcgctgtccgccagcgccgcgccgaccctggcggagcacgccggctggcggctcggcctcggtgcctgggcggcgctcgccgcgctcgcgctgctggcctggtggctgcaacccggcacccgcctgcgcctgcccgacgcgcagccgggcaggagcctcctgcgctatccgcggacctggctgctggtcctgttcttcggcctcggcacggcctgctacacctgcgtgctggcctggctcgcgccctattacctggagcagggctggagcgcccaggaatccgggctgctgctcggtttcctgacggccatggaggtgctctccgggttgctcgcgccggccctggccagccgctcgcgggatcgccgcccggtgctggtcgggctaacggcgctgatgctggccggcttcctnggcctcgcctgggcgccggccagcctgccgctgctctgggcgctgtgtctgggactgggcatcggcgggctgttccccatgggcttgatcgtctgcctcgaccacttcgacgcgccgcaacgcgccggtcaactggctgccctggtacaaggcgccggctacctgatcgccggggtctcgccatggatcgccgggctgctgcgcgacagcctcggcagcttcaccggagcctggctcgggctggccacggtggcggcgctgctactggggctgggcctgcgcttcgacccgcggcgctatgcggcactgttcgccgagcggcaggcgcgaggcgtcggcgccgaaagcttgcgctga

SEQ ID NO: 354539 - DNA, 237 bp, Pseudomonas aeruginosa
atgcgccagttcagtatcgaactgctctacggttgccacgaatacagtaacgagttcgaccgggcctgcggccccgtctggtgggagaaagccgcgaccaatgccatcgaacgctatccgcaggaaccgattgcggaacaaatcgaggattggctgaatcacagcttgctgcgcaacctccttggctcccgggccaacgagatccgccagcatttgcgccagcgtgacctgctctga

SEQ ID NO: 354540 - DNA, 366 bp, Pseudomonas aeruginosa
atgtgggggaacctctatccgcgcagcggattcctgcaccagaccgacgactacaagacggcagccgtcatcgcccagcgcgccggcgatatcaccacgcgaatcggccaactccacgtctacctccccatgcgcgcagcccccaaggacggctactggccggcgggcgagctgaaagagggcgatgcctctaccgggaaatggcaggagctgaccccgtccctgagcctcaactgcgcggtgtttcccaactcagggccgaagacgcaagccgtcgacggcgattacgcctgggcgctctggcgtccctactcctgctgccagcgcaaggggcagatcttcctcggcagtaccgacttccaataa

SEQ ID NO: 354541 - DNA, 1179 bp, Pseudomonas aeruginosa
atgaataacccatccactacgaaagcaccgctggccgactacctcgctcatcttcccctggcggaagaggagcgggagcggcttggcgagtccgcttccttctccgagctgcacgctcgcctggcgggagcggaaggcgccgctgccgatgccgggggctatcccgccctggcctcggtacgcgcccgcctgcagctgggcacccctgagctggacgacgccgagatgttcggcgtcgacgcccagggacgcaccttcctcaagatttccccgccgatccgccgtaccaaggtgattcccgagccctggcgcaccaacatcctggtgcgcggctggcgtcggctgaccggacgcagcaacccgcccaagcccaagcgtgccctgccgcgggcccgctggcagcgggtcggctcgctgcgccggttcatcctgctgttgttgatgctggcgcagacctcggtcgccacctactacatgaaaggcatcctgccctaccagggctgggccttcgtcgacctggaggagctggcccagcagagcctgctggataccgtccagcaggtgctgccctatgtcatccagttcggcatcctggcgctcttcgcgatcctcttctgctgggtctcggccggcttctggaccgcgctgatgggcttctgggagctgctcaccgggcgtgaccgctaccggatctccggcagcagcgccggcagcgagccgatcgccgccgacgcccgcacggcgatcgtcatgccgatctgcaacgaagacgtgccgcgggtattcgccggcctgcgggcgaccgtcgagtcgatggccgccaccggcgagatggagcgcttcgacttcttcgtcctcagcgacaccaacgacccggatatcgccgtcgccgagcagcaggcctggctcgagctgtgccgcgagaccaagggcttcggcaagatcttctaccgtcgccgccggcgtcgggtgaagcgcaagagcggcaacatcgacgacttctgccggcgctggggcggcgactaccgctacatggtggtgatggacgccgacagcgtgatgagcggcgactgcctggccaagctggtacgcctgatggaggccaatcctgaggcggggatcatccagaccgcgccgaaggcgtccggcatggacaccctgtatgcgcgcatgcagtag

SEQ ID NO: 354542 - DNA, 678 bp, Pseudomonas aeruginosa
atgggctccagaatgaaaacgccccgcaatgcggggcgcttctttcacattcagaccaactcgaaaagccgattaggatttcgggcagttagagggggcatagtttggtttccagttagcaggagtgctactgatcgagcaaccccacaccccatcagcggtacgcgaaacggtaataactgcacctttaatagcggcaccggaagaaccatccagagtagcttccaactgcacagtaggcagagtaccatttttcacagtaatctgacctttctccgaccctttcagcaaggtagaaccggtaaatccaatatcatattggtccttggtaggagtcttactggaaacaatttctttcccttccagaatcgccgactccgcagcggtcttcagcgcgctgacttcactcacagcacgggtcacctgggtacgggcggtgtagtcctggtattgcgggatggcaatggcggccaggatgccgatgatcgcgaccacgatcatcagttcgatcagagtaaaacccttctgagctttcatgaatatctccatgtggtatgtataggccaaacgccttccccctccaaagcaggttgcatgccaacctttcaaacgccctcctttcgcaactctcgcggagacttcgaaagtgttccgctctcccctgccggcaatatgtga

SEQ ID NO: 354543 - DNA, 816 bp, Pseudomonas aeruginosa
atgccatcaaagttaaaatatcttgactggctaaaagataccgggaacgcattaacaacaaaagatgggacaccggttaaattgtttgagcttttgcacggagaagactcaacaatactatctgagtgggctagacacttcagaaatcaatactgctgcgactctgaaatcgacttcctccgggaaacaaccggaaaaagcagatcagaatatttgaacgaccttaagtttccaactgaaacaggtggattcggtccaggcacaagatccggagatttcgcagaaatacttatatctgactacttggagtacctgtttaattattgggttccaaggacaagatacgatagaaaaacaatcagaaatgagtcaaccaaaggctccgatgttctagcattcaagtttgcctctacaatcgagtcccccgatgactgcctagccatgtatgaagtaaaggctcagctatcaggaaaaatagcaaacgctcgactccaagacgccataaatgattctggcaaagacaacctcagaaaagcagagtcattaaacgcaataagacagagattctacgaatctaaaaatatacaagacgcaaataaaataggtcgatttcagaaccccgccgacagaccctacaaggatatttatggagctgtagctgtttatgaaaacaatatatataacccactagaagcctctcaatctgacacatcagaacatcctcagaaaagctctttatctttgataataataaaaggcgaagagcttatgaaacttgtacatagcctttacaagagagcgtctgatgaagcctga

SEQ ID NO: 354544 - DNA, 3153 bp, Pseudomonas aeruginosa
atgaagcctgaaagagcatcgcaagtcctgcttggcattactcgatcaaaagcaaaaatgttcgagtacagcatccccaaagaacaccacattgagataacaagcgacccttcgcagctacttatactttccatcgcaacactcggcgaagtctgctcagcaataaacacaaaatatgcttcgtctgaaaaactatctgagctaaaaaaagagcttcaattttccgcacagttttttgactcgtacttccaatcaaaacttgaagaagaattagacccatatctaataatactcgcttccaccgcatattatctttgcgacctccccggaagctcttcagttctagcgaaaaaaatacaagcaccatgcccatacatagacggaagccatctagaaaatctcttacaatggctacttctaggggatttctctacatatttcactgatgccagagaaaaatacaaagccaacataacatccatatcacttgcactactaacatattataaaaccggagatggacgctcagaaattgagtcagaactctccaaactgagagccaaatcatatgacgtaggctctgacagagaacttctattagcggacgcaatctgtgcggtagcatacactcggttaaaaaattcctcatggaatctattaccgcactattcaggattagcaaaagaagactggcaaccttacttaagcaaagaaagctcaatcaaagagctgtggccatctcagcggcttctgggagaaaaaggggtattcaaagagtcatctgcaataattcagatgcctacaagcgccggaaaaacaaagtcagtcgaaataattatccgcaatgcttttttgtctaagagagccaacttagcaatcatcgtagcccccttcaaagctctatgccaagaaataagaagtgaactattacaaaatttcgatggcgagctagtcaacattgacggcgtatccgacgttccgcaacttgacttctccgagttcaatctagatagctttctagacctcgaattaggctcaatagaaacaaacagcatactagtcctaaccccagaaaaattgatgtatatattacgtcaaaccccggaattagcggataggattggagttataatttatgatgaggggcatcaatttgatagcggccccagaggggttacttatgagcttcttctttcatcactcaagtcgctaatacccccaaatacccaaaccatcctcatatctgcagttataagtaacgcctcagcaatcggcacctggctaaatggagaagatgggacggagataaatggctcaaccataccatccacatatagaaccattgcattcgcaagctggaaagactctcttggcagactagaatttgtagagcaaaacaataccgatgaaaaaaccttcttcgtacccagagtaatcgagaagtataaactatcaagcaaaccaaaagaacgaagcgaaaaattctttcctgacaaaaatgacggaaaaagcattgcaacgttcttaggattaaagcttatacccaatggaagcgtagcaatcttctgtggcgttaaagcctcaatagcaaccattgctaaagccgcagttgatatttatgcaagaggactacccattcctgccccacgccaatattctgatgaattagaggtaaataaattatttaacttacataaaattcatcttggcgaagaaagcgagactacgaagtgctcaaatcttggcatctactcccacagcagcaatactccgcagggattgagagtcgccatagaatatgcaatgcagaagagcaagataaaattcatcatctgcacatccactctggcacagggggtaaatcttcctatcagatacctacttgtaacgagtatttatcaagccggaagcatcatcaaaacaagagacttccataatctaataggcagagccggacgctctggcatgtacacggagggaagtataattttcgcagatcctgatattttcgacatgaaatcttccaaggatgggagatggaaatggtccgagttcaagagaattcttaattttgaaaattcagagccctgtacgagtagcatattaaatatattagaacccatcaaaagtgatgacggaaaaacccatctaaatatcgatccaatatcttatctagagatatatctaagatcacctagagaacttatagcggcattgaccgtcgccgcaacaagactcaaagaacagaaattcagtgtagacggcgtacttgatcaagcggagcaaaaagccaacatcatagcgtccattgaaggctacttacttgctcactgggatgatacaaaacagctaactggagaggacggcgctattcatctagccaagcaaaccttggcttacaatataagtagcgaagaagaaaaagaaaccatcctatcaatattcaatattatcgcaaagaatattgaggccaactgcccttttgaaaccgaaagacgagcctttggaaagacacttttcggattaacacaagcgcaagacataaagcactgggtagagtccaatataggcatactagagcaatgcaatagtgaagccgaagccctaaatattctctggccctttatttactcacaatcccgaagcaaagctctgcacaagattgagtcaactgacaacctaagatcactcgtatccgagtggattaaaggcacctcttataacaacttgagactgcatctgacatcatcaggctcaaaatatatctggggaaaacaaagacgcaccataacaaacgagcaaacaatcgaagcgtgcgagtcgggaatcgcatttgacggaactttgattctcggctcgatcatcgaactattaaagcttatagcacccgaaataaaccaacaattactagataacctatctaaacttcagaaaaagcttagatacggcttaccttctactgacgcaattcatctttacgaacttggaatatcagaccgtcatatatctctggagctttcaagaaagctagccacatcagacgaatcaccggctaccagagtaaaacaatcaggggaagcactcatggaatgcgtaaaagactttccctcatactacgaggatcttttgagcagacttatttctgacacataa

SEQ ID NO: 354545 - DNA, 1617 bp, Pseudomonas aeruginosa
gtggccaaaaaagatactaagaaaagggatgattttagcccttcgacaattaggaaaattaaagaaatggctggggatgtctgctccatgcccagctgtagagtaataacaggagggtcaaagaagcttcgtgataactcatttagtataggcgtggctgcccacatatgtgcagcttctcctggaggccctcgctatgatttgcgtatgagtaaggaagagcggaaaagctatgagaatggaatatggttatgccaaacacactccagaatgattgatgtagacccagctagatttcctgttgatctattgaaagtttggaaagaagaagctgaaagttggtcgatgactaacgtggggcagaagttaattagtcagcttgatcacgataatgccattaggagagcagttgggcgttctatcgctgaatttgtaggtggtggtgacgctgtaaatgcccctatacacgatattatgcttggttatgaaggtgggttgaatgagctggattcaagatttcttgttaaggtggcgaggagaagtgatggtgttctagaacatcaaatatttacaaggcccggtgaacaagggaaatttgatttggcttttaagaagtcgtcatctggtacggatgtagaggcttcgattaaacggctgatcgaatatggggaaggtgtgagttttgatcgagacgattttgagttctctggatcaaaattgttcgaaaaaatatcaagcggtaaaggcggtaggctacatataggtagtgaaggtaaggatgttgagcttgttgtttatttgattctggatgatggagatgaggaagagcttgtaaactttaagtcaaagttagtgtcggggacgaaatatggcaaggttactgggcaggctttctcaggccttttgacggttaatttcaatttttctatgtttggagagtcacctaggttaaatattgcttttaattctaatgcttggattggtcaagacgttagtaggttgggttatttttcaaatattaagaagattgtgaagtttttgagcgggagaggtgcttctagctttgccgttgagctggttcgagataagcaggcctatagaataggctcgggcgctttagaggatacagcgccattctttggtgcgatgagttggcatatcgacatattaactgccgctcgaaaggtcgctgcggcagttttccagccaatcatcgttaaaagcttcagtgtctctgtggaggaggaggagtcgctgatgaggtacgcttcgctgctagagggagatattgtagagactgttagtgctgggcatgagttttgtcagggggcattttcacctgacgggcttaaaaactttgatgaggcgcaacataaggatgatgagtttttagtgcgttttgtggaggacgatggaaggttcttcaatattctcggtaatgaggtaaagccgccgcccgttgatgtgagcattgaaaagtgtacggttaatagatttagttatatcgagagggatcgctttgggaaagatgggtttgtggtttatgctgtcgataatactaaatgcattgtctcgcttagaaaagatcgccagtgggtattggattcgatagattaa

SEQ ID NO: 354546 - DNA, 726 bp, Pseudomonas aeruginosa
gtggagcaagccccggccactaccagcgaggctgccagcgaaaccacggcaagcgatgagaccgacgcgtcgaccagcgaagccgtcgaaacccaggacgcggacagcgaggccaataccggcgaaaccgccgacatcgaagcgccggtgaccgtcagcgtggtccgggacgaagccggccagagcaccctgctggtcgcgcaagccactgaagaagctcccttcgccagcgaaagcgtggaaagccgcgaagacgccgagagcgccgtgcaaccggcaacggaagcggccgaagaagttgccgccccggtgcccgtcgaagcagcagcccctagcgagcccgcaaccaccgaggagccgaccccggccatcgcggcggtgccggccaacgcgaccggccgtgccctcaacgacccacgggaaaaacgtcgcctgcaacgcgaagccgagcgtctggcacgcgaagccgcagcagcagccgaagcggcagctcaggccgctcccgccgtcgaggaggtcccggctgtagcgagcgaggaagcgtcggcccaggaggaacctgctgcaccccaggctgaagaaatcgcccaggccgacgttccgtcccaggcggacgaagcccaggaagcggtacaggccgagcctgaagcttccggcgaagacgccaccgacacggagcacgcgaaaaagaccgaggaaagcgaaacctcgcgcccgcatgcctga

SEQ ID NO: 354547 - DNA, 138 bp, Pseudomonas aeruginosa
atgggccgcccgcagttctatcctaaggatcggcaagaaatagccctggtccccgccatacgggcgctggagcgctaccgcgggttgggtcgagggcgggtttccccggtgtttcccggctactgttaccgggcgtga

SEQ ID NO: 354548 - DNA, 711 bp, Pseudomonas aeruginosa
atgacctcgctaatgacgggcgcgcgcaagcaaactgttttgaccatgcgcttgaagaatttgaaaggcttcacagaggataacctagagcgtgagggggcctataaattacatgctggcccccgcacaggcattgatacgaaatacgacaagccgcaagtcctgcacgttccgaagcaacttgcggaagaactggtcacgcttgccaaaagcccaatgatgaagaagcggagggagaagttccgcgctcagttagaggccagttatcccggcctgtcgatggacgaggacgatatgtatttgtttctttccaatcaaggcaactgctattacatggccgaaagcgatccgcgctatacgattgtgaagtcgccgcagacaggacaggtcacggaaacaattaagcgaaagttgatccagaaagcctctagcccatttccgaaagacttttcatatcactggctgcgagcgacctttggatatcagctctaccagcgcctccaggcattggttcaggagggagagttgaagccgggcgaagacatcgactttattcagaagcgtatgcaccacgagtccagggaaacgacagagaactacctaaagttgttcaacatgactcacgaaaagatcattgcccaagaggtttgggagaggaagttgttcaatggcggctacgcggtgctgaaggtggaggcgcacgatgaatag

SEQ ID NO: 354549 - DNA, 1935 bp, Pseudomonas aeruginosa
atgaatagtcgtcagcaattcgagcatcgtgccaatacacagattattacgctgagtgaagtcgcctatgagtttgctgagcctgagcgcttgcgtttgcaactgtctccgaaggttatgaagaagtcgttggatattggcagttttgcatatttactgcgtggtaagaatgaaagcgttcgggatgatcgcggcacgccggtagggatcgagtcttttgtcgaaagccgtcgtgaactgattgtgaggctgctagagtcctttgtcggtctgcgtgataagacagtcctattgcgattgacgcttaccgcatattttatcgactggctaaacgcgcaaggctacagggaaatatttgccagtgcagcgcaagcccagcaagcctatcgagactataccgcgcacctgaatcatcaaatagcccatcatgtattgaagcccgtcagtgcgaaaaatagtcagttgaatgtttcaaggattattgggctgctttatccagaagacagtcaccatatcctagcaggtgcggtctcgatcaatgccgaaaaaggctctgaggcagccagcgctgcccatgttgaagtgtgccgggacgcttgtttggcgattgcccagcaatgcagtgttttcgtcctgaacaaccagccatatccctttgttgtgagcatcagggattatgaggtggttgtgtttccatcaagccatggttgggttggcccattcaagacgtcgccgcttaattataatgccggcgagcgacggattgcgacggtcgaagaatatttggcagttgctgacaggttggggcgaaggttatacaaaaaatcggaagcagagcgcactctattaaatgcacaggcgagtttggatgcggccaacgaatatgagcgccactggcaccggcttcaagtggcgggttttgccgcgaaatcctacgcaagtcttttccttatgatcacaggcgccacgccgaccgagtttgaccagtttagctatatagacgcgatcgaggttgagaagtctccaatcaagaaagagttgtcggctgtgaagttccgggcgggcgggaaatcaactctttataacatcgggcgtgacacggggttgccgctgctcaaggagtacctgaagctccgtgagtggattctgaatggcgtgtcgcatgagcggctgttctttacgatgcctgcgagtggcaaactagcaagcaccgataacgaattttctgaatttaacacaactatgttgatgaaaaaattcttcaattcgatcagcggcaccttccttgaccccaaggtaccaagactttcgccgcgcaagatgcgcaagtacaagagccttgggatgcacaccgctggcgtgtcgccgtccacggtagcggcaaccttgaatcagagtttgatggtcaatctttcgacttattcggaggctactactgagcagcagaaagctgagttcggacagttttggcaggccatgcgccatacagccaaagtcacgtttgagcgcagccataggcctgcaggaggcgagatcggaacggcggcgggtcactgtgatgagtttagtcagccgatccctgtgcatgatttagggggtgttccaatcgagccgaactgccgcagccaatacggctgcttgtactgcgagcactatatctgtcacagcgatgaagaagacctgcacaagattgtgagcttgcagtatgtgatcaatgcggtgcgtgaagccgcgcccgattcggctcatgctgaagcgctctacaaagaattgtcgatccgaatcgagttcatccttgaggcgcttggcgagcgttcgaatacggtgaagcaactggtcgaagcgatcaaggccaaggtgtttgaatacggtgaactcacgcctttctgggaaagccgtctgagtcgttatgaaaaaatgggagtggtattttga

SEQ ID NO: 354550 - DNA, 459 bp, Pseudomonas aeruginosa
atgcgatcactcggaatacgcgctgagcctaaaaaggcgacgttcgtcatctacgacgatgaaacgaagcaaatcatgaacgtcgagtctttgataatcccccagatcctgaacaagccagagcagctcaaatttgctcgtcacagcattctcgacatcctacgggagtaccatgtcgacgtagcaggcatccgggtggcagagggcaactctcaaaaccaagatgctgaccggctctacctagaggccgtgttcatggagtcgttcgcaagcagcagcatcaaaagctactttgtcgggcgcaaaaccagtattggcgcacgcctggggatcaccgcgacagaattcgcctcgatcgtaaaatgtgagacccagcttgaggacgtcgaaggctggccgcctggaaaggctgcggcagttcgtgaggccatccttgttgctgtaggagccacccgatga

SEQ ID NO: 354551 - DNA, 1032 bp, Pseudomonas aeruginosa
atgattccttaccaagcggctcaggtgtcgttcaggaagcagcagcgcatcggcgaaaacggtgagaactctgaggtgtatgtcgtccatgacgaacacttggatgccgagctcgtgatcaagcaggtgaagaccgatggcttcaacgaagagcgtttcttgcttgaggcccagctgctgtacaagagcatccacccgtacgttgtgcaggtgctgtacgcctgcaaagacacccagcacatctacatcgccatgccgtactacagcaggggatcgctgcaccaggttgctgaggaagaaggcctgacctgtaggcagctaatacgctacgccatccagttcctgagcggtctcaacaacattcactccaaggggctgcttcatttcgacatcaagccagacaacatcttgatctccgacaccgatgaggcactgctgtcagattttggctttgccaagaatatggacatcgatggatatgccacccctgaagctacatatcgcttccatctacctcccgaaagcgcgctgacccgtgatttcaacaacagcgcagacatctaccaggtaggcttgaccctataccgtttgctggtggggctggactctctgcagcagcagctaggcgctttcacgaccggtgcagaattggcgcgggctcagcgcctggaaacctatcctgatttggcgcaaatccctcgtcatgtgccaaaaaaactcaagaacatcatcaagaagtgcttgaggtacgagcctgactcgcgctatcaatcagtaatggatctactgaatgacctgtcgtccatcgaggatttgggcctggattggcgcttctctaccgatggtaacgtccgacgttgggaaagcatttcgtcggatggcacaggtcttttggtagaggtggccgataatggccagtgtacgtcccagaaaaagaccgcttccggcgcttatcgcaggaaacccggtctttgcggagacaacgtaaccccggagcggattcatgaaatcctcatgtcatcagagtggtaa

SEQ ID NO: 354552 - DNA, 564 bp, Pseudomonas aeruginosa
gtgaaggagtcggtttttgcgcagggcactgattcgctagacgtttttagacagctcgtggaaacgcctgatgacttcctggggatgctggcctactcgctgtacaagcgccacaagatcgagtggctccaggcccacccgcaggacaatcatcaagccttcaaaaaggtggcgtgcaccccgcaacagattgggatgtatcgcagccaagccgaacagatggccaagaacttcatcgatattacgcttgaagcgcttggggaggagatgcggaataccatcatgaccaacgaagtcatgactcgcatgaaccagatcgagcctaacctctcaggcaaaatcgatcagctcaagccccctttctacaaggtcatcggcaaccactttctcggcggtgtttgctcagcaatcgtagcggtgaccatcttcggtttcttcaccctctactcgaaattccagaatgatggcggccttgaaggcatgttcaagggcgacaaccaacaaactacttcggtagaaactgagcctcggccagccgtcccgcccctgcaggccaaaaaataa

SEQ ID NO: 354553 - DNA, 150 bp, Pseudomonas aeruginosa
atgccaaacgtatcgatcgcgctcatcaagcagagcaacagaatgctcgcatctggtgccacaaaagccgtgaccgcgcgttcttccaagctgtcccaagacacgatcaatggcctgatgaaaaaggcattcgggcgcctagcgcgctga

SEQ ID NO: 354554 - DNA, 750 bp, Pseudomonas aeruginosa
atgagctcgatcaaggaatactacttcgagaagcagcaggaaaattgcatcgcctggattcgggaacagtgtggaatcgagatagatcctgatgagcaccccgaagcgtgggaggatctggccggcgagtactccgccatgcttgaggctgaggaagccgagtaccaatggctgaatcggcatacccacagtgagtttttccagcagttcgcgaacgagctcgcgacggcttccagcttgctaaatgtaggcacctccgccgtccacaccgataccctcaacaagctcgtctacgcccatatcatcacactcatggaggcgttgatcagctcggttgtgcgccacttgatcgtgaaggatgctcggctgctgaccaacctggtcgccgggtatggaaagctgagcgcgaagaccatcaccctcaaggaaatcgcagagcaacctaaggtaatggaaagcatcgctcaacagaccctgtctgagctgacgtttcacaatgtcgccacgatcaagcagatcctggaagcaatgttcgccgagcacatggacggcttgaagattgcgccaatcgctcgtatctgcagcaagcgtcatgacatagtccatcgcaacggcaagactgtaagagacgaaccgatagacctcactgtggaagaggttcgtgacgcgatgctcgtcgttcgagcttttgctgacgacctacagcgcaggatcaacaatgcgcttgatgatggatctgcgcagatctag

SEQ ID NO: 354555 - DNA, 213 bp, Pseudomonas aeruginosa
atgaccatcctcgaccgccttgtcgctcggctgtttcccgaccgccgccctgaatgggaaaaacagcgtgagcgtgagttcatcgaggcagtcaacggcctcaagacgcttagggttgcgccggggggcaccatgtctatcgaccctgaggagatacgtgagcaggtgctggagtcgcgggagcgattgaagcacttcgtccataggccataa

SEQ ID NO: 354556 - DNA, 1065 bp, Pseudomonas aeruginosa
atggatttgctaacgccccttttcgaccaagacaagcttcatcagcactttaagatgatttctgatgggcgaattggcaggcattaccagcgcgatgagattctgcgttggctggaaggttttccagacagggataaaaaattcgtcaaagaatttcagaccaccttcaactcgagcttttgggaaatttatctacacgcggctttccgtgagtacggtttctcgtttgactggaagcatgctgcgccagactttctggtcactgcagcagacacggcctttacggtagaggccaccactgcaaatcacgcaactgatggtgcgccagagtggagtgagccgctgacgccagagttcttcgagaacgtcgagttcaatgagctcaaccggatagcgattattcggcttgccaatgcattcatgagcaagtccaagaagtatttggacaagtacgcgaatcacgatcacgtaaaagggcgtccgtttgtacttgccattgctccgtttgagcagcctggattccacctacaagcttacaggccaattgaagctttgttgttcgatcactatgtggacgaagccgaatacttggctaatccgcaagactttcccaatgggctcctagcaaaatcgttgggcagtgtggagaagggcaacggatcttcaattgagctgggcttattccaaaatccgcgatactgccatatcagcgcggtggtattcagtcatctggccacttggggaaaggtagacgccatgtgcggaaacccttatgcaatcattggatcggtctggtcgacccccgagggcctgaagcggacagtggctcgggccagcgaaggcccagagaggatcaccgatggactacggatttatcacaacccttacgccacgaatcctttgccgttggaggttttccgaagagaaggggtggtgcaggtctgggcagatcatgatgatcactcactgctccaggagcaggctgacaactgtctgcaatccagagtaccaattacgttgttcaccggcactgaagaagacttcaaggaaaaacctgcttcgtag

SEQ ID NO: 354557 - DNA, 1020 bp, Pseudomonas aeruginosa
atgaaagcaagtgtagctaggaatcatcacttcgtttcgcaagccgagcagcggctaaatgctattgatgcaaatgtaaaacgaaaaaatcagcgcatctataaatttgatatcttgaggcgggaggagccgatattaaaaaaatctaaaccgactggtgtgcgtattgagcataacttatccagaatggatttatatactctaaatattctggagagtggcgagcagcataattttgagcaagcgtttcaaaaatatgagaatgattgttcaaggtttacaaagactttgctcgatgggcttgagtctcatggggtggacagctttaagagtgaattgcttcgactttatgcgctcaaacttgtaaattctattagaagtccctatgccgtaaaacggactcttcagatgttcagagaactggacggcgtattgcctagtgccgaaacactgcgagctcacttcgtctctttggagcacggtaatcgaccgcaagttgccgaaatttgctcggagtttggaatatcaaaggaagaatatttatcttggctgaaggtcatatatttggtgatactgcagcctttgaatcatgggctaaaccttatagaaaccttgatgaaaagtcttcttgagaatacgaatattatcaaaagcttctacgtttataagtacgataaaacttctgagggggcaggggtgttactaagcgatcgaatgatcgatcagtggcctcgcctgggaactcagattcaaatgttcaatttggatgcgagctccttcatggttgtgatacttgttgatattaagaaccaagatatcgtgagtttgacgcctgaagatgctggccttgatttcaaacaaagaaatcttgtccatgttgattattcaaaaaatgatctccaagccctaaagggttttaatcaacattgcgtttggcttgccaattcaaatgttttttgcgcatccgataagccgtttggcgttgaagttcaagtggaaggtgatgagctgtctacgtaa

SEQ ID NO: 354558 - DNA, 963 bp, Pseudomonas aeruginosa
atggcgcagcaggttgcgctgctggctttcgagcatttccaggtcttcgccgaagatctttccctggccttcgcgaatgctctcggtgagcgcctggtcgtgggcctggaagttgcgcgccatgccccagaagtaccagatggaagtggcgctctccggggtgatgaagtcgaccacgatgctcgccgccttgcgctccgccggcgcctggtagccgccgtggccggcgtgggccacgccgacctcgatcagcacgtggctgggcggcgtgaagcggcagatctgccagcggtccaccgccacgtcgtcggccaggccgttgccgcgcagagccatgcgccagaacggcggggccatgacattctgcatgtggcggctggtgatcacctcgtcgccttccacccgcgtggtcggcgcggcctcgtcgatttccttctggccgatgctggacgcatggacataggtctcgtgggtcaggtccatcaggttatcgatcatcaggcgatagtcgcagtggatgtggtacagcccgccgccataggcccaatcggggctttccgcccattccaggcggggtatcagcgcggcgtcggcctgttcttccgcgcccggccagacccagacgaagccgtgccgttcctgcaccgggaagcgacggatgcaggggaagccgcggacccgctggccgggcatcgcgcgggtgcgaccgtcctcgcccattgccaggccgtggtagccgcagaccagcacgccgtcctcgacgaagcccagcgacagcggcgcgccacggtgcgggcagaaatcctcgagggccgccacgcggccgtcctcgcctcggtagaaaaccatcggctcgtcgcagatgcgtcggccgagcggcttgccggccagttcgtcgggggtgcaggccacgtaccaggcgttcttcggaaacatcgtcggatcctctcgttgtttttgtaa

SEQ ID NO: 354559 - DNA, 210 bp, Pseudomonas aeruginosa
atgaacaccaggatcgccgccaccttgatcccggcgaaccagtactcggcctcgccgaaggcgcgggtcgccagggcattgagagagaacagcacgaccacgaagaaacccgaccatagccacacgggcacctccgggaaccagcgggtcatgagcatcccggccgcggtgaactccaggcctaccgtggaggcccagctcatccagtag

SEQ ID NO: 354560 - DNA, 123 bp, Pseudomonas aeruginosa
atgatgtccaccatcgactacttcaccatgctcggctggctgttcctcgccctgctggtgatcatctggctggcccgcccgccgttcggcgccaagcccggcgcggccgcctccgggcactga

SEQ ID NO: 354561 - DNA, 843 bp, Pseudomonas aeruginosa
ttgaaagcctatttccatcgctggcgctcgctggtcatcctcgccctgcttctcgcgccgctgctctggcccctgcaatatttcgccgagcgctactacagcgagcagttggccgagcagaaccgccagacgctcgacctctacgtcgccaacctgctcggcacgctgcgccgctacgaagaactgccgcagatcctcggcggcctgccggtgctgcgccaggccctgcaacaacctggcgacccgctgctgcagaagatcgccaacgaggcgctggccgacatccgccgacgcaccggcgccgacgtgatctacctgctgcaaccggacggcaccacccaggtcgcctccaactgggcccaggcggacagtttcgtccaccgcaacttcgccttccgcccctattatcgcgaggccatgcagggccgcctggcgcgcttcttcggcctgggcaccacctcgatcaagcgcggctactacttcgccagtgcggtgaaggaaggctcgcggatcatcggcgtgctggtggtgaaggtcgatctcgaacacatcgaacggctctggggcaattccccggagcaactgctggtgatagacaactacggcgtggtgatcctctcctcccgcgaggattggcgcttccatgccagtcggccgctgagcgcggcggagcgcgacgagatccacgccaacatcccctacccggtgcaggacccgaagcccctgcgcctgcaacagagcgcctggctcagccagagccggacgctgccggaaaccggctggacggtgagcatctacgcccccgcaccctcatcgaacggccggtgcgcagcgtcctgctga

SEQ ID NO: 354562 - DNA, 681 bp, Pseudomonas aeruginosa
atgtccaatcaacaacattcccgcctgggccagatcctgatcaacaaggggctgattagcgccgcccaactggacgccgcgatccaggcgcagttgagcaaccacaagcgcctgggcgaaaccctgatcgagcagggcctgctgagcgaacggcaactgaagaaggcgctgaagaagcagaccaacctgcgcctggccgcgaccctggtcgccgccctgctcagtccgttccagatggccagcgccgacatccagcgtatgcagccgccagcggccatgagccgccaggaactgccgaagaacctgcgtccgctgaccgacgtcgagatgagcaacgtcaacgcccagggcctcaacgaaagcctcgagggcctgttcctgaaggccgagggcggcgacggactggccgcggtgaagcaactggcgaagctggtgatgccgatgctcgacagcctggaggcggaaacctcgatgagcgacgttcgctacgaaaccggcaagacgcaaagcacgctcaaccccgacggctcggtcaacctgcgcctgccgagcagtatcggcgaggtgcgcttcgacaatatccgcattgccggcgcgccgcgcgagcagacgttcggcagcgtcagcctgcaacagatcgacctgtcccaggcctccctgaagatcagcctgcggccctga

SEQ ID NO: 354563 - DNA, 1356 bp, Pseudomonas aeruginosa
atgagtttcagcctgtggttgctggtactgggctgcatcctgctgacgctcggcctggcttcggcctacctgcgcctgctgccggtcagcacgtcgctcatctacctgctgttcggcctggccatcggtccggccgggctgcacgcctggcgcagcggcctggcggacatcagcggctggttcgaacacctcagcgaggcggcgttgctgatctcgctgttcatcggcggcctcaagctgcgcctgccgttgcgctcgccggcctggaccgctgcctggctgctggccggaccagtcctgctcggctgtatcctcggccttaccctgggcgcgcatttcctgttcggcctggactgggggctggccttgctggtcgcggcgatcctcgcgcctaccgacccggtgctggccagcgacatccaggtcaaccacgccggcgacgacgatcgcctgcgctacgccgtatccggcgaggcgggactcaacgacggcatcgcctttcccttcgtcatcgccgccctgctgctgatcggtcagggcggcggcctgcctggcgagttcgaccgcagcggcctggactggctgctgcgcgacgtcctctgggccatccccgccggattgctggtgggctattgcctgggccatggcctcggccgcctggccatccacctgcgggcgcggcacaccgacacctcggtgtcggccaacgacttcctcgccctggcgctgatcgcgctgtcctatgtcggcgccgacgcgctgggcggctggggcttcctcgccagcttcgccgccgggatcggcctgcgccacgccgaggtggcgacgctgggacacgcctcggcaccggccgaggcgcaggcggccgccgccgacgtgcgcgaggccgggcaggccagcggcgccatcgagtatggcgccgaccgcagcgaacacccgaaggtggcggccggcgcggtgatgctcgacgtgctctccttcggcaacctgctggagcgctcgctggaagtgctgctggtgaccctgctcggtgccatgctctaccagcactgggactggcgcgcgctgccgctggcgctgctgctgttctgcgtgtgtcggccggcgatggtctggctgctggtcggccggcggctgatgcacccggcgcagcggcgcctgctcggctggttcggcatccgcggcatcggcagcctgtactacctcagctacgcgctgaaccaggggctgcctacggcgctcgcgcataccgccagcgacctggtgctgagcctcgtcgcccagcagcgcctgctgggtggcttcgccgatgatcatcagcagcagcaggtcgaaggtggtgatgtcggtcagtga

SEQ ID NO: 354564 - DNA, 681 bp, Pseudomonas aeruginosa
atgcatcgcggcaacactagaccgccgctgccaggagcgatagcgaggggcaaaggcggaaggcaagacaaaaggacgcggcaccgtgccgcgtcgaaagtcagtctgcacgtgaggaggacgcggcacagagcggtttcaccaccgtgccgtatggtgcgtaaagcccgcaccaacacaggcgtgtccgtgtgcttcgtacgaccggaaacgccagaacttccagacaatccagtcatgactcaacgactcgggcaacgcgggtcggcctctaccggcatttcgtcatgctcgctagcggacgctacgcgatggtcgatgacggcatgggtttctcgttggtgccgtggcgacccgcgatcgaacagcggctgggacagcagatcgccgcaacggtacacggcggtggtgtgtcgtgggagattggacggcagcgtaggccaaccgttggttgaaacggcgtgcattcaagcgagcgagtacaccttttgccacttccgctcatccgctgaaggagaggatcattcctgccgccccagcgacgagaaccgcatcgataagaagctcgaatgtgtgcgtctggagtcgctggacgagacgtttcgcaatcatcgaaccgacgagcaatgcgatgccgatggcaagtccacgtgcgatgacgggctgcgtaagtacgcctga

SEQ ID NO: 354565 - DNA, 240 bp, Pseudomonas aeruginosa
atgtacggcatactcaaaacagatgccacaatccccatcacccggccgataaagacgagggagttggcgaagacggacattctggcccccacctgcgtcctgaacggcctcctgcttaatggcatagaacacaccctgaagaataggaatcacaaccgcgataagggcctggacctcgtccgcgacagggttccgttgtatctcctttctcaaatccatcaaccactctccgtatgctga

SEQ ID NO: 354566 - DNA, 237 bp, Pseudomonas aeruginosa
atgagtctcgcgattccgatgcctgaacgtccgcgccgcgcccgtggccgcctgcaactgctggcgatcatcggcctggtggtggggccgatgctgctcgccagcgccatgtacaaatggaatttctgggttccgcaggggcgcagctacagcggcgcgctgatcggcaacggccagaccccgccgacctcggcgtgcagggacgcagtcagggcgagcagtggcaactgctggtga

SEQ ID NO: 354567 - DNA, 969 bp, Pseudomonas aeruginosa
atgagtgcaagttttaggaagattgattactcgctgcggcctgctaaatatgctgaaagaaagatgttagttgaggtgttgaggaggcttgcggcttatcaacctgttgaagattatagttatgtagggtttgggtcggtttggttctctgattttactttgttccatcgtgccttaggcataagagacatggtctctattgaaaaggcggaaaatgcaagggatagaatagaagcaaataaaccctttcagataagggttgagtatgcaagttcatctactgccttgcctagaattgattgggccaaacgtacaattgtttggcttgattatgatgagcctcttttgccatctatgttgcaggatgtcaggattgtagcaactagatgtatgtctgggtcattagtggctgtatctgttcaatgtgttaaagccccggaatatatagcttatgagcgcgaggctggtctggatgagcaagcgattggggctattgaaagatttgagcaagcttttggcagggatagagtgccgccaggcacttctgatgatgacttggtagcttggtcttacggtaagttaattcgtaagatgataaaggccgaagttgagtcagcattaggaagtcgaaatgctggtgaggtgaatattttagagtttttgcctatatgtgaaatagagtaccaggatgatgctcgtatgacaacgttggttggtcttatagtcgatcaggaagataagcagcgttattcggtctgtggcttcgataggttggattttatgagtggaaataactctccaataagaattgagatgccgaaattaacagtgagagagcttaggttaattgagcagcagttaccgtcaaatggggaggatttgatattaggggctataccctcttctgatgcattaaagtttgcgcggatgtataggtatttcccaaactttgccgttatggaggcttga

SEQ ID NO: 354568 - DNA, 1368 bp, Pseudomonas aeruginosa
atgacagatggacagaacgagcagaacgaacacggtgggaagggcaatattaatgcccatcctaccaaggcattctttgttgatatgctcgttagggatattcccttagaacaagcgatacttgatctcgtagataattgcatcgatggtgcgaagcgtattgctcaagttcaaccatcgagtattccatatgggggtagaaaggtagagatagattttaataaggatttttttaagatagttgataattgtggaggttttagtacccaaattgcccgcgattatgcttttcgttttgggcgccctaaagaggctgggcgaacgtctcattctatagggcaatttggcgttggcatgaagcgggctttatttaagtttgggaaagagtttacggttcagtctgcgactgtagatgaggagtgggcaataaaagttgatgttcctgagtgggaggctgatgagtctacatggacatttccttgggtggcttttaactctcaacagatatcaagaactgagccgggtactgagatagttgtaagcagtctgcgctctgaggtttcatctaggttttcaacttcaatgtttgtgaactctataattgggttgattaaatctaagcaccgccagtttatctcggaaggccttgaagtcgtagtgaatggtgtaaggattgatgcgactaatatatatctcttgatgactgaaaaacttcagcctggaaaggatactttagagtttaatattgatggtgcaactgtttttgctaatataatagttggtgttggtcagtctgctcctagggaggcaggttggtatgttatatgtaatggtcgggttatattagaagctgatcgaagagctgtgacaggttgggggctgctggaagaagaggccggaagggctttgatccctgctttccataaccagtttgctaggttcagggggattgtatcttttgattctgaggattcgtcaaaagttccatggaacactacaaagacagatgttgatctagatagtattgtatgggtaaagacatttcagcggatgttagaaatgatgaggcctgtcattgatttcttgaatgagctggataacgatattgatgagtttacgcgtgataagagtccattgcttgatcatgtctctaaggcttctattactcgacctgaaagcattacggctaaatcggactttgtcgcaccagtacgcggaagtattgtaaaggggccaaggtatgtcaaaatacagtattcgagaaaaattgacgatgtagagtttctccaagatattttaggggttggctcggccaaggctgtaggtgagacttcatttgacatgattcttaagaggcacaaggaatga

SEQ ID NO: 354569 - DNA, 1107 bp, Pseudomonas aeruginosa
atgcctaccatcctggatctcttcagcggctgcggcggcctggccctaggcaccaagaacgccggctttacgacagccttggctatcgacatcgaccctatcctttctagctcgttccccaccaattttcctggcacgacctttcttcaggcggacatcagctcactcaccagcactcagttggctgagctattacctcatggagttgacggtatcgttggcggccccccttgccaagcattcagcgggataggtagacgccttcccgacgatccccgaagagatttagtgggcgaattcttcagaattgtcaaggtggttaacccaacttttttcttaatggagaatgtacccggattaggcttccccgaaaatcggccaatacttgactctgccattaagacactaggaaaaaagtggaaagttttagagcccgtcattcttgatgcagcagactatggcgccccaaccaaacgcaagcgtattttcgtattcggtttcaacatatccaaaatgcaacctccatctcttgccgaagtcatagagtcaaactcaaaacgaacaaccgttaaggatgctatcggcgacctagcgagcatcccagtatccgaagaaaatctcttgaaatatattgattatattaacatctcagattatgcaaaaaagatgagatccccaacagaaatatttaccggacataaaatcaccaaacacagaccagaaactattgcaagatttgctaaaatcccacaaggtggagttgatccggtcggaaagcataaacgcctatcatggataggactttgccctacactgcgagcaggcacggggagtgaccgtggttcatatcaggccgtgcgccctctgcacccagagcagaatagagttatctccccacgagaagctgcccgcctacaaggctttcccgataacttcatttttcaccctactgtctggcatagtttccgcatgataggaaatagcgtctctcctattattgcagaagcacttctaaagaatataaagaaatacttaccaatttcctcgcccaatgcgaaaaccgactctaagcacaaaaaatcgaaacccaaactcgatataatataa

SEQ ID NO: 354570 - DNA, 351 bp, Pseudomonas aeruginosa
atggtggatcaccagcaacaaccgctggctgccgtctccgagcgtcgccagcagcgcgcgcaacagtggcccgctgcccaggtcgagactgcgctgggcctgctccgccagggcttccagcgcttggccgtcggcgaccgactgctgccacagcagcacctcgccggcctcgaccgcgcggtgttcggcgcgccaggtcccgtcttcgaggcggaagcccaggcgcaacgcatcgtggtgcgccagcaacgcctgcagcgccgtttccagaagcgtaccgtcgagtgcctgccccggctccagcaggaccgactggttccagtgctggcgccgcgggatatccagttctaa

SEQ ID NO: 354571 - DNA, 975 bp, Pseudomonas aeruginosa
atggaaggcgaagaaggaaagaaaactcagttgtttgtagggtttagaaaagccaatggccagataggatatatctcagaaagcctttcaatccctgagtttttcgagatggtgcgaccttcagataaccatggacgagttctagttgatttttcaccggtgattgaggcactccacgcgctacacagagaggccggtgatgaagctgttatcagcaaatataagtccatgtatagctactggcacgattctatatcatacagcgactttcggatcagactgcccaaatgtgagggcctatcggtagctgccaacgagttgctggcaattctcgaagacagggtaaccaagcacagtagagcctacaaaggtcgtagaataggtgactcgaatgacaatctaaaggtcatcttggcacttgaaaaagatgtgaacattgtaattgatacactactttgtttcattcattccaaagcatctttagaaattgcctcatttaagaaggatgtagtgctgggcgggtactgcgcacgactactttcagcgctagagggcttattaactaaagccattgattactcaacctacaatgataattttaagctggaaagcgattctttattattttatttggcaatgactaataatgatgacgttgacagctacagccggcttctacctaattttggaattaacgaagatctgcgtctagccgttctgtatcgcggcgatagctatgaaattacggatgggcgtaatgatcgttatatggaagtagtaactcgttatcgtgttccggatggaaatgaattaatgatagctaaaatactcagggatctgtgctacaaggtactttcaataagcggtttgatccataccctcaaaaatgaggtagtccggtgggatccttctgaaaattcgattgatgagttgaaagacctgattcgcctccttcccacgacagtaaacacctaa

SEQ ID NO: 354572 - DNA, 705 bp, Pseudomonas aeruginosa
atggcgcaggccgaagtagcggctgacgaagtactgggtggtgccggtctcgccgccggcgcccaggccgatcaggaacaccgcgccccagagcagcgccggcggtccgccaaggagcaggagcagcagcccgagcgccgccagcagggcgaacggcaaggcgatgcgcggggtgtcgtagcggtccagcaggtagcccagcgccggttgcgaaacgatcatgccgacccacagcgccgccagcacgtcggtggcgacttcccgcgacaggccgcgctcctgcaacagcggcacgccatgcaccatcacgccagtgacggcgaacacgccgaggatcaggttgccgacgatcagccagaagtccgccgagcgccaggcctggcctggcgtcgctccgggcagcgcgtcggctggcgggcgccgcgcctgcggcaggtcgccgggtcgctcgcggaacaacgcatagagcagcggcagcgccaggaggccttcgagcaggccatagacgaggaaggtggcgcgccagccgaaggcgtcgatgcaggcgctgcccaggtacagcgccagcggcccgccgacgccgaagccgagtccgaggatgccgtaggccgcgccgcgacgacgctcgaaccagccgccgagaatccgcgcatagggaatgttgcccggcgtcagcaggccgagcagcgcgaacagcaggtatag

SEQ ID NO: 354573 - DNA, 1425 bp, Pseudomonas aeruginosa
  misc_feature (1382)..(1391): n is a, c, g, or t
atggataataatgtcgggtttattaagacaattaaggttttatctgactttgaagagttggttcggcgttttgtccagaaaatttatagcgcggatgcctacttggtaggtgggccatacgatggtggtagagatttggtctatgccgttcgagggcgggaagttaggcaggccatccagatttcgactcaagagaaaaatcttgaggctaagctaaacgaagaccttgaaaaggttgttaagctggtagatgaacattcttatccacctattttgattttcttttggtcacatcaaatatctgcaagtaaagaagatgaactgaaaacgaatgctaggcgtgattatggagtaactctggaattttatgatgctaataaagtcggccaaaaaataactaatgaataccctggtattttaaggtttttgttagaggatgttcataaatatcgtccggcttcgaatgctgatgtgaatattaaacagcgtgctttctatgattatttggttctgagtaaagatactacaagtctcaagcatgttatcgtggattcgcatatcgtctcggttctgagtggcggttgtttgacagaggcggttttggtcgaggtcttgggtgagctgggtatcagtttacctgttttcaaatctcgtgtttctctcctcaagaaagaagggcgggttgttgtgggtgaggggggctatagcctcgcagaaaatgagcttgatagagtaaaggctcttgccatgaaagatcaggcaggtagggctgaagtgctcgcagctatcgatgaaatttccaaagaatatacttctgctccagtggcagagcaaatactggaactgattcaggaagcgtatggtgcgtcagtcgatattcaaatttctgaggagagttttgagccgccaaagcttgcaatagtaaaaggagcagtagagaatattgctagccttcttaggagggtttcggatatctcagataatgatgctaagcatgcatcgcaaaagctcgtagagatttctgctaaaaatgaatatttgtcaaactactgttcaactcgattatgtatcgggctgttaaatcaatctaagcttgaaaggtacgtagaggataaaaaattcttcctgtatctagacgctccggtatttatctactatttggcagttatgcggtatagggaggacgttgatgataacgcttaccgaacggtggggcatttaagggataatattaagaggcttcgtaacaaggaggttcgagttactcttgagcactttgaggagacggtccggcatctggaaaatgctgaaaaaataagccgctttgcaagcgatgagctaatcgcgagtctcggagattcaaaaaatgtgttctttaactnnnnnnnnnntatgagttttcttcttttctcgaggacttcatag

SEQ ID NO: 354574 - DNA, 213 bp, Pseudomonas aeruginosa
ttgtcttcgtggctcaaccgcgtggccctttgctatcacatggaggtgtccgagctgctggagcacgatcttggtcacggccaggttgatgacctggacaccgcgccaccactggcgctgctggcgatgctctcccagcggagcggcatcgagccggaccggctgcgttgcatgagtttcgccggctgggtgttggctactggacagccttga

SEQ ID NO: 354575 - DNA, 1926 bp, Pseudomonas aeruginosa
atgcacccacaatccctggataactgcccgaacgacctttccgccttcattgccgatcacttcggcgagcgtgatatccagcccgagagcgccattgcgcgctcctggtaccgcagcgtgatgaagcaccatctcgatccgcgtgcgcgggcgaaaaaacacatcctcaccgccggggaaatccgcgaacaccagagccagcaccagaattacttgtccatcgccagccagggcgtcaccggccttgcccggcgtgtgcttccggcgggctttgcggtgctgctcagtgacgagaacggcatcaccctcgatgcgcgcttgcccagcgaacgcgaacgctacactcaggccgggctgattatcggcgcgcgctgggacgaatctatcgccggcaccaacggcatcggcaccgccctggccgcaggcgaagcgctgactatccaccggcaggaacacttcttggtcagcaacttccgcctgagttgctctgtggcgccgattttcgatgcacaacatcagttgcgcggctgcctgaatgctacttgcctgtacaacgatgggcccaagaacgcacagtatctgacgctgcaactggtaatcctgtatgcgcggctgatcgagaacgctagcttccgccagcgttaccgcgaccgcctgacgctttcgctgaaagtccgcgacgaagtttcggacttggccaacgaacagctcatcgcccttgatgatcagggacgggtgatcggcgctaaccacgccgcctttaccgccagccggggcgaactgttgggcagccggatcgaacagctgctggaagcggatgtcgatcaactgctcgacttgagcaaaggtggcgcacgcgggatccgcgtgcgcaccctggccgaccacacgctggtggacgtaggtctccgtacaccggccagcccgactcgccgaagtgcgccggtagccaccgcgaagggcccagagcatcccaacctcacccgcctcgccggcgctgacccgcgcttgcaggaaggagtgcgcaaactgcgcaaggtgctggacaaaggcattgccatcctgattaccggcgagaccggcaccggcaaggaagcgttcgcccgcgctatccatcaggccagctcgcgccacggcggcccctttgtggcgttgaactgcgcggcgattccggaaagcctgatcgagagcgaactcttcggttatcgcggaggcagcttcaccggtgccagcaagaaaggtatgaagggcaagctggagctggccaatggcgggaccctgttcctcgatgaaatcggcgacatgccagcacacctgcagacacgtctgctgcgcgtgctggccgagcgcgaaattctcccgctgggagctgaagcgccggtattgttggatgtacaggtggtttcggcgacgcaccagaacctcgccgagatgatccgtgccaaagtcttccgtgaggatctgttctatcgcctcgctggcatgaccctgcaactgcccgcactgcgcgaacgcagcgaccgcgaggcgctgatcgacagcctgctggcaagcctgggaggcaacctgcatctgaacgccgccacacgcgagtgccttcgcaaccatgcgtggccgggcaacatccgccagttgctgaactgcctgcgctatgcaagcgccctcgccgaggaggaatgcatcgacctggactgcctgccgatggagttgcatcaggctgcccccgccgtcatcactgcgccgaaaccgcagagtgacgcactctccgcccgcctggacgacgacgaagcacgccatctgctggcggcgctgcgcgagcggcattggaacattagtgcagtggcggaacagttcggcattgcccggtcgaccctatatcgaaagatgaagaagcatggcatctcgcagcctaatgcgctgtactga

SEQ ID NO: 354576 - DNA, 1437 bp, Pseudomonas aeruginosa
atgaccgaagtaacgacttaccagcattatatagacaatcgcttcgtagcaagcgagccggtgatcgaggtgcacaacccggccaacggcgagttgctggctcgcatccccgaggctaacgcagctcaggtagatagcgctattggcgcagcccgtgccgcacagaaagcctgggcagctaagccggccatcgagcgcgccggctacctgcgccggattgccgagagagtacgtgccaacgcgccgcgcctggcgaagatcatcactgccgagcagggtaaggtaccggcgctggcagaggtggaagtgaacttcaccgccgactacctcgactacatggccgagtgggcgcgacgcctggaaggtgaggtattgaccagcgaccgtgtcggcgagcacatcttcctgctgcgtaaaccgttgggggtggtggcgggcatcctgccgtggaacttcccgttcttcctcatcgcccgaaagatggcgccggctctgctgaccggcaacaccatcgtcatcaagcccagtgaagaaacaccgatcaactgctttgagttcgcccgtttggtagccgagactaacctacctaccggcgtcttcaacgtcgtcggcggcacaggggccagcgccggtgccgcgttgaccagccatgccggcgttgacttgatcagcttcactggcagtgtcgccaccggcgcgcgcattatggctgcagccgcgccgaacatcaccaagctgaacttggagctgggcggcaaggccccagccatcgtcctcgccgacgctgatctggaactggcagtgaatgccatcaaggcctcccgggtgatcaacaccggacaggtgtgtaactgcgctgagcgagtctacgtgcaacgccaggtggccgatcaattcatcgagaaggtcgccgccgccatggccactactcgtttcggtgatccgaaccagcagtccgacctggacatgggcccactagtcaaccagatcggcctagacaaggtcgcgcagatggttcgcaccgcgaccgggcagggagcggaggtcatcaccggcggtgccgtggccgacctgggcaagggctttcactaccagcccaccgtgctcgccggctgcaagggagacatggaaatcatgcgtaaggagatctttggcccagtgttgccgattcaggtggtggacgatttggacgaagccatcgccctcgcgaatgacagcgactatggtctgacttcttcgatctacacccgcaacctcagtgcagcgctcaaagccagtcgcgagctggattttggcgaaacctacatcaaccgggagaacttcgaggcgatgcagggtttccatgctggtacgcgcaagtctggaatcggcggcgcggacggtaagcatggactgtatgagtacacccatacccatgtggtgtatgcgcaggagtga

SEQ ID NO: 354577 - DNA, 2196 bp, Pseudomonas aeruginosa
atgagatcgattggcctgtctgtgccttccgttcgcctgcaatccaccctgcgccattccctgctgatcgccttgctgtcgatggccgatatgtccgccaacctccacgccgctgaaaatctcaccgagagaccggccaatgtcgatggcaagcgcatcgctgctgccgacaaggaaccgggcaactggatgactaccggacgcacctacgacgagcagcgctacagtccgctaaagcagatcaaccagagcaatgtcggcggcttgggcctggcctggagctacaagctggatatcgaccgtggcgtggaggccacgcccatcgtagtcgacggcgtgatgtacaccactggaccgttctccattgtctacgcgctggacgcccgtaccggcgaactgctgtggaagtacgacccgcaatccgaccgcagccgtgcgggtgaagcctgctgcgacgcggtcaaccgtggtgtggcagtgtggaagggcaaggtctacgtcggcgtgctagacgggcgcctggaagctattgatgccaagactgggagacgcgtgtggagcgttgacacccgcaccgatccgtcgcgtagcatcaccatcaccggtgcgccgcgtattgtgaagggcaaggtgattatcggtaacggcggtgccgagttcggtgtgcgtggttacgtcaccgcgtatgacgctgagaccggcaggcaggactggcgcttcttcaccgtgcccggcgaccccaaggaaatgcccaagggcaagggcatggagatcgcggctaagacctggttcggcgacaattactctaagcagggcgggggcggcaccgtgtgggactcgatgtcctacgaccccgagctaaacctgctatacattggcgtcggcaatggctcttcgtggaacccgcgcatccgcagcgaaggcaagggggacaacctcttcctatcgtccatcgtcgcgatcaacccagacaatggcgaatacgtctggcactaccagaccacgccgggcgatgcatgggactacactgccacccagcacattatgctggcagaccttgaaatcgacggcaagaaacgcaaggtgctgatgcaggcgccgaagaatggtttcttctatgtcatcgatcgcgagaccggcgaattactctcggcgaagaacttcatcccgatcaactgggccaccggcatcgacatgaagaccggccggccgatccgcaatgagaaggtcgccgaatactggaaggacccggagaagaaggcgcgccttatccagccagcgttctggggcgcccacgattggcagcccatgtcgtacaaccccaacaccggcctggtctacatcccggcgcacatcatgtcagcgatgtaccaggacgtggacggcgcgccgccacgctccaaattcaagagcatctaccagctcgacgtcaacactggaatgatgcccgaggaccctgaaggcctgcgcaagatcgctgatacgtggaccggaaagctgatcgcctgggatccggtgaagcaggagaagcgctgggaagtaccctacagcactattttcaatggcggcactttgagcaccgccggtaatctggtcttcgagggtaccgccgatggtcgcgtggtggcctacgcggccgagaccggcaagaagctctgggagtccccggctaacaccggtgtgatggccgcgcccatcacttacgaagtggacggcgagcagtacgtgactttcatggccggctggggcggcgccttctctactttcgctggcgcgctgtcgctccgcgccggggtgaagcccaatgcccaggtgttgacctacaagctcggtggcaccagcaagctgccgaacatcaactacaagtgggccggccgcaaacccgagccgccggtgctgaccggcacctccgcgcagatcgaccaggggcgcgagttgttcaactccagttgctcacaatgccatggcatcaacgctattagtggcggcgtagtgcctgacctgcgcaccctcagcgcggaaaaccaccaacgcttcctcggcatcctctatggtgggcgcattcccgatggcatgccgtcgttccaaggccacctcgatctgcagcaggccgaggctgtgcaccagtatctgatcaagcgcgcttacgacctcaaggaacaattggccggagagcagaagaccgctgccaagtga

SEQ ID NO: 354578 - DNA, 180 bp, Pseudomonas aeruginosa
gtgcgcaccgacagcctgctcagcgatattcagcaaacgagcatgattggtctcgccctgccgacccgccctgaggcgcagcgctggattgctcaggctctgctgcagctgccgaccgaacccagcgtgacgctccttgaagtcattggcgagctgcgcagccacatccatttcacctag

SEQ ID NO: 354579 - DNA, 213 bp, Pseudomonas aeruginosa
atgaagcaacggattcccaccctcctcgccggcgcctgcctggccatccccctgcacaccctcggcgccgccgacctgctggtggtcaacgccaggatcttcaccgccaatccgcagcaacccttcgccgaggccctggcggtggaggacgggcggatcctcgcggtcggcgacgaggccgggctgcgcgccctggccgatggcgacagctag

SEQ ID NO: 354580 - DNA, 1800 bp, Pseudomonas aeruginosa
atgggcagtttcctttgcggcctggcggtggccctcagttggctgttccacagcctggtcactcgccatctgtggcgcatgtccgagttcgccgggcatatcgccgaaggcgacctgcaacagccgctgcgactggacaaggtggaccgcgagcgcgatgagatcgacgccgtcgccgccgccctggaagacatgcgccaggccctgcgcaccgaccgccgccggcgcgatgccgatcgcgacgagttgcgccgacaggtcgagcgacgcaccgccagcctgcgtcgggcgaaggaccaggcggaagccgccgaccgcgcgaagagccgtttcctcgcgaccatgagccatgagatccgtaccccgctgaacggcatcctgggcatggccgagctgctgcgcgaggcatcgctcggcgagcgtgaccgccagcgcctgcgggcactggcgacagcgggggagggactgctggcgatcctcaacgaggtcctccacttcgcccggctggaggaagcgccggatgtgccggaagcggtggacttttccttgcgaagcctgctcgaggacgtcctcaccctgctcgaaccgcgggcgcgggagaacgccacgcggctggacctgtggctggacccgcaggttcatgacggccatcgcggcgccgagcagttcctgcgccaggtgttgaccaacctgctgggcaacgcggtgaagttcaccgaggccggcgaggtgcgcgttcgcgtcgagcggctggtgcgcagcgcaggaagcgagcgactgcggctgagcgtcgcggacgatggaatcggcattcccgaggaaatgcgcgaacgcatcttcgaacgcttcacccagggcggcgacgccgtgacccgccgttacggcggaaccggcctgggcctggcgatcagcaagcggctggtggaagcgctgggcgggcggatcggcgtggaaagccgggtcggccagggcagcacgttctggttcgagatcgagctggcgctggcgagcttgtccggcgcgacgccgccggcggcatcggtgtctgcgctggaggtgctgctggtggaggacgtggcgctcaaccgcgaggtggcccagggcctgctcgagcgggacggccaccgggtgatgctggccgaggacgcggggccggccctggcgttgtgccggcagcggcgcttcgacctgatcctgctggacatgcacctgccggggatggctggcctcgagctttgcgccgggattcgccggcagctcgacggcctgaaccgcgccacgccgatcttcgccttcaccgccagcatccagccggacatggtgcgtcggtacttcgccgcgggtatgcagggcgtgctcggcaagcccctgcggatggacgagctgcgccgcgcgctgggcgaggtcggcaccagcgtgcctgcgcttgcggtggacgccgcgctggaccggcaaatgctcgagacccaccgccgcctgctggggcggcacaagctcgccggactgctgggcaacctgctgggaagcctggacgagcagttgccgctgctggccgaagccctggaccaggcggacctggccgaggcggcgaacatcgcccatcgcctgtccggaagctgccactccatgggcctggtggcgctcggcgccggcctgggcgagctggagcgcgaggccctgggcgcggccggggtcgacccgcgagcctggggcgcacgcctgggtagcctgcgccgcgacggcgccgaagccctgcgccgcgccggcttcctcggcgaagccgactcagcggccggttga

SEQ ID NO: 354581 - DNA, 633 bp, Pseudomonas aeruginosa
atgccttccctccagctctacagcgacagttcacccaacggattcaagatcaccatcgccctcgaggaactggggctgccctacgcactgcaccacgttcgcatcgaccatggcgagcaacgccgcccggaattcctgcgcctgaatccacatggccggataccggtgctggtagaccgggccgccggcatcaccctgttcgagtcggcggcgatcctgcagtacctggcggagaccagcgggcggttgcttcccgacgcccccccccgggaacgctgggaggccctgacctggctgactttccatgcttccagcatggggcccatcctcggccagcgcgtgcatttcgagatattcgccgaagagcggtacccgccggccatcgaacgctatcggcggctctccgaggaggttttcgccaccctcgaccagcgcctggccggacggccctggctggccggtgagcaatactccatcgccgatatcgccaccttcggctggacccatacggcgcggatcgtcgacttcgacttcagccattatcgccacctggacgactggcaccggcgcatggccctgcggcctgcggtgcagcgcgggatcctcctgccggaaccggcggtgggtccatga

SEQ ID NO: 354582 - DNA, 891 bp, Pseudomonas aeruginosa
atgggtgccgtcctcccgcttctcgcgctacgcgctttcgtcgaaaccgcccgccatggcaatctcacccgcgcggccgcggccatgggcgtcactcccggcgcggtaagccagcagctcagggctctgcaggcgcgcaccggcgtcgtcctgttccagcgcttcagccatggcatgcgcctgacgccggagggcgagcaggtctatcccggcctccgccaggccttcgagcagatcaccgcgagccttgcccagctggaggcgatcaatgcccgccagaccctcacggtcagcaccgagccctccttcgccgccacctggctggtgccgcgcctcggtcaattcagcgcgtcgcacccgcaggtggaagtccgcgtggaggctacggcactgctcgccgacctgcgccgggaacgaatcgacgtcgccatccgccacgggctcggcgactaccccggactcgacgtgcaggcactgatggccccgccgctgatcccggtggccagcccgcgcctgctggcggaaggtcctgagatccgcgaagcgatcgattgcctggcctacccactgttgcaggagtcggagcgcaatgactggcgcctgtggctgcgggcgatgggggtggaggacgacccgcgcagcgagagaggtccggctttcgccgacgacctgctgctggttcgcgccgccgaggccggccagggtatcgcgctggtacgggagatccatgcccgcgccgagatcgccagcggccgcctggcggtcgccctcgagcagccctggccgagccgcttcgcctattacgcggtgagcctgccaggagcggcgcaacgagcgcccctctcgctgttcctcgcctggctgcgcgagcaggccgccgccgaggcataa

SEQ ID NO: 354583 - DNA, 330 bp, Pseudomonas aeruginosa
atgtcgaatcctccccccaccgcagaacgaacccagcttcgcaagtccctcaagctgtggcagatcgtcatgatcgggttggcctacctgaccccgatgaccgtcttcgacaccttcggcatcgtatccgggatttcccagggacacgtgcccaccgcctacctgctggccctcgccggcgtgctgttcaccgcgatcagctacggcaagctggtccgccagttccccaccgcaggctcggcctatacctacgcgcaacgggcgatcaatcccatgtcggcttcatggtcggctggtcgtcgctgctggactacctgttcctgccgatga

SEQ ID NO: 354584 - DNA, 615 bp, Pseudomonas aeruginosa
atgcagctgcaattgacccaggagtgggacaagacctttccccagagcgcaaaggtcgaacatcgcaaggtcaccttcgccaatcgctacggcatcaccctggcagctgacctgtacctgccgaagaagcgtggcggcgatcggctgccggcaatcgtgatcggcggtccgttcggcgcggtcaaggagcagtcctccggcctgtatgcgcaaaccatggccgaacgcggattcgtcacgctggcgttcgacccatcgtataccggtgagagcggcggtcagccacgcaacgtcgcttcgctggatatcaataccgaagacttcagcgcggcagtggatttcatcggtttgttgccggaagtgaatcgcgagcgcatcggcgtcatcggcatctgcggctggggtggcatggcgctgaacgcggtggccgtggacaagcgcgtcaaggcggtggtgaccagcaccatgtacgacatgacgcgggtcatgtccaagggctacaacgacagcgtgaccctcgaacagcgcacgcgaacgctggagcaactgggccagcagcgctggaaggacgcggaaagcggtaccccgcctatcagccgccctacaacgaactga

SEQ ID NO: 354585 - DNA, 600 bp, Pseudomonas aeruginosa
atggatacgggccatcaccagccgggcgaagtgctcgagcatggcgacgtcccgctcggccagcggcccgcgtggttcccggtcgatgacgcagaggctgccgaggttgagaccttccgcggtggccagcggagccccggcgtagaagcggatgcgcggttcgccttgcacataggggttgtcccggaagcgcgggtcgagggtggcgtcggccacctcgaagactcccttgcccaggatcgcataggcgcagaacgaatcccgtcgcggcgtctgccggatatcgaggccgatgctcgcgcgaaaccactggcgctgatggtcgaggatggaaatgagcgcgatgggcgtctggaagtaggacgtagcggcggcgaggatttcctcgaatacctcgtccgcaccttcttccagcagaccgagttggtcgacgtaggcctgtctcgaatgctcgtcctcgggatagggtggggttgccatgctggactcctgggctactgcgatgtcgggcatcggcaatcaatgatgtcattgtgcctttatttcgtggagcgcgggctcttttcccagattgcagcgatgaaagggcatggaggttga

SEQ ID NO: 354586 - DNA, 198 bp, Pseudomonas aeruginosa
atgttcttgcacagccccgaccagccggtggactgcgccaggccctggaccaccatgcaggcggcgaagatcggcagggtggcgaaggtacccatcgccagcgccgccagcgccgaggtgagcaaaccgccgagcaccaccacgcgggtgccgaagcggtcggcgaacaccccccacatgaactggcccacggcgtag

SEQ ID NO: 354587 - DNA, 645 bp, Pseudomonas aeruginosa
atgccgggccatccgcgcccagaccccggtctcttcctgcaactgctgggtgtgttcgagaatctgttgcaagcgctgccaggccaggcgctgtttcggataacgctgcacgtagccgcgcagccatgcctcgccctcttccggcgtgccgcgggtttcatggctgtagaccagcgcatcgagttcctcgtcggtcatctgtcgctgcgcaccgatgggcgccagcaactcgatggcgctgtcgaaatcgaacatctgcagcgacaggcgccaggcatgctcgcgcagggccgggtcatcggcgccggccagcagttgcttccacaggcccagcgcccgcgggccgttgccggtccattcgccaaggcgcgcgagattggccagcagcgccctgtcctccgggcgcagggccagcagctcctggccgacctcccaggcccgctcgatccgcccggcggccatgttcaggcgcaggtcggcggccagcgcctcatggtcctcggggcgcaattcgcgccagcgccggatgaagcgttcggccaggtcgtagcgctggctgccttcggcggcgcgtacgccctgggcgagccaggccagggtcgattcatcctccgacaaggcgtccagccgctcgtccagcaataa

SEQ ID NO: 354588 - DNA, 357 bp, Pseudomonas aeruginosa
atgagccaggaacagagtcccttccacaccggcgaactggcgatccaggaacgcgccggcgttcgcgaacaggtcgccggcttcggcagccgcgcgatccgcaccttcatgccggaccagcaccgggagttcttctccctgctatcgctgttgctggtgggcagcctcgacgccgacggctaccccagcgcctcggtgctctgggcccccccggcttcgcccgttcgccggaaccgacccgcctgcgcatcgacaacctgccgcaagcggacgatccgctggcggccaatctcgaggctggcacccgcctcggcatcctcggcctggaatggccgacccgccgccgcaaccgcatga

SEQ ID NO: 354589 - DNA, 150 bp, Pseudomonas aeruginosa
atgaccatcctcgaccgccttgtcgctcggctgtttcccgaccgccgccctgaatgggaaaaacagcgtgagcgtgagttcatcgaggcagtcaacggcctcaagacgcttagggttgcgccgggggggcaccatgtctatcgaccctga

SEQ ID NO: 354590 - DNA, 363 bp, Pseudomonas aeruginosa
atggcccagcaggccaagggtgccgagcacgttctggtgtccgacccacagccccagtccccgctccggcagggcctggagggcacgctggatcatgctcacggcctggcggtaggagatgcgctgggtagggtcctgcaggtcttcgacggtgaagcccaggccccggcacagccgcgcgggatcgacgccatggccttcgaccacctcggccagcgtctgcagcaggaaggtggatacctgggcgagttcgtagcgcgcatcggcggcattgttgtgcatgggcgaaatcctgagccggtctcggcttcgttcttgttctggcggtggatcgcgacatggggtgagcgtcccatcatatag

SEQ ID NO: 354591 - DNA, 156 bp, Pseudomonas aeruginosa
atggccgtggacaagcatgacattggcaggaacgacctgggccaccagttgcgaatgctcggcctagtgctagatagccccgatgccgaaagtggcatgctgctactccccccgttccccataaaccaagccagccagggcccggaacatgaatag

SEQ ID NO: 354592 - DNA, 1092 bp, Pseudomonas aeruginosa
gtggatggtttcgagcctcgatcactatccctgaacatatccgacacccggctcaaccagttgaacattggtgtcgttggcgacctcgggacaggcaagacccagttcctcaaatcgttaatcctgcagatatccagggcccgcgaggccaaccgcggaatcacgccaaggttcctgatcttcgactacaagcgcgactacagcagccaggactttgtcgaggccacgggcgccaaggtggtgaaaccctatcgcctgcccctgaatctcttcgacaccacggggatgggggagtcctccgcaccatggctggacaggtttcgcttcttcgccgacgtactcgacaaggtgtattccggcatcggccccgtgcagcgggacaaacttaagggtgcagtccgcagcgcctacgaggtggctggtgggcaaggccgccagccaacgatctacgatatccatgccgagtaccgagagctgctcgcagggaagtcggactcgccgatggctatcatcgacgacctagtggacatggaggtcttcgcgcgctcaggggaaacgaagccgttcgacgagttcctggatggagtcgtggtgatatccctcgattccatggggcaggacgacaggagcaagaacctgctcgtcgccatcatgctgaatatgttctacgagaacatgctacgcacgccgaagcgccccttccttggcacgtccccacagctccgggccatcgactcgtacctattggtggacgaagcggacaacatcatgcgctatgagttcgacgtgctccgcaagttgctactgcagggccgcgagttcgggacgggcgtcatccttgcctcgcagtacctgcggcatttcaaggcaggggcaaccgactaccgggaaccattgctgacctggttcatccacaaggtacccaacgcaacacccgcggagcttggagtgctcggcctcacctcggacctggcagagctatcagagcgagtgaagacccttcccaaccaccactgtctctacaagtcattcgacgtggctggagaggtcatacggggactgcctttcttcgaactcaccaaccaagcctga

SEQ ID NO: 354593 - DNA, 324 bp, Pseudomonas aeruginosa
atgactcccatcaacaaagccaaggcctggggcgtccacgccgtcaccgccagtggcgtgatcctggccttgctggccctgctcgcgctggtcgacaacaaaccccaggcctgcctgctctggctcggcctggccctgctggtggacggcctcgacggcaccctggcgcgcaagtacgaagtcaaggaaatgctgccgcatttcgacggctcggtgctcgacctggtgatcgactacctgacctacgtgttcatcccggccatcttcatctaccgctacatccccccctgccggagcatttcgagctgctggcggtgggcgtga

SEQ ID NO: 354594 - DNA, 387 bp, Pseudomonas aeruginosa
gtgggcgtgatcctggtttcatcgctgttctgcttctgcaacgtcaacatgaagagcaccgataactacttcgtcggcttcccggccgcctggaacgtggtggcggtgtacttctacgtgctcgacctgcacccctgggtcaacctcgccacggtgctggtgctggctgccctgaccctgacccggatgaagttcctccacccgttccgcgtgcgccagttcatgccgctgaacatcgccgtgactttcgtctggctgatcagcagcggtctgctgatcgtccagcagccggccgacctgccgatcctgctcggcctgtggttcgccgcctcggcctatttcgtcggtatctgcctctggcgcagcgcccgcgagtggttcggctga

SEQ ID NO: 354595 - DNA, 690 bp, Pseudomonas aeruginosa
gtgggttatctgaagaatcattggtggaaacgctggatccgccgccgcggctgcaagctggccggcggcccggccagtgtcggcaagcgcaccacgctggtgctcgaggagcaggtcgaactcggccacctgcgcatcgtcccgccgaggctggagatcggcgcctacagctatgtgcgcagcggcaccgacctgtccctggtggcgtccatcgggcgtttctgctcgatcggctcggactgcttcatcggccaggaaaaacacacccatcccagcgactgggtgagcagccaccccttccagcacaccggcaccgcgctgcgctacgagccggcgctgagctacgcggaaatcggccacgacgtctggatcgggcacagcgcgatggtgatggaaggggtcaaggtcgggactggggcgatcatcgccacgcgcgccgtggtcactcgcgacgtgccgccctatgccatcgtcgccgggactccggcgcaggtgatccgctaccggcatccgccggagatcatcgagggcctgctcgcctcacgctggtgggagctggatagcgccttcctcaccggcctgccgctggaccgaccccgggagttcctcgccgccctggaggcgcgcgaggcgccgcgtgcggcgtaccggcggatgaccatcacccgccaggggtgccggctggattga

SEQ ID NO: 354596 - DNA, 1062 bp, Pseudomonas aeruginosa; identical to SEQ ID NO: 335930

SEQ ID NO: 354597 - DNA, 480 bp, Pseudomonas aeruginosa; identical to SEQ ID NO: 323849

SEQ ID NO: 354598 - DNA, 732 bp, Pseudomonas aeruginosa
atgatgaccgagcacgatgacccgaccctggaccgcctgaagcaccacttcgcccagcgagtgatcaaccaggcgcgccaggttctggaggtctggcaacgcctgacccgcgcggagtggaacagcgacggcatggaagaactggccgacgccaccctgcgcctgcagcgctacgccgaacgcttcgagcaagccgagcatgcccagttggccggtgccatcgaccgtaccctggacgtcgtcgaggccaaccgcggccggctttccagcgagtcgatcagcgaactcaaccagttgatgcagcgcctgtcgcgcaccggcctgcggcatggcgaccagctcgagcacaccgtcctgccgccgttgcgcaaaccggtctacctggcactgaaggaccgcgaacgcgccgagcgcctggcccagcaactggaattcttcggtctgcaggcgctgagctgcgagaccgccgacgccttccgcgccagcatgcgcgaacgctacccggcggcgatcgtcatggaagtcgatttcgccggccccgacatgggcctgcgactggccagcgaggcccaggccggcctcgaacacaagctgccggtgctgttcttcagcgacagcgagaccgacacaccgacccgcctggccgcggcccgtgccggcggccaggaattcttcaccggcaccctggacgcctccagcgtgctggaaaagatcgagacctcagccgcctga

SEQ ID NO: 354599 - DNA, 1452 bp, Pseudomonas aeruginosa
atgaacaacctgttgttgaactgcgatatcggcgagagcttcggtgcctggcgcatgggcctggacgccgaggtgatgccgctgatcgattgcgccaacatcgcctgcggcttccacgccggcgatcccggcaccatgcgccgcaccgtggccctggcggtggagcatggcgtgcgcatcggcgcgcaccccggctaccccgacctggtcggcttcggccggcgctcgctggcctgctcggcgcaggaagtggaagacctgctgctctaccagatcggcgccctcgacggactctgccgcgcccagggcacgcgggtacgctacgtcaagccgcatggcgcgctgtaccaggacatgatgcgcgacccggcgatcctcgccgccgtgctgcgcgcactggcggcctacgaccgcaccctgccgctgatgctgatgagcacccgcgacaacaccgcggcgcgcgctgggcgaggcccacggcatcgagctgtggttcgaggcgttcgccgaccgcgcctacgacggcgccggctacctggtctcgcgcagccagcccggcgcggtacaccacgacgccgagacggtgctcgcccaggccctcctgctggcccgtggcggggcgctgcgagccagcgacggcagcgccctggcgctggaggcgcagaccctctgcgtacacggcgacaatcccgcctcgctggctgcggtgcggcgcatccgcgacgccctggaggcggcatgagccaaccgcaaccgcgcatcgaggtggccgccatcgacagcttcgtcctgcgcctgttcgagcgcatcgacgaagccaacatgccctggctgctggcggcggaggaaaacctgcgggcggcgttcggcgccgccctgctcgacctggtgccgtcctacaccaccctgctcctgcaatacgacctgctccagctcgaccctggcgaggcccgcgcgcggatcgccgcggcgctgtccgacttgcgcccgaaacgccaggacggcggccgtctgcacatcctgccgacctggtacgacccgcgggtcggccccgacctggaacccctggcgcggcgcaagcagctcggcgtcgccgagctgatccgccgccacagccagcgcgagtatcgggtcttcgccctcggtttcagccccggcttcgccttcatggggctggtcgaggaagccctggcggcaccccgcctggcgactccccggcaacgcctcgccgccggcagcgtcggcatcgccgagcgccagacggcggtctatccgcaggcctcgccaggcggctggaacctgctcgggcgttgcccggtgcgcctgttcgacctcaccctggacggctacagcctgctgcgcgccggcgaccgggtgcgtttcgaacccatcggacacgccgaattcgtccgtctcggcggcgacgacacgcccctggaggtccaggcatga

SEQ ID NO: 354600 - DNA, 663 bp, Pseudomonas aeruginosa
atggacttcttcgaaaccatgagcttcgccaacatcgactggtacgaaatctggctggccagcgtcgacaccttctggatgctcggcggttcgctgctgttcacggtggtcctcggcctgcccctcggcgtcctgctgttccttaccgggccacggcagatgttcgagcagaaggcggtctacaccctgctctcgctagtggtgaacatcctccgttcgttgccgttcatcatcctgctgatcgtgatgatcccgctgaccgtactgatcaccggtacctcgctgggcgtcgccggggccatcccgccgctggtggtgggcgccacgccgttcttcgcgcgcctggtggaaaccgcgctgcgcgaggtcgacaagggcatcatcgaggcaacccaggcgatgggcgccagcacccggcagatcatctggaacgccctgctgccggaagcccggccgggcatcatcgccgccatcaccctggtctcgtacaccgcgatggccggagtggtcggcgccggcgggctgggcgacctggcgatccgcttcggctatcagcgcttccagaccgacgtgatggtggtcacggtggtgatgctgctgatcctcgtccagattctgcaaaccgtgggcgacaagctggtggtgcacttctcgcgcaagtaa

SEQ ID NO: 354601 - DNA, 249 bp, Pseudomonas aeruginosa
atgcgggtcgatctggaaatcgacgatggcgttgtgcagttcgcgggtcagcttgcccacttcctggtagaggccacggtccctggcctggctgagctcctggatcaattgcaccgcctgctggaagtgcccccgttcgagacagtccaccagttcgcgcgcatgttttttcagggtcgattcgaattcgtcgcccgtggaatcgttaccaagcaccatgacaccctcttggccggcttcagccgttga

SEQ ID NO: 354602 - DNA, 513 bp, Pseudomonas aeruginosa
atgccggtttcgttacccttcgagcaagtcgatgtcttctccgaacagcccttcaaaggcaacgccgttgccgtggtgattggcgccgaccgcctgagcagccagcagatgctcgagttcgccgcctggacccagttgagcgagacgaccttcctgctgcggccgaccgttgccgaagccgactatcgcgtgaggatcttcaccccgctgcgggagttgccctttgccgggcatccgacgctggggagctgccaggtctggctgaaccaggggggcggcaatgctgctgacgagatcgtccaggagtgcctggcgggcctgatccgtatccgccgcaagggcgccttgctgtcgttcgcggcgcctcccccccctgcttcgtggcggagcggtcgaagacgaggtgttgcgacggatcgagagcgggcttggcctgtccccggggcaggtactcggcagccaatgggtggacaacggacccggctgggtcgccgttcggctggccacgcgtga

SEQ ID NO: 354603 - DNA, 978 bp, Pseudomonas aeruginosa
atggacctgctgcaaggtatccggaccttcgtccgcgtggtggagcacggcagcttcacccaggccgcccaggcgctggggacctctccggcgaccgtttcgcgccaggtcgccgggctcgaacaggcgctctcggcgcgcctgctgcaacgcaatacgcgcagcgtcgtggtgacggaaagcggtctgcgctactacgagcattgcaagcagatcctgcgcacggtcgccgccgccgcggcggacgtcgaagacagccagtcccacgccagcggtcgcctgcgcctccacgcggtgaccgaactgggcctcgagcacctgatgccgctactggtggactacctggacggccatccggacgtctccgtcgacctcacgctggcccagggcaccccggccctgctcgaggaaggcctggacgtgctgatcaccctcggccgaaccttgccggactcgaccctggtcgcccgcgatctcggccaggtgttcagcgtggtctgtgccgcgccggaatacctggcacggcatggcgtgccacgcacgccggaggacctgctgcggcatcgctgcctgaacgtggccgcgccgtcctgcccgcagggctgggccttcgtcggcgaacgcggcgaaacgctgctcgatctcgacgaggcgctcaaggtcaaccttcccgaggccgcctgcgccgccgccgccgccgcggccgggctcggcgtctgcctgctgcccggcttagtcgccgcccgcgcgctgcaggaaggcagcctgttgcggctactgccgggccatcgactgcatgtccgcgaggtgttcgtgctgtactcctcgaggcgctacctggacgccaagatccgcacctgggtggacttcctcagggaacgcctgcccctggcgttcgagcgtgaccgggcgatcctcgacgatcggcgctactgggcggaaagcccaaccggcgtagcgcgcgagaccgcgacctaa

SEQ ID NO: 354604 - DNA, 222 bp, Pseudomonas aeruginosa
gtgcagcagttgcgacggcaacagcacatcgcggccttcgtcgccttccggcggcagcgacagtgccgcgtcgggcgcgccgagggtcgcctccaggtccaggcagacgtgcccgtggcccagttggtggctggtcagcgccgccgccagcagcacccggggatcggcctgcggctgcaactcgacgaggaaggcgacgaacgcccggtccagcgcccgtag

SEQ ID NO: 354605 - DNA, 270 bp, Pseudomonas aeruginosa
atgcgatgcgtccttgccctgtcgatttcggtgcttgccgcgctgctggccgcttgcagcgagcagccggccgacaacctcgccgatgccctggccgccgatccggtgcggctcaaggcattgcgtgcgcaatgcgcggccgaccggcagaccgtgggcgaggaccagacgctggccgagttgccgccgatcccaccgagcttcgatgaacccgacgacgacgacgacagcgcggcggcggccgtgcccgattcagaggacgcgccatga

SEQ ID NO: 354606 - DNA, 591 bp, Pseudomonas aeruginosa
gtggcgcccctggagggggtggaagtccaggccctggcgggcaatccgcacgtctggctgagcgagcagccgctgggcaccgacctggcccaggccgagttcgccgcgcgccagcagagcagccagtggcgccgctggcggccgctgctggggttggtcgggctgtggctggtattgcaatggggcttcaccctggtccaggcctggcagttgcagcgcgaaggcgaccgctacgcggcgcagagcgcagaactctaccgccagttgtttcccgaggaccgcaagctgatcaacctgcgcgcgcagttcgaccagcacctggccgacagcgccagcagcggcggcgagggccagttgctcggcctgcttggccaggccgccacggtgatcggcggcgagccgacggtgagcgtcgagcaactggacttcagcgccgctcgcggcgacgtcgccctccaggtgcgggcccccggtttcgacgtgctggaacggctgcgttcgcgtctcagcgagtccgggctggcggtgcagctgggttcggccagccgcgatggctcgacggtcagcgcgcgcctggtgataggaggttga

SEQ ID NO: 354607 - DNA, 2049 bp, Pseudomonas aeruginosa
gtgggtctcgccgagcaccacggtggccgccaggttgacctgcggatgggcgcacagcgcggcgtccagctcggccagttcgatgcggtggccgcgaatcttcacctggtcgtcctcgcggccgaggaactcgatgctgccgtcggccagatagcggccgaggtcgccggtgcgatacaggcgacggccatcggggtgacggacgaagcgttcggcggtgcgctgcggatcgccggcgtagccgagcgccaggcccaccccgccgatatggatctcgccgcgcacgcccggcgggcagcgccgcccgcgggcatccaggacttccacgctctgcccgcgcagggcacggccataagggatgctggccagctcggtgtgctgcgggcggatcggctgctcgatcgaccagatcgccgcctcggtggcgccgcccaggctgaacagcgcgctgtccggccagcgccgccaccagcgggtcggcaggctgaccggaatccagtcaccggaccagagcacgcagcgcggtcccggcaggtgacgttgcggctcgctctccaggtaatcgatgagcatctggccttgggccggcaccgagttccacagggtgatggcgtggcgttccagcagttccgcccagtgcgatggatcgctgccgcgcgccgggtccgggaggaccacctgggcccccgccgcggtggcgccgaagaagtcgtagaccgagaggtcgaagctcagctcggcgaggccgaggacgcggtcgttggcgtcgacgccgtagcgctggttgatgtcgagcagcgtgttgctcaccgccgcatggctgagcatcacgccctttggcgtgccggtggagccggaggtgtagatcacgtaggcgaggtcgtccgccgccacctccgccgcgggcggtggcggccaggcgctgtcggcggccagccggtcgatggccacgcaggcgcagccgacgtccgggacatcgctttccaggcaaaccagcgcgaccacttcggcgctggcgaggatcgcctggcgccgcagcggaggctggcggatgtctaccggcacataggcggcgccggcctggaggatgccgatcaccgcgaccaattgcgcggcgcttttcggcagcatcaccgcgacccgccggccacggcccgcgccgtgcgcttccaggacgcggcgcagggcgctggcgtgctgggcgacttggcggtagctgtagctgccggcggcatcgtggatcaccgtggcgtcgggggtcagcagggcacgctcggcgaaaccggcggcgatgctccgggcactaccgggcaacgcctgcggcggcgcctcgacgggttccgtggcatcgccgtcggtccaggcgcgcgggctctgcgccaggcgccggagcagcccgacgaagtcgtcgaacatggcttccgcctggccctcggggaacaacccgaggcgtacgtcccagccgatctccaggccgccgaactggtcggtgacctggcagtccagccagacctgcggggtctggctgatcatgtagcgtggcgcgcgcggcgcctcgccatcgccgagcaggcgctgcacactgccgatgccactggtgaacaccaccggcatcagatcggcgccgcgaccacgccggcgcgccagttcgcgcagcaggtcggcgccgctgaaggtcgggtggtcgaggtcgtcgaacatctgctcgccgatgcgtcgggcacgctcgacgaaactgtcgccgtggcggctgtccactgccagcaggctgagcgcggtgaagtcaccgagcacctgcgccagctgcggatgcagcggcggccggttgagtaccgtcaggttgagacagaacgccggtgcctggctccagcgaccgatggtctcggcgaaggccgccaaggccacgccggcagcgctcaggccgtgttcgccggcgcgcgcgccgagcgcctgccaggcggcctcgtcgaggcgcgcgtggaagtgccggaagcgcgtggaccgggtgtccggctgcacccgcagcggcaggtcgggacgccccggtag

SEQ ID NO: 354608 - DNA, 363 bp, Pseudomonas aeruginosa
atgaaccaggccgtgatcgagcaggatggcatgagccggaacaccccagccaacccgaccccggacagcctcaccgggctgctcctgccgctgagcgaccgcaccctgctgttgcccaacgtcgccgtggccgaactgatcgcctatcgcaacccgcaggtcgccgccggcctgccgcagtggtacctgggccaggtggcctggcgcattccgcgctcggtgcggctggacgccaatctcgcgagcaccgccgcgccgctggcggcgctggaactggcggcggtggacatcggcggcgaaaccgcacggattccggacctggccgggctcgaagagaagctcgccgacgccggcctgatctga

SEQ ID NO: 354609 - DNA, 951 bp, Pseudomonas aeruginosa
atggcgcgggtagccccagaacagttcgtcggcgccttcgccgagaagcacgcagtgatagccctgctcgccgataccgtcggccaggcgctggtacatcagcaggctggacatccgtgtcgccccgccgaagttgccgaccgcgcgacgcagcagcggcatgaaggcttcctggcgcagctcgaagcgttgcagccgagggtgtggcagcaggctttcctcgtcgccttccaggcacaggtgaaagcgttgcaactgcgggtccaggtagctgccgagcaggttggaatcgaccccgccgctgaccagcagggcgcaggggcggaaggtctggcggcagcgttcgagggtttcgccgagctgctcgtcgaggctgtccacctcgctggccggggcggtggccagccgctggcgctggcagaggcgcggacgctcctgggagagatcgaagcgcaacacctcgccgggcagcagcagacggacctgctggaacagggtctggccttccagcggcacgccggcggcgaccacctgggcgatcgcctcggcgtcggcgcgggcgccgccgagcaggtgcagcagcgcccgcggctcggaggcgaaggccagcaggccgcgctcgggctggtagctgtagtacagcggcttgatgccgaactcgtcgcgcagcagggtcaattgccgggtctgcgggtcccagctggcgagggcgtacatgccgtccggcagtaccccgcgctgcaagccgtcgagcagcaggcggatctcgccatggatttcgcagccggcctggtagacctcgccgttgtaggcgacccgccgctggccctcctgcggcggcagcggtaccgccgcggcgccggacatcggcaggcgggtcatgccgatggcgccgttcggcagggccgcgatgccctcgccgaacgggccgcgatgggccagcaggcgtag

SEQ ID NO: 354610 - DNA, 2781 bp, Pseudomonas aeruginosa
atgattgagccccgcgctaccctgcgcctgcaattccacgccggcttcaccctcgacgatgccctgccctggctggactatttcgccgacctgggcatcagccatctctacgcctcgccgctgttccgcgcacggcccggctccagccacggctacgacgtggtcgacccgacccggatcaatccggaactgggcggcgagccggcgctgctgcgcctgatccaggggctgcggcaacgcggcatgggcctgctcatggacatagtgccgaaccacatgggcatcggcggcggcgccaatccctggtggcaggacgtgctcgaatgggggcgcgagagtccctacgcgagtttcttcgacattcagtgggaatcccacgacgccgcgttgcgcggccaggtgctgctgccgttcctgcgcagcgactacggcgaggtcctggctgccggggagatcggcctgagcctggaccgcgaggccggccgcctgctggcgagccacggcgagcagcgcttccccctctggccgggcagttacccggagctgctggaagacagcggcgagccgcgcctgtcagccctggccggcggtttccgcgagtgccggcaggaccgcgaggccttgcgcgagatgcagcgtcaactggcggctgcgctcgccgagagcgctccgcgcgcagccctccagcgcacgctgggcgaactccaggaacgccacgaggaggctcgccaacgcctgcaccgcctgctcgaggcgcagcactaccgcctggccagttggcgcaccgcggcggacgacatcaactggcgccgtttcttcgacatcagcgaactggtcggcctgcgggtcgagcgcggcgaggtgttcgaggccgtgcacggcaaggtcttccagttgctcgaggacggtctgctcgatggcctgcgcatcgatcacgtcgacggcctggccgatccgcgcggctattgccgacgcctgcgccgccgcagcgagcggatccgcgcccatcgcggcggcgcgccgatgctgctgtacgttgagaagatcctcggtggcgaggagcgcctgcccgaggattggctgtgcgacggcaccaccggctacgacttcatgaaccaggtcagcctgttgcagcacgatccgcgcggcgaacgaccgttgcgcgaactctggcagcgggtcagcggacgcccggaggcgtttctcgacgaggtctaccaggctcgccaactggtcctggcgggaagcctcgccggtgacctggagaacctcgcccagggtcttttgcgggtggcgcgggccgacctggccagccgcgacctgaccctgggcggtatccgccgcgcgctgttccagttgctcgcgcgctttccggtctaccgtacctacgccggggcctgcggtcgctcggtgcaggatcgcgaggtgttccgctatgccgcagaggcggcccgcgaggatctcgacgaagccgaccgggcggtcctcgaccatctcgaacgctggctcggcgggcagccgctgtgcgagctgccgcccggtccgctgcggcgcctgcgcggcgagttgctggcgcgcttccagcagttgagttcgccgaccgcagccaaggccgtggaggataccgcctgctatcgctcggcggccctgctctcgcgcaacgacgtcggcttcgacccgcagcgcttcgccgcttccgccgaggaattccatgccgcctgcgaagccaggcgcctggccagcccgcgcgccctgctggccaccgccagccatgaccacaagcgcggcgaggacgcccgcgcccgtcttgcggcgctcagtgaactggcgccctggttcgcgcgtaacgtcgagcactggcaaagcctggccacgccgttgcgccgcgacctcgccgaggggccggcgccgagtcccggcgacgagctgatcctgttccaggccctgctcggcagttggccgctcgacgcgccttgcgacggcgccgccctggaccaagcgttcctcgcgcggatgcgcgaatggcaatgcaaggccttgcgcgaagccaagctgcgcacgcgctggaccgcgcccgacgaagactacgagcgcgcctgcgccgactatctggaacagctcctgcgcgcgccgctggcccaggccctgcgccagtcgctgggcaacgcggcggcgcgactgatgccggccggggccctgaatggcctcgcccaatgcctgctgcgcctgacctgcccgggtatccccgatctctaccaggggcgcgaggactgggacttcagcctggtcgacccggacaaccggaggccggtggacttcgcccggcacgccgccgccctggccgcgccgacgcccttcccggaactgctggagcactggcgcgacggtcgcatcaagcagaccctgatcgcccgcgtgctggggctgcggcggatgcagccgggcctgttccgcgacggcgactacctgcccctggaggtcagcggcgagcatgccgagcgggtcctggccttcgcccggcgcagtcgtcacggttgcctgctggtggtggtcccgcgcctggcctgcgccctgctcggccacgccacgcagccgcaggtgccggccgaggcctggggcgacacctgcctgctgctgccgccgagtctctccgaatgcacctacagcggcctgttttccaccatgccgctgcccagcgacgggcacctgagcctgtccgaagtgctcgccgactttcccgtcaacctgctttaccgcctcgcccaggaggacaccccatga

SEQ ID NO: 354611 - DNA, 648 bp, Pseudomonas aeruginosa
gtgaccgcggagcgcacccgcctggtgttcgtggagggccagcgcgaggcctcgttgctgcttgtcaaccagaatccctacccggtgctggtgcaggcgtgggtcgatgacggtgccctcgacggcgaaccggataccgcgctggctccgttcctgccgctgccgcccgtattccgcctggagccgggacgccagcgcagcctgcgcctgctggctaccggccaggcccaggcacgggatcgcgaatcgctgtactggctgaacatctacgagatccccccgcaagccaccgccgaggccgctggccggccccggctcacggtcaccctgcgaacccagatgaaggtgctgtaccgcccgcacggcctgcatccgcacgctgaggacgcggctgccgaactgggcttcgcgctgcgcgacgagaccctgcgggtggacaacccgacgccgtacttcgtgtccctggcggggctggcgctggagataggggagacgcgcctggatctgcccggaacgctgctggctccgcgctcgcaacgacgcctcggcctgccgcggcgggtggatggcgggacgcgcggcgaggtggcgttcgactggatcgacgacaacggcgtcagccgccaggaaaggaaagctctacagtga

SEQ ID NO: 354612 - DNA, 597 bp, Pseudomonas aeruginosa; identical to SEQ ID NO: 341575

SEQ ID NO: 354613 - DNA, 1488 bp, Pseudomonas aeruginosa
atgagtgagcgcacagggctgcgttatggcctgctcggcctgatcgtcatcgcgttgctggccgcgctggcctatttcgtcgcgcgtcccccccagaccccggcagcggcccatgccgcggcggtcgaggaaaaccagttgcagtcgctgaaggacgtcgccaagcaggcgccggtccatcgcaagctggacatccaggaatggaagaccgccgaaggtgccaaggtactgttcgtcgaagcccatgaactgccgatgttcgacctgcgcctgaccttcgccgccggcagcagccaggacgccggcacccccggcctgtcgatgctgaccaacgccatgctcaacgaaggcgtgccgggcaaggacaccactgccatcgccgccggcttcgaggacctcggcgcctcgttcagcaacggctcctaccgcgacatggcggtggccggcctgcgcagcctgtccgatgccgacaagcggacccaggcgctgaagctgttcgaacaggtgatcggccagccgaccttccccgaggacgctctggcacgcatcaagaaccaggtcctggccggtttcgagtaccagaagcagaaccccggcaagctggccggcctggagctgttcaagcgcctctatggcgagcatccctacgcgcactccagcgacggcgacgaaaagtccgttccaacgatcagccgcgaacaattgcaggcgttccacaagaaggcctacgccgccggcaacgtggtcatcgcgctggtcggcgacctctcgcggcaggaggccgaagcgatcgccgcggaagtctccaaggcgctgccccagggcccggcgctggccaagaccgtccagccggaaacgcccaaacccggcctgacgcacatcgacttcccctccgagcagacccacctgatgctcgcccagcttggcatcgaccgccaggatcccgactacgcggcgctctacctgggcaaccagatcctcggcggcggcggcttcggcacccgcctgatggaccaggtgcgagaaaagcgcggcctgacctacggcatctattccggcttcaccgccatgcaggcacgcggtccgttcatgatcaacttccagacccgcgccgaactcagcgagggggcgctgaagctggtccaggacatcgtccgcgactacctggccaacggcccgacccagaaggaactggacgacgccaagcgcgaactggccggcagcttcccgctgtccaccgcgagcaacgccgacatcgtcggccagctcggcgccatcggtttctacggcctgccgctggactacctggaaagcttcctcaagcaggtcgagggactcagcgtcgaacaggtcaggaccgccatggccaagcacctggacgccgacgccttcgtcatcgtcagcgccggcccgagcgtgccgcagaaacccctgccgccacccaccgccaagccggcccagcaacccagcggcgttccggagcattga

SEQ ID NO: 354614 - DNA, 1371 bp, Pseudomonas aeruginosa
atgaaaaccccagctcgccgccgcgtcggcctgctcctagccagcctttgtctcccgcttttcgcccaggcggcggaaacccagcccacccacgagttcagcctcgacaacggcctgaaggtcatagtgcgtgaagaccaccgcgccccggtggtggtttcccagctctggtacaggatcggctccagctacgagacacccgggctcaccggcctgtcccacgccctcgaacacatgatgttcaagggcagccgcaagctcggcccgggcgaagcctcgcgggtgctgcgcgacctgggtgcggaagagaacgccttcaccaccgacgactacaccgcctattaccaggtcctggcccgcgaccgcctgccggtggcgctggagatggaagccgaccgcatggcccacctgagcctgccggccgaccagttcaagagcgagatcgaggtgatcaaggaggagcgccgcctgcgcaccgacgacaatcccaacgccctcgccttcgagcgcttcaaggccgccgcctacccggccagcggctaccacaccccgaccatcggctggatggccgacctgcagcgcatgaccatcgacgacctgcgccactggtacgaatcctggtacgcgccgaacaacgccaccctggtagtggtcggcgacgtcaccgccgacgaggtcaagaccctcgccaagcgctacttcggcgagatcccctggcgccagctgccgccggcgcgcaagccgctggaactggccgagcccggcgagcgccggctcaagctgtacgtacgcacccagctgccgaacctgatcatgggcttcaacgtgcccagcctgggcagcagcgagaaccctcgcgaagtcaacgccctgcgcctgatcggcgcgctgctcgatggcggctacagcgcccgcctggcctcgcgcctggagcgcggcgaggagctggtcgccggcgcctccacctactatgacgcgttcaaccgcggcgacagcctgttcgtcctctcggccacgccgaacgtgcagaagggcaagaccctcgagcaggtcgaggccggtctgtggaagcagctcgatgacctcaagcagaacccgcccagcgccgcggagatcgagcgcgtgcgcgcgcagatgatcgccgggatggtctacgagaaggactccatcgccgcccaggccagcagcatcggccagttggaaagcgtcggcctgtcctggaagctgatcgaccaggacctggaggccctcaaggcagtgactccggacgatatccagaaagccgcccgcacctatttcaccccgtcgcgcctgaccctggcgcaagtgctgcctgtgaaggccgaggaaaaggaggcccgtcatgagtga

SEQ ID NO: 354615 - DNA, 1353 bp, Pseudomonas aeruginosa
atgtttggttccaacgacgacaagaaggccccgcagggcggggaaaagaaaggtctgttcggctggtggcggaaaaagccgcaagccggcgagcagcctgccgatcagcctgtcgagccggtctccgagacagcggccgccgagcagcgcgcgcctgccgatgacgtggcgcaatccctgacagaacagccaggtcggcagcagccctccgctgccgagccggccgagccggcgccggttgccgaagcaccgctcgccagtgacgagccagcgtcggccgaggagcattcgccccggcccgaggcgcccgtcgcgcaacccgagcctatcctggctgccgagcccgagcccgagcccgagcccgagcccgagcccgttgcgccgctggccgccgcgccggcagtcagcgagccggcgaccaggccgggcttcttcgcccgcctccggcagggactgtccaagaccagcgccagcatcggcgaaggcatggccagcctgttcctcggccgcaaggaaatcgacgacgacctgctcgacgacatcgagacgcgcctgctgaccgccgacgtcggcgtcgaggccaccaccctgatcgtgcagaacctgaccaagcgcgtggcgcgcaaggagctggccgacagcggcgcgctgtacaaggcgctgcaggaagagctggccagcctgctgcgcccggtggagcagccgttgcaggtcgacgtcgcgcgcgagccctatgtgatcctggtggttggggtgaacggcgtgggcaagaccaccaccatcggcaagctggcgaagaagctgcaactcgagggcaagaaggtcatgctggccgccggcgacaccttccgcgccgccgccgtggagcagttgcaggtctggggcgagcgcaaccgcatcccggtgatcgcccagcacaccggcgccgactccgcctcggtgatcttcgacgcggtgcaggccgccaaggcccgcggcatcgacgtgctgatcgccgataccgccggacgcctgcataccaaggacaacctgatggaggagctgaagaaggtgcgccgggtgatcggcaagctggacgagacggcgccccatgaggtcctgctggtgctcgacgccggcaccgggcagaacgccatcaatcaggccaagcagttcaacctcgcggtggagctgaccggcctggccctgaccaaactggacggcaccgccaagggcggggtgatcttcgccctggccaagcagttcggcctgccgatccgctatatcggtgtcggcgaggggatcgacgatctccgtaccttcgaggccgacgccttcgtccaggcactcttcgcagagcgggagaacgcatga

SEQ ID NO: 354616 - DNA, 672 bp, Pseudomonas aeruginosa
atgatccgcttcgagcaggtcggcaaacgctatcccaacggccacgtaggcctgcacgaggtgtccttccgcgtgcaccgtggcgagatcctcttcgtcaccggccactccggcgccggcaagagcaccctgctgcgcctcatcctggcgatggagcgaccgaccagcggcaagctgttgctcggcggccaggacctggggcgcatcactaccgcgcagatccctttcctgcgccggcagatcggcgtggtgttccagaaccaccaactgctcaccgatcgtacggtggcggacaacatcgccctgccgctgcagatcctcggcatgcccaagccggagatcgccaagcgcgtggcctcggccctggagcgggtgaacctgaaggaaaagggcgaggcgttgccttccgacctttccaccggccagcagcagcgggtcggcattgcccgcgccatcgtccaccagccggccctgctgctggcggacgaacccaccggcaacctcgacccgcgactcgcctcggaaatcatgggcgtgttcgaggatatcaatcgcctgggcaccaccgtactgatcgccagccacgacctggccctgatcgcccgtatgcgccatcgcatgctgaccctgcagcgtggccggatcatcgctgaccgtgaggatgaggcctga

SEQ ID NO: 354617 - DNA, 1008 bp, Pseudomonas aeruginosa
atgagcgccaacgatcttccccgtggccccgaagagggcgcaccggaacgcaagacccgcgagaaaccgagccaggagcagaccgactggagcggctcgttcagcgcctacctggaaagccatcgcgccagcctggtggacagcctgcgccggttgttcggccacccgttcggcagcttcttcacctgcctggtgatgggtatcaccctgagcctgccgatgggcctctcgctgctgctgaacaatgtcgaacggctcggcggctcctggcagcgggcggcgcagatctccctgttcctcgacctgaagaccagcgaaaaccagggccaggacctgcgcgagcagatcgagcgcctgccggacgtgatcgaggcccaattgatcagccgcgagcaggcgctcagcgaattgcaggaacagtccggcctgggcgaagcgctcaaggagctgccggagaacccactgccgccggtgatctcggtcacgcccaagcagatcgaccgggccggcttggaggcactgcgccagcagctcgcggagctgcctcatgtgcagcaggcgcagctcgacctggtatgggtcgagcgcctgagcgcgatcctcaagctcggcgaacgcttcgtcttcggcctgaccatcctgctggtgctgaccctcttgctggtggtgggcaacaccatccgcctgcacatcgaaaatcgccgtaacgaaatcgaggtgatcaagctggtcggcgggacggacggttacgtgcgccggccattcctgtacatgggcgcgttgtacggcctgggcgcgggcatcctgtcctgggcgctgctggcctattcgctgaactggctgaacggttcggtggtcaacctttcagggctgtacggcagcgacttcggcctgcagggcgtgccgctggacgacggcctgtcgctcaccgtcggcgcggtgctgcttggctgggtcggcgcctggctggccgtggcccgccacctgcgcgagctggcgccgcgctga

SEQ ID NO: 354618 - DNA, 855 bp, Pseudomonas aeruginosa
atgaccacttctttgcaacctgtacatgccttggttccaggcgcaaacctggaagcctacgtgcactcggtgaacagcattccgctgttgtcgccggaacaggagcgtgaactggccgaacgcctcttctatcagcaagacctggaagcggcgcggcagatggtgttggcgcacctgcgcttcgttgttcatatcgccaagagttattcggggtacggcctggcccaggccgacctgatccaggaaggcaacgtcggcctgatgaaggccgtgaagcgtttcaacccggaaatgggcgttcgcctggtgtccttcgccgtgcactggatcaaggcggagatccacgagttcatcctgcgcaactggcggatcgtcaaggtcgccactaccaaggcgcagcgcaagctgttcttcaacctgcgcagccagaagaagcgcctggcctggttgaacaacgaggaagtccatcgcgtcgccgagagcctgggggtcgagccccgcgaagtgcgcgagatggaaagccgcctgaccggccaggacatggcgttcgacccagccgccgacgcggacgacgagagcgcctaccagtcgccggcgcattacctcgaagaccaccgctacgacccggcgcgccagttggaagacgccgactggagcgacagctccagcgccaacctgcacgaggcgctggaaggcctcgacgagcgcagccgcgacattctccagcagcgctggctgtccgaggagaaggccacgctgcacgacctggcggaaaagtacaacgtttccgccgagcgtatccggcagctggaaaagaacgccatgagcaagctgaaagggcggattctcgcctga

SEQ ID NO: 354619 - DNA, 606 bp, Pseudomonas aeruginosa
atgccgcgcaatacccgctggctgttctacctgtcgctggcggtcctgaccttcgtcgtcggcgcctggctggtccgtacgccggaaccggcgcggccgttgccgtggctggccgactggcaggagcaggtgctggcgccgttggcggacaacgccctgaccctgcgccagctgcacgacgcggtggatggcgagttgtgggtggacccgcgcctggatggcgtgcgcctggccttccgtggccgcctgctgggcgacggcggcccctggcaggtggaaggcgagctgggcctgagcgccgaggagcaactgagcctgcagcgggcatctgcgttgcagcctggcagcgcgccgcagccattgagcgccggattggaaggacagttgggcgacaagccgatcgtggcgctgagcatgattcccgaaggcagggtcggtgccgagcggctgctggccagtctcggccagccgcgcctgcgcctgcaactggcccagggcgaggcctgggtctatccgcaactgggcctgaccgcgcacctgccggacgacgacttgcgactgatgctcgcggtgccgcgccaggccctggaaaaaccgccgcgttga

SEQ ID NO: 354620 - DNA, 732 bp, Pseudomonas aeruginosa
atggccgcccccttcttccaagccaagccgcgcatgttgcgatccctgttccgccgcctgttcaagtacctgctctggttcatggccgccagcgtcgtgctggtcgcggtcctgcgctgggtgccgccaccggggaccatggtcatggtcgaacgcaaggtcggctcctgggtcgacggccagcccatcgacctgcagcgcgactggcgctcctgggaacagttgccggacagcctgaaggtcgcggtgatcgccggcgaggaccagcacttcgccgagcaccacggcttcgacctgccggccatccagcaggccctcgcgcacaacgagcgcggcggcagtatccgcggcgccagtacgctcagccagcaggtggcgaagaacgtcttcctctggtccgggcgcagttggctgcgcaagggcctggaggcctggttcaccctgctgatcgagacgctctggaccaagcaacggattctcgaggtctacctgaacagcgccgaatggggcccgggcgtcttcggcgcgcaggctgcggcacgctatcacttcggcctcgacgccgagcgcctgagccgcacccaggccagccagctcgccgcggtgctgcccagcccgctgaaatggagcgcggccaggccgggcccctacgtacgccagcgcgcggcctggattcgccagcagatgtggcagttgggcggcgacgactacctgctgcgcctggagcgctga

SEQ ID NO: 354621 - DNA, 378 bp, Pseudomonas aeruginosa; identical to SEQ ID NO: 320790

SEQ ID NO: 354622 - DNA, 201 bp, Pseudomonas aeruginosa; identical to SEQ ID NO: 320791

SEQ ID NO: 354623 - DNA, 798 bp, Pseudomonas aeruginosa
atgagccaagcatccagtaccgatacccccttcgtcatcgccggccgtacctatggctcgcgcctgctggtggggaccggcaagtacaaggacctcgacgagacccgccgggccatcgaggcctccggagcggagatcgtcacggtggcggtgcggcgcaccaacatcgggcagaatcccggcgagccgaacctgctggatgtgatcccgccggatcgctacaccatcctgccgaacaccgccggctgctatgacgcggtcgaggccgtgcgcacctgccgcctggcccgcgagctgctggacgggcacaacctggtcaagctggaagtcctcgccgaccagaagaccctgttccccaacgtcgtcgagaccctcaaggccgccgagcaactggtgaaggacggcttcgacgtgatggtgtacaccagcgacgacccgatcatcgcccgccagctggccgagatcggctgcatcgcggtgatgccgctggccggcctgatcggctccggcctgggcatctgcaacccctacaacctgcgcatcatccttgaggaagccaaggtcccggtgctggtcgacgccggcgtgggcaccgcttccgatgcagcgatcgccatggagctgggttgcgaggcggtgctgatgaacaccgccatcgcccatgccaaggacccggtgatgatggccgaggccatgaagcacgctatcgtcgccggtcgtctcgcctacctggccggacgcatgccgcgcaagctgtatgccagcgcctcgtcgccgctggacggcctgatcgactga

SEQ ID NO: 354624 - DNA, 735 bp, Pseudomonas aeruginosa
atgagcgataccccgcaatccccggcccaggactccctggcggaacacgacgaagcacggccgatgcgcaccgtgaagagcttcgtgatgcgcgccgggcgtatgaccgaaggccagcagcgtggcctcgacctgggctggccgaagttcggcctggaactgagcgatgaggtccaggacttcgacgcgatcttcggtcgccaggcgccgcggactttcgagatcggtttcggcatgggccattccaccctggaaatggccgccgctgcgcctgacatcgacttcatcggcgtcgaggtgcacaagccgggcgtcggcgcgctgctcaacggcctgctgacccagggcctgggcaacgtgcgggtgtatagctgcgacgcgctggaagtgctgcgccactgcgtggccgacgccagcctcgatcggctgctgctgttcttccccgatccctggcacaagaagcgccaccacaagcggcggatcgtccagccggaattcgccgaactggtgcggcgcaagctgaaggtcggcggcgtgctgcacatggccaccgactgggagccctatgccgagcacatgctggacgtcatgagcgcggcgccgggctaccgcaaccaggccgaagacggccgcttcgtgccgcgcccgcaagagcgtccggtgaccaagttcgagcggcgcggggagcgcctgggacatggcgtctgggacctcaagttcgagcgcgtcgactga

SEQ ID NO: 354625 - DNA, 1347 bp, Pseudomonas aeruginosa
gtgttgaagaaactgggcatcctgttgctcggggccggttgcgcctgggcggcgcaggccaaggtagacgaagtccaggccgcacgcctggaccaggacctgaccccgctgggggcggagcgggccggcaacgccgatggcagcatcccgccctggaccggcggcatcacccaggcgccggccggctaccggcccggcatgcatcacctcgacccgttcgccgccgatcgtccgcgcctggtcctcgacagccgcaacatggccgcctaccaggcgctgctgacgccgggcacccaggccttgctgcaggccaacccggactaccacctgcgggtcttccccacccgccgcagcgcatccctgccgcagcgcctgtacgacgctacccgcgccaacgccagccgcgccgagctgatcgccgacggcaacggcgtgcagggcgctgccgccggcgtgcccttccccctgccgcagagcggccaggaagcgatctggaaccacatcatgcgctaccgcggcgagcaactgcacctgcagaccaaccaggcggcggtgctggccaacggcagctacaacctgctcaagctcgaccgctacctgtacttcgtctatggccgcgaggggatgatcccggagaacctcgacaacacattgttctactacaagtacaaggtggtcgcgccggcgcgcctggccggttcggcgctggtggtgcaggaaaccctcgaccaggtgctgtcgatccgcaaggcctggcgcttcaaccgtggcgagcggcgcgtgcgccgcttgccgaccctggcctacgacagcctgcagccggataccaacggcatggccacggcggacaccgtggatgtctacaacggtgcaccggaccactacgagtgggcgttgctcggcaagcgcgagatgctggtgccttacaacagctacgcggtgcaccagaagggcctcgcctatggcgacatactcaagagccgcttcatcaatcccgacctgctgcgctacgagctgcatcgcgtctgggtggtcgaggcgaccctgcgcaagggcttcagccatccctacgccaagcgccgcttctacctcgacgaagacagctggcagatcctcgccgccgacatctacgacaaggatggcgtgctgacccgggcccaggaagtccatccgatcaactactacgatgtgccgctggtctccagcaccctggaagcgatctacgacttcaagggcggccgctacttcgtcgatgggctggacaacaacgagccgatgtacgacttcggcgtgcaggtcgggccgcgcgacttcaccccgcaggcgctgcgccgggaggggaactga

SEQ ID NO: 354626 - DNA, 258 bp, Pseudomonas aeruginosa; identical to SEQ ID NO: 320795

SEQ ID NO: 354627 - DNA, 324 bp, Pseudomonas aeruginosa
atggattacgcgctggacctgatcgccaccctgtcgcgctggagccgcagccacctgtcggacatttccctggccatcatggccaccctgctggtgctgttcggcccggcgatcaacgcctgggtacagcagcgcatcggcagcctcaacttcgtcttccgcaccctgctgttcgtgttgatctgcgcggtcggctacggcctggcgatggtcttcgtcaccccctggctggccaagggcctcggctacttcaacaactacaccctggcgcccgtgctgctgctagtgttcttcgtgatcggcatgatcgccgatcgcagctga

SEQ ID NO: 354628 - DNA, 1155 bp, Pseudomonas aeruginosa
gtgacccaagccaccccgttccagctcccgcccctggccctgtacgtgcacatcccgtggtgcgtgcgcaagtgcccgtattgcgacttcaactcccacgccgctggcccggagctgcccgaagaggcctatgtcgacgccctgctcgccgacctggagcatgacctgcgccatgtccacggccggcgcctgggttcgatcttcttcggcggcggcacgcccagcctgttctcggccaaggccctgggccggctactggaaggcgtcgagcgcagggtcggcttcgccgacggcatcgagatcaccctggaagccaatcccggcaccttcgaacaggtcaagttcgccgactaccggcgcctcggcatcaatcgcctgtccatcggcgtgcagagcttccaggccgacaagctgcaggccctggggcgcatccacgacggcgccgaggcagtgcgcgccgcctacatggcgcgccaggccggcttcgacaacttcaacctcgacctgatgcacggcctgcccgggcagagcctcgacgacgccctggccgacctgcgccaggccctcgccctggcccccacgcacctctcctggtaccaactgaccatggagccgaacacggtgttctggagccagccgccggagctgcccgaggacgacatcctctgggacatccaggaagccggccaggccctgctcgacgagcacggctaccgccagtacgagacctccgcctacgcccgcgacggcctgtgcgcccggcacaacctgaactactggagcttcggcgacttcctcggcatcggcgccggcgcccacgccaagctgagcgcgccgggcggacgcatcgtgcggacctggaagacccgcctgccgaaggactacctcaacccgcaaaaggccttccaggccggcgagcgcccgctggaagcggccgacctgccattcgagttcatgatgaacgtgctgcgcctggtcgacggcgtccccgccgcgctctacccgcagcgcaccggccagccactggcggcgatcgccgatgcctgcgccgccgcgcgcgacgccgggctgctcgccgacgacccgcagcgcctgcgccccagcgaacgcggccagctgttcctcaacgacctgctgcaacatttcctgccgtga

SEQ ID NO: 354629 - DNA, 993 bp, Pseudomonas aeruginosa; identical to SEQ ID NO: 319412

SEQ ID NO: 354630 - DNA, 1236 bp, Pseudomonas aeruginosa; identical to SEQ ID NO: 322803

SEQ ID NO: 354631 - DNA, 1443 bp, Pseudomonas aeruginosa
atgcccagcaccgtctcgtcgtcgcggctcggcctcgccgggctctgcatcctgctggcggggcaactgttgccgatgatcgatttctccatcgtcaacgtcgccctcgacgccctcgcccattccctcggcgccagcgaaaccgaactggaactgatcgtcgccgtctacggcgtggccttcgccgtgtgcctggcgatgggcggccggcttggcgacaactacggccgtcgccgcctgttcgatctcggcgtcgccctgttcgccgtcgcctcgttgctttgcgggctggccggttcggtctggctgctgctggtggcgcgcgccctgcagggcgtcggcgcggcgctggtcgtgccgcagattctcgccaccctgcatgtcagcctcagcggccacgcgcattcccgcgcgctggccgcctacggcgccatcggcggcctggccttcgtcgtcggccaggtgctcggcggcttcctggtctccgccgacatcggcggcctcggctggcgcagcgtgttcctgatcaacctgccgatctgcctcggcattctcctttgcagccgccgctgggtaccggagacccgcgccgagcatgccgcccgcgtcgacgcgccgggcaccctgctgctcgccgcgctgatcctctgcctgctgctgccgctggctctcggcccatcgctgcactggtcctggccctgcgccctgctgttggcggcggcggtgccgctgctggcctggctgtggcgcaccgagttgcgccaggaacgccgccaggcctggccgttgctgccgccgtcgctgctgcgcctgccgagcatccgcttcggcctgttgctggcgatcctgttcttcgcctgctggagcggcttcatgttcgccctcgccctggccctgcaggccggcgccggtctctcgccggtacaggccggcaatgccttcatcgccctcggcgcctcctacttcgtctcggcgctgctcaccgcccgggtggcggcgcggatcggcccggtacgcctgctgctgctcggctgcgtcatccagatgtgcggcctgctcggcctgatgctgaccctgcaacgggtctggccgcagccgggcatcctcaacctggcgccggcgaccctggtgatcggcttcggccaggcgttcatcgtcagcagcttcttccgcatcggcctctcggaggtgccgaccgcccaggccggcgccggcagcgccatgctcgccaccgtccagcaggcctccctcggcctcggctcggcgctgctcggcgcggtgttcgcgcacaggctggagcgccatggcgactacctggaagcgacgcagacgaccctggccgtcgagttcgtcctgatgacgctgctgctcggcgccacctgcctcttctacctgcgccgcgtgcgcacggtgccattgcgctgcgactcgccgggcaactga

SEQ ID NO: 354632 - DNA, 861 bp, Pseudomonas aeruginosa
gtgctcgacattggcctgccactggccggccagcgcctggtggtggctggctccggcccgctgctgctggccagcgccgccagcgccagccagtgcggggcgcgcctgctgcgcgtcgccgaacaggcgccggcgagaaccctggccgccttcgccgtacgcctcccgcgctggcccggcaagctgtggcaggccgccggcctgttcgcccgtagctaccgcgccgacagctacgtgctcgccgccctcggcgaggagcgcctggaagccgtgcgcctgcgcgaaggcggtcgggtccgcgagatcgcctgcgaacgcctggcctgcggcttcggcctggtgcccaacgtgcaactcggccaggccctcggctatcgcctcgacggcccggcgctcgccgtcgacgaatggcaggccggcagcctgcccgaccactacgccgccggcgaatgcaccggcttcggcggcagcgaactggccctggtggaaggcaccatcgccggccatgccgccgtcgacgagcgcgacgcggctcgccgcctgtggccacgacggcgacgctggcagggcttcgccgacaccctggcgcgacacttcgccctgcgtgccgaactgcgtcaactggcggaggcggataccctggtctgccgttgcgaagacgtccccttggccgcgctggccgggcatgccggctggaccgaggccaagctgcacagccgttgcggcatgggcgcctgccaggggcggatatgcggcagcgccgcgcaattcctgttcggctggacgcctccggcgccgcgtccgccgttcagcccggcgcgcctggagaccctggcctgctggcagggcgacgccggctag

SEQ ID NO: 354633 - DNA, 1506 bp, Pseudomonas aeruginosa
gtgcaggcgcttgcgcgcgccgacggtgtagcgtttcggcggggtctcggcatcgcagccgaggcgacggcacagctcgtcgcgcaccgcgccgcgctgctcgacggcgctgtcgagcaagggcgtcaggctcgcggccaggcgcgccaggcgggcctccagcacggtctcggcatccggcaggcggacttcgccgaccttctgcccggtgacccgctcgatcacctgcagcatgcgccgctcgcgcggagtcaccagcaacagcgcgcgcccttcccggccggcacggccggtacggccgatgcggtgcacgtaggactcggggtcgtagggcatgtcgatgttcagcacgtgggtgatgcgcggtacgtccaggccccgggcggcaacgtcggtggcgatgacgatgtccagcgaaccgtccttcagcgactcgatgacccgctcgcgctgggcctgcggcatgtcgccgttgagcgcggcggcgcggtagccctggcgctcgagcaattcggcgtagtcgagggtggcctgcttggtgcggacgaaggcgatcagcgcgtcgaactgctcgacttccagcagacgctggatcgaaccggccttctggtcggcatggaccatcaggtggacctgctcgatgcgcgccacggtctgggtcttggcggcgatcttgacgtgcttgggctgcttcaggtggcgctcggcgatgccacggatggacgccggcagggtcgccgagaagagcacggtctggcgcgattcgggaagcgcctcgaagatcacttccaggtcgtccatgaagccgagcttgagcatctcgtcggcttcgtcgagcaccaggcgctggacggtggccagcagcttctcgtcgcggcgcaggtggtcgcacaggcggccgggggtagcgacgaggatctgtgcgccctggcgcagggccttcagctgcggccccatgggcgcgccgccgtagacggcgaccacgccgacgcccggcaattgcttggaataggtttcgcaggcggtggcgacctgcagggccagctcgcgggtcggcaccagcaccagcatctgcggctcgcggcggctcgggtcgatgcgcgacagcagcggcagggcgaacgcggcggtcttgccggtaccggtctgcgcctggccgatcatgtcgtggccttcgaggatcagcggaatcgattgagcctggataggcgaaggctcttcgtagcctacggcgacgattgccgcgagcacattggggtgaataccgagcgcggcgaagccgacggtttcctgagtcatgggtttgcctcgtatacatccgcaaagacccatgacccatggctgctcatgccctgtacggccgaaacggccacccaggcagctggggcggggatttgcgagattgcttttgaattagaagattacgtaaaggaaatccgcagagcggatacacagccagagcacagcgctccgaaaaatgcaggtcctgaacggggtcagttttga

SEQ ID NO: 354634 - DNA, 849 bp, Pseudomonas aeruginosa
atgagcgatatgaacgaaacgaaggacagggttgccgacgctcccggcaaacgcgccttgctggaggcggccttgcgcctgggcagcagcagccgcagcctgggggccatcggcttgcgcgagctggcgcgcgaggcgggcctgaatccgaacaccttctatcggcatttccgcgatatcgacgatcttggcctgaccatgatccgcgacatctctacccagctgcgccagccgctgcgccagcttcgccgcgaggccgcgactcgtgcggcgcccagcgcccgagcgcagacgacgccgttcgggctggacctggaaagggggcggcgggtctgccgggagacggtgcggctgttcttcgacttcgtggagagcaatcccgccgcgttcatcgtcggcgtgcgcgaactgcatggggcttcgccggtgctgcgtggtgccctgcgtcagatcatggatgagttcgccgaggacatgtcggaggacatcatcgaattcaggttgttgccggcggtgagcgaggcgaccatccgtcgcctctccagcctgatcggccgccagctgtttcagttgtcgctggactatatcggccagccggagcggcgtcgggaaatctgcgccctgggtgaggaacagatactgctgttgttcaccggcgccgcggtcctgcagatgatgggcgtttcgttggacgccgaggcgtcaggccagcttgagcaggctcatgccggccagcagcagcaacaggccgagccagccgcgccaggccaggcgctggccgaacagcgcccagcccatggcgacggtggcgaggatgccgaagccgccccagatcgcataggcgagtga

SEQ ID NO: 354635 - DNA, 732 bp, Pseudomonas aeruginosa
atggggattccgcagacgatcctgatcgttgccgccatgacctatctcctgtcgtcgtatcgatcggatggtctcaccaccagcgtgaacgtccggcgccgagcatgctgggtcggtgcgctgatgctcctgctgctggccggcggtttcttctcgtcggccaaggccgatgagatcccgcgggccgccgagcagtatcgccgcgtgctggttcgagcggcgcatgctgagtggggactgtcggcgccgatcgctacgttcggtgctcaagtgcatcaggagagccgctggcgtgctgatgcccgctcgcccgtcggcgcacagggcctggcgcagtttatgcccggtaccgctgagtggatcgccggcctgtatccggccgccctcggcaccaaccagccgttcaatccaggctgggcactgcgcgcgctggtcacctacgaccgttggctctacgaccgaaaccaggcctccagcgagtgtgatcgctgggcattcgtactgtccgcttacaacggcggccaagggtgggtaaatcgcgaccgtaagctggcctcggcatccggcgccgaccagctggcctggttcgattccgtcgagcgcttcaacgccgggcgctcggccgccaacttccgcgagaaccgcaactacccgcgcctcatcctgcttcgctatgagcggatctatctgcagtggggcgacggcgtgtgcggagagaggtacaccctgtga

SEQ ID NO: 354636 - DNA, 204 bp, Pseudomonas aeruginosa; identical to SEQ ID NO: 340135

SEQ ID NO: 354637 - DNA, 660 bp, Pseudomonas aeruginosa
atgacggacatgccagccaccgccgacgaaccggttcgcctgctgctggtggacgaccatccgatgatgcgcaagggcgtcgcccagttgctcgaactggaagacgacctcagcgtggtcggcgaggccggcagcggcgaggaagccctgcgcctggccgccgagctggacccggacatgatcctgctggacctgaacatgaagggcatgaacggcctggacaccctgcgcgcgttgcgcgaggccggagtcgacgcgcgcatcgtggtgttcaccgtgtccgacgacaagggcgacgtggtcaacgtcctgcgcgccggcgccgacggctacctgctcaaggacatggagccggagcgcctgctcgagcacatccgccaggccgccaccggacagatgaccctcagcccgcagttgacccagatcctcgcccaggccctgcggggcgacgaccgctcgaagagcctcgacgagctgaccgagcgcgaacggcagatcctccgccagatcgcccacggctacagcaacaagatgatcgcgcgaaagctggacatcaccgaaggcacggtgaaggtccatgtcaagcgggtgctgcacaagctcggcatgcgttcgcgggtcgaggccgcggtgtgggcggtggagaacgacctggtgtga

SEQ ID NO: 354638 - DNA, 858 bp, Pseudomonas aeruginosa
atgcagcggcgacaaggcggccgagcctggctccgcgtcggccggcagcagcaggcgcaccgcgctttccagccaggcccgcgacagcagcgggtcgccggccgccggcgtgtgcaggcgctggcagccgaggtcggtccagggcgagaacagcagcaacccggccggcaacggcaagccgcgcgccttcagctccagggccagggacagcgccaggtggccgcccgcggagtcgccggcgagcagcagccggcgcggcgaatggccggcctccagcaatgccaggtagaccgccagggcgtcgtcgcgggcggcggggaacggatgttccggggcgcgccggtagtccaccgcgcagacctcggcggcgcaacgccgggccaggtgcgtggtgatcgcccggtgggtcgccggcgagccgatcaggtaggcgccgccgtgcaggtagagcacccggcgccgcgcctccaccccgcgctgccgcaaccactcgcagggcacgccggcgaggctgcggcgctcgcggacgacgccgccggcgcccagcgtcgccaggctcagcccgcgcaacacgccgcgttgcagcgccactggcatgggcggacggaccagcccgcggaacaacaggcgcaggcagccgcgcaggagaccggcgcgcaggcgttgcggcggcgacatcaggggcgcttcagcgggccaggtcatagtcggcaagctccggccggcgcgtacgccagcgatagacgaaggtgtagcccggccagttgttggtgttcttgccggcggcagtcttgtaccagctgtcgcagccacgctcccagacggtatggcgcaacccctgttgcacctccaggttga

SEQ ID NO: 354639 - DNA, 1410 bp, Pseudomonas aeruginosa
atggtggcggccaatccgcaagcggagacgagcatgtccctgtgtgtcttcgatctgttcaagatcggcatcgggccgtccagctcccacaccgtggggccgatgcgtgccgccgcgcgcttcgccgaggggctgaggcgcgaggggttgctggaggccactgccagcgtcaaggtcgagctgtacggctcgctcggcgccaccggcaagggccacggcagcgacaaggcggtactgctcggcctggagggcgagcagccggacacggtggataccgccgcgattcccgctcggctcgatgccatccgttccagcggcgagctgcgcctgctcggcgagcggccgatccgcttcgtcgagaaggaacaccttgcgctgatccgcaagccgctggcctaccattccaacggcatgatcttccgtgccttcgacgctgccggcctgcaggtccgcagccgcgagtactactcggtgggcggcggtttcgtggtcgacgacgaggccgccggcctcgaccgtatcgtcgaggaccgcacgccgctggcgttccccttcaagaccgcgcggcaactgctcgaccattgcgcccacgaaggcctgtcgatcagccagttgatggccgagaacgagaaggcctggcgccccgccgaggaaacccgcaccggcctgctgcgtatctggcaggtgatgcaggactgcgtcgaggccggctgccgcaacgagggcatcatgcccggcggactgaaggtcaggcgccgtgcggcggcgctccaccgccagttgtgccagcggccggaggccggtctgcgcgacgccctcagcgtgctcgactgggtcaacctctacgccctggcggtgaacgaggagaacgccagcggcggccgcgtggtgaccgcgccgaccaacggcgcggcggggatcattccggcggttctgcattactacgcgcgcttcatccccggggccgacgacgacggcgtggtgcgcttcctgctcaccgccgcggcgatcggcatcctctacaaggaaaacgcctcgatctccggcgccgaggtcggttgccagggcgaggtcggcgtggcctgctcgatggctgccggggcgctctgcgaagtgctcggcggtagcgtgcagcaggtcgagaacgccgccgaaatcggcatggagcacaacctcgggctgacctgcgacccggtcggcgggctggtccaggtgccctgcatcgaacgcaacgcgatggcttcggtgaaggcgatcaatgcggcgcgcatggctctgcgcggcgacggccagcatttcatctctctcgacaaggtcatccgtaccatgcgccagaccggcgccgacatgaaaagcaaatacaaggaaaccgcgcgcggcggcctcgccgtgaacatcatcgaatgctga

SEQ ID NO: 354640 - DNA, 465 bp, Pseudomonas aeruginosa
gtgcagttctggtggggtttcagtccgagcctggtggggcgctggcgccgcgccctcggcgtgacccgccgcaacaatcccggcgaccaggcggtggcgcgcgcccgcgccgccctcgcccgctcgctggaccgcaaggcgccgccgaaggcaccggccgcctggtccagcgaagaagtcgagttcatccgccgccacggcaccaagcgcagcctggcctggtgcgcctacatgctcggccgcagctaccagagtgtcgccagcaaggccgaggagctttccccgcacagcgggcgcgaccgcaacaatgcgatctggagcaagtccgaggaagatctgttgcgccagcactaccagcagcgcggctcgctatggtgcgcgcagcagaccggcaagacccgcgcagcggtattccaccgggccaagaagctgggcctgcaacggcagcggccgaaacacccgtga

SEQ ID NO: 354641 - DNA, 951 bp, Pseudomonas aeruginosa
atgtccgtgaccgatgccagtttcccaatcatcaactggtcgaaggcgatgccttcgttgcgccagctgatgtatttcgcctgtgtcgccgagtacggcagcatcggccaggccgccgaggtgctgcacgtttcgcagccgtcgctgtcgcggcagatccaggcgctcgaagtgcacatcggcgaggcgctgttcgtccgcggtccggccggggtgagcctgaccgaggtgggcagggtggtgcattgccgcgcagtgaagatcatcgccgaggccaaggcgctgacccgcgacatcggcgacggcgacgaccgccagttgcacatcggtttcagccgctacctcgatcccggctggtccggcgagctggcccggcaactgaaggaagcgcgggtgtgcagcgccgtttcgccatcctgggcgccatcgctggacctgctcagcctggtccgcgagtcgtccctggacgcggcgatcatcggcgcgccgccgaaggtggtgcgcgaatacgagctgatggagatcggcagctacgagcacgtcatcgccctgtcggaaaccctgcaccggcgactggcgcccgactggtcgctgaacgacctgattggcgagccgctgctggtaccgaaggactcgctgtttcccgcctacagccagttcatgaacgatgcgatggatgccgccgccttcgcgccccggcgcagcgtgcggccgaacgacctgagcattctcctggcccaggtcgccagcggcgacggcttcgccttcctgccgttgtcgctgaccaagttcgcctatccgggggtggccttcaccgctctgccggcggcggtcaacgaaggcttccgcctgccggtggggctggcggtgtcgccgacttcgcggcttcgtgccagcgacacccagttcgaatgcttcgtcgagaccgcgcggcgggtcgccgccggttga

SEQ ID NO: 354642 - DNA, 1128 bp, Pseudomonas aeruginosa
atgggcgcgcaacagcgccgcctgttcgatcagcgtggcagccttgacgaccgactcgcgcagcagcgcctggacctggcgagccagtacggtgacggctcccgaggcatgagcctcgacgagtacaacgacaagctcaaggcgctggaagctaaccatgccgcgatgacccagcagctgcaacgcaactacgccgacctccaggtcgcccagggcaactgggtcaacggggcgacgtcggcgttcgctgattacatcgactccgccagggacggcgcgggtcagacctacgaactgtttagtaacgccttctccggtctggaggatgccgtcgttaatttcgtgatgactggcaaggcgtcgctggatgacttcgtccgcaccatgattggcgacgtggccaggatggcgacccgccagttgggggcgtctctgctttccgggcttggcctgggcggtggcaccgatggcggcgcccaggggctaacggtcggcgcctcggctgtatccgcttcggcgggcgccctggcgactgctggcggcacgctcctgagcggcgccgccgctatccaggccgctgccgcctcgctggccgccgccaatggtgtcagtggggtgagcggcgctgcgggagctgccggggccgctggagtggctggtggcgggagtggctggttatcttcgatcaccagcattttcggcttcgcgggtggcggccaggtccagggaccaggcacacccaccagcgacagcataccggcctggctatccaacaatgaggtcgtaatccggtcggcatccgccatgcagccagggcttactccgctgctgctggacatcaaccaacgcggatgggctgcgctccatgactgggcgggagctgtccgccacgccaccggaggcgtcgccggcattcccgcgccatccctgccacgcccaagcatgggcgccgctcagatacaggagccgtccaagaatttcagcaccgcagtgaacaacgcggtccacctccatgccgttcaagaccccgaccagatggcggccgacatgtgggccggcaagggcggcgaccattacatcgtctggctgaacaagaaccgccagctcgtcaagcagattatcggatag

SEQ ID NO: 354643 - DNA, 789 bp, Pseudomonas aeruginosa
atgagcctgcgcctgcgcctgaccctgatcctcggctcggccttcatcctgctctggtcgctggccgcggcctggatgctctgcgacctgcgcgggcagatgatgcgctccttcgaccaacgcctggcggcctcggcgcggatggttgccggcctgctccagcagttgccacagccgcagccggcggacggccagaccacgcgcctcagcgcggagcaactgggaattcccaacggcatggcctgccaggtcagctcactgcgcggcgaagtcctggcgcagagccatgccaccccggagcgggcgctggacagcaccgccagcggcttccgcgaccaggaaatcaacggcgtgctgtggcgcagcttcaccgtgcaggccggcgatctgcgggtcagcaccgccgaccgcctggaagagcgcgacgtgctgcaacgctcggtggtggtggccgccgcggtgccggtgacggtcgccctgctcggcagcctggccctgctctggctcggcgccggccagggtctggcgccgctcaagcggattcgcgacgccctcacccgacgtggcgccgactcgctggagccactggagctggcggccctgccgagcgaactgaagccgctggtggaaacccagaaccagttgttccagcgcatcgcccaggccatcgaacgcgagcgacgcctgaccggcgatgccgcccacgagctgcgcagcccgctgaccgcgatcaagacccacctgcaggtcgcgcgcatgaccgagggcctgtctcttatacacatctga

SEQ ID NO: 354644 - DNA, 933 bp, Pseudomonas aeruginosa
atgtacctggtgtgtggcgaggcccttttcgatgtcttcagcctggaaagcgctgcgcgcagcaacgagctgggcttcaccgcgatcgccggcggctcgccgttcaacgtcgccgtcggcctgcgccggctgggcgtggaggcggcgctgttcggcgggctgtccagcgactacctgggcacgcggctgcgccgggtgctcgaagaagaaggcgtggactgcggcttcctggtgcccagcgacgccccgaccaccctggcgatggtcggcctcgacgccagcggctcggcgcaataccagttccgcggcgacggctgcgccgaccgccaggtgcgcctggaacacctgccgacgctggatgggcggatacgcgggctgcacgtcggctcctataccctggtggtgacaccggtggccgacaccctgctggcgctggtccggcgcgagagcggccggcgcctggtcagcctggatcccaacgtgcgcctcgacccgcagccggacatcgacctctggcggcgccgggtcgaggccttcgccagtcatgcgcacctgatcaaggccagcgaggaagacctggccctgctctaccccgggcgcgaccccggcgaggtggcccgcggctggctgaacccgcgctgccggctggtcttcgtcacccacggcggggccggcgccagcgtgcactgcacccacggcagctggagtcgcccggcggataccgccctgccactgcgcgatacggtcggcgccggcgataccttccaggcggcgaccctcgcctacctccgccgcctcgacgccgacagcccggccgggctagccgcgctgtcgcgggaagcgatcgacgcgatgctcgccttcgccatccgcgcggcggcggtcacctgctcgcgggtggggccggacctgccgttcgcccacgagctttga

SEQ ID NO: 354645 - DNA, 474 bp, Pseudomonas aeruginosa
atgctgccgttcttcgacggcgagcgggttccggcgctaccgcatgccagcgccagcctgcatggcatgaccgcggccaacctgagccgcgccaatctttgccgggcggtgctcgaaggcaccgccttcggcctgcgctacggcctcgacctgctgcgcgccagcggcctgccgggcgaggaaatccgcctggtcggcggcgcggcgaagaacccgctgtggcggcggacgctcgccgacctgctcggcctgccgctggtctgtccgcggcagaccgaggccgccgcccttggcgcggcgctccaggcggcctggagcctgggccgcgaaagcggcgccggtgaaagcctggaagccctgtgccgtcgctgcgtggcgctcgacgagtcgacccgcacccagccccaggcgcgacaacaggcggcctacgaacaggcctaccggcgttacctggagcacctgcctccgcgataa

SEQ ID NO: 354646 - DNA, 531 bp, Pseudomonas aeruginosa
atgactgatggcgtgcagagcggtattgaactgcacggtctcgttgaaacccttgacgatctgcgccagcttctcgcgggcgctttccagcttcttgaagcgctcgccgagttccaggctgcgctgctggacgctggcttcgcgcttttccagttcggcctggcgcaggttctgctggctgcgcaactcttcgaggcgttcctgctcgatctgcagtacttcggctcgccgcgcgctgctgcgctcgcgggcttcgacgctttccgcgagttgttgcagggccgcgctgcgctcggcgaggagacggttgctctgctcggtttcccgctccagcgcctggcggtcgtcctgcaggcgcttgtgccactgccggagctgcttttccttttcctgcaattgccgctccttctcgtgcagttgcgtctggagcgactccagcgactcctgctgcttgagcgcttcctgcttctgctggctcagttgctgggccatgccggcgaggtcggccagggtgccctgcacgtcctgtag

SEQ ID NO: 354647 - DNA, 312 bp, Pseudomonas aeruginosa
gtgcgcaatatcggctatgcccgtttcgccaatgggcgaccgggtcgtcgcgatatccgcatcgagctgtacgacggcaccgtctatcaccgccgcattctcaccagcaccgagctggacgccgacaccgagcgcttggccatcgacgccgccctgggccgcctggtcgagccgacagatgtagcgcgcatctgtttcatggcgctctgtagcgccgccagcgacgtgatcgagatcgagcacgtcaccgatagcgagggcgtcgcaaccgccgcgctgactttcaaaggggttcgtgacgatgagttttaa

SEQ ID NO: 354648 - DNA, 153 bp, Pseudomonas aeruginosa; identical to SEQ ID NO: 340999

SEQ ID NO: 354649 - DNA, 153 bp, Pseudomonas aeruginosa; identical to SEQ ID NO: 341000

SEQ ID NO: 354650 - DNA, 249 bp, Pseudomonas aeruginosa
ttgactcaggacgacatcgacctgatgaaccgtgtcaaggccaaggggactgagctgctggagcttcaacgcgaagtctctgcctacctagtgaagtgccagtgcaccttggctgtcgaggggccaacagaggagttcagccgcttcctgaaggcagaaccccgccgctgggctgagatcgccaagactgacatccagacgggtgtcatggccctggtgcgcgccatcgctcagcccgagggctgctga

SEQ ID NO: 354651 - DNA, 813 bp, Pseudomonas aeruginosa
atgcgctcgaccatccacggatcgctggggaagttcaccgtgcccatgccggtgtacaggcgcgtgccgtcgaacagttgcatcaccgacgcatggccgctgaagccgcgcgccgagaggccggtaccgccatctccgggggtgccgatgaagctgatgccgggactgcgggtaacggcggcctggatgctggggttgttgcgtcggcgaacttcctcgccgctgatgctgctggtgctcgccggggtgtccagggcgctgaggcccaggcgcgaaccggcactgaccggagtggcgaggtcgatgtggtcgagttcggcgggatcctggcgaacgctgaccaactggctgggcagggcgagggcggcttcctcggtttcggcgagggcgggcggtaccagcagcaggctggtggagaggccgagggcgaaaggctcggtgcgcaaacggctgaagcggggcatgggcgttccatctcatgaccgggcaggacggaacgcgcaggaaatcgcaggcgcgacagcgcctcgaacaaccggctcgctcccgcccaccgcgggtgtgccaacagggcgttgcaggccggtctccgggcttgcgagggtcgtgaaatcctcgccttcccatgccggagcacagtggcctgaagaggatttcgctcgcttaccgttgcgggggcagcgccggactgatcaccgaagtgacgcaccggcttcccgtttcacctcctgcgcggcggcaggaggcacctggaacgggccggatgggaacatccgcaccgtttccagtcaagccttgaacgatctggattga

SEQ ID NO: 354652 - DNA, 591 bp, Pseudomonas aeruginosa
atgagcgccaactcgctgctcggcagcctgcgcgagttgcaggtgctggtactcaacccgccgggagaggtcagcgacgccctggtcttgcaactgatccgcatcggttgttcggtgcgccagtgctggccgccgccggaagctttcgacgtgccggtggacgtggtcttcaccagcattttccagaatcgccaccacgacgagatcgctgcgctgctcgccgccggaactccgcgcactaccctggtggcgctggtggagtacgaaagccccgcggtgctctcgcagatcatcgagctggagtgccacggcgtgatcacccagccgctcgacgcccaccgggtgctgcctgtgctggtatcggcgcggcgcatcagcgaggaaatggcgaagctgaagcagaagaccgagcagcttcaggaacgcatcgccggccaggcccggatcaaccaggccaaggcgttgctgatgcagctccatggctgggacgagcgcgaggcgcaccagtacctgtcgcgggaagcgatgaagcggcgcgagccgatcctgaagatcgctcaggagttgctgggaaacgagccgtccgcctga

SEQ ID NO: 354653 - DNA, 867 bp, Pseudomonas aeruginosa
  misc_feature (44)..(53): n is a, c, g, or t
atgaatatagaggacataataaagcaaaaaggcgtacatcaatnnnnnnnnnntgtttctcgcgtactacgagaactgggatatatgagagagcttggcgaggggatgcgtcgcatttacgacctaatgcaaaagaatgagctagcatctccgcagctggttagtaataatgatagctttagcataacacttaacaataaggccatgtattcacaagaagaccttctatggctaagtcaatttgaaggatttcagcttagcaggccaatgaaatctgtaattttgctggggaaaaatggtcaaattttctcagcatctaatatatgggatgcagttggcattgttgatacagaagactatagaaaactggttgattctctgctgacctataaaattctaataaatgcaattgaacgcgtgacagctaaaaaatctgcaaaacgtaagaagattccatttagagaatatccaagatacaaaattgtgattccaggaaactccagtcaggtgcccaatttaggtagttcggatagcggctctgaaattgacaagatagagagcaaagtctttcctggtgctacgtatactggaaatatagtggaagcagagacaccaagaatttttatagcaaaacttccagtcgattccgaagagaaagagctatacgagctatttgagaattacggaacaataagatcactaaagttaccgagatacaacaagaccatctgcaagggttatgcttttttagagtttgatgaggacaaatctgcagaaatgatattggacccacgcacgattataaaatataaaaacagagatcttgttatacaaagagctcttccaaagccttctaagaaggattag

SEQ ID NO: 354654 - DNA, 333 bp, Pseudomonas aeruginosa
atgaaaaggatactgctggcactagccctcggcgcaagcactactctcgcagaagagcccaagccctttgccatccaggttggcgaagcaatggggccagcagccgaagcttatagcaagaccatgaaccggctgttcaacgaatacatggcaggggccagcaaaggcccgcttggtgatgcagccagagccaatttaaaagcccagaatcaacgtgaacgtgaagccaatcgtgggattcgtcgcacaatgaaggaatgcatcaaacctgagaacgtcattgatgatgacgttaaggagtgcatggaggggttacggattaaggagtggtaa

SEQ ID NO: 354655 - DNA, 198 bp, Pseudomonas aeruginosa
atgaatatcggagatatttggtttgcccagagtgtaatgggccgggcttctataggaaagagtcaagaagcgggcaagcagcatgctttggggctcgccctcatgaagctaattgctctatggctgcaggtgaaccaagaagagcaggagggcttggtccaggtcaagatgaatttattaatcctggagagcgtatag

SEQ ID NO: 354656 - DNA, 135 bp, Pseudomonas aeruginosa
atgtattctgttttgagttgctgcttcaataatttcatattctttttcagtaaagcctgggagtccggttatatctccattatcctcaactcccaccaggagctcgccgccgtctgcatttgcaaacgccactag

SEQ ID NO: 354657 - DNA, 981 bp, Pseudomonas aeruginosa
atggcattggtgggtaggcgcgacggccgcaatttcggctacggcaggcaactgagctatgcagggccgcaggcactgaaagacatgttcggcggcggtcattacggcacggtcaaggcgcactgtgatcggtggcaggtattcgtcaaatggtgccgttccgaacaggggccgggtatcaatgattcgcggcagattgatctgaaggtgttggccgattatgcaacgtatctgcgcgacgtggttaggcgcggtgacctcgccgtcagtaccgcacaaaatcggctatccagcgttaacaggactatggcggcgcttcgcggtgatcagtacgtgaaattgcccagcccgagcaaggcgttgggtatgcagcgcaccggggttagacagtcgacgccgcagggccaagaccgcgcgcaggttaagcagatcgtagatgcgctttgccgccatcatcagcttcgggccgccgctgttgtcctattggcacgagccaccggcatgcgtttgcgtgaggccatcttggctgatctgccacggctaagccgtgaggcaaacgacctcggcaggatcaacattcaggatggcaccaaaggaggccgcgctggagcctcggcgccgcgttggattactgtggacgaccatgttcaaggtgcacttcggtttgctcggcaggtgtcgcctgcgggtggccgcaacctgattgctccacacgaaagctaccttgacgttctacaggacatcatccgtccggcgcgggaaattctgcattcccacaaccttaaaggtttccatgagctacgagcggcgtacgcgtgtgagcgttatgagcaaataacccaacaccgcgcgcctatcaacggtggccaatattgccaggaagatcagcgccttgatcgcggggctcggaggcaaattagctatgaactggggcacggtcggatcgatgtggccgctgcctatattggaggacggccatga

SEQ ID NO: 354658 - DNA, 846 bp, Pseudomonas aeruginosa
atggccgccccgttcaaatcaaatctggttacatgcatagtgcctgccgctccgtctctgagcactcacctgctatttgacaaagcacatcttgagccaactagctctcctatcaatcaatttcttgagcgacttcactctataaatagattgtcccccgacccgtcggctttcgacccgctacagggacaattagttttattaggcgtgattgctgcagtggagagttacttaaggacattattgcgaaaaataataaccacagatgaaatttcgcaaaacacatcgtacaagcgagacataacattcggggcagcagtacacttagataagcacatgatgcccgaggccatactggagcgaatctcctttgtaagtaaagaaagcatcactggctcaatcaaggactgcctcggaattaaaggacatacccctacaagtgtagacgccgccatagatgaatatgtaaaggtatgccaactccgccattgcgccgtacatagatttgggcgcctaggtgcatctaacgcactgtccttagggatccaagatcatcgagagctattggaaaaacctttacttcttgactacctttctctgcaaactgccattgtgatttgtacaaatctggtaaaaacaattaacaattacatattcaacgaagttttatccagactaccagaacaagcttggcaaggaaccttcaccaaagacaaaaagctctttaaaacttactacgacatattcgccgacagcgtcagctcaaagggctttactatagaaatgaaagcactgtacgcagacttactggagcagcgccgaaaatatcttgccggcgatcgctaa

SEQ ID NO: 354659 - DNA, 1683 bp, Pseudomonas aeruginosa
atggagttcgaagaaagagccgaccagctaagtgctgaagaaataagcacttcactcgcagaaggcgaaaccctaagaaaagcacgtcaaaagcttcttgccacaggggccaagttcctagtcgggccgcgaggcacgggcaagactcacctgatgcgctttacttattcccatgctctcaccaacaaaaaccacccccttactttatattcaagctttaataagtatcttcacttagagccattactgaaaaaaaccccagatgcactcaagagatttcattcctgggtactagcaaaaatcctcataagcgctttcgactatatcaatgacctaagcagcgacagtgaattcctaaaaactcaagacccaatttacgacaaggacaagcttcgcgagcttgtatcactacttgagcgcgggtccggcgtccagctctatgaagaatacgggcaatttataactgtagatcacgttattagagcagtacgttctctaactgcgaagttcaatagatcgcgcgcagtcctccttcttgatgacgctgctctaagcttgtctgaccagtatctcattgcattcttcgaagtcttcagggttctgaaggtagacggcatagctcctaaagcatccgtttatcctggctcaacccaatatggaccaaccttccatacgtcccatgaagtagaggaagtacctctatggctgtcagtcgaggattctgcctactcttctattatgggagacatagcaaatcgacgactctcatccgaacagcaaaagcagatctctccagacgtacttgagctattcaaatacacagcatttggaataccacgggttttcctacgtctactaagagagtacttttctgagaacgccggcacatctcaatcaaaagtcaataaaatcattgagcaccaagtagatcttattggcgcagaatacgattcacttgcactaaagctaaagcagttcacatccgtaattcagacaggaagagaatttttcaacaacgccatctcggacatttcttccttccaggctagcgacctcacaaaacgaaacattgttttaggcattttgcagaacgctgagagaacacccttggccgagcgaatgattaaatttctaatcgaagtcggcatgctttaccccttgcagtccgtttctcatgggcaaggtagaaagtatgatagatacattccgcacatggcattcctataccaagccggggcttttagagagggcaaaaggaacacctttaaagggttacctgaggtaatgattgcctcgcccgctaaacacccattaagaagagagttcaagacccttctgaaagctcaaggcttggctaacttaaagcttgaccttcctccatgccagaaatgtgggacccagcggttcaacgactcccaacttttctgccacaactgcggggaagagcttgtaggttcttcgctatttgaagagtgcatgaaactaccgctaagtgaagtacctgggatgagcagaagcctcatctcacgtatacatgaagcaacgaatatccgcagcatcgcagatgtaatcacagtacaaaatgcctcaagcgagttgcaaaaagctaattacgtggggccaaggagggcagagcaaatcattaacaaagtagagctcacagtagaggagttcctttcgtaa

SEQ ID NO: 354660 - DNA, 1242 bp, Pseudomonas aeruginosa
ttgctgacgcctaccccgatttctggatctgacattctaggtcgctattataccaaaagcgaaattagctcatttctggtagaacagcttgacatcgtcacgcctatgcgacttttggatttaggggctggatcgggatcactctgtggggccgctaagtcgcgctggccgaatatagaaatagttagcgttgatatcgacccagatgccaagctaaaatctattagatcaacaggagcttcgacgaaatatttacatcagcacttcactgctgatgccctcgttgggaaccttccaaccatactcaattccaagcttgcccccatagatatcgcaatatgcaacccgccatttattacaccgcaatggcgcgacgaattcagacaaatactggaagatgcgggatttgctgattgcctgccgttcccgtcagatgtagatgcaggtctcctgttcctagctcagaacctcaggattttgtctcagaatgcaactctcggaataattttaccgaatagtttgatcgctgctaaaaaatatacaaaattcagatttaacttactgagcaactatagtgtcagcaaggtaatccagcttcctagaggttcgtttcacggaaccgatgcgctcgccagcattgtcatcattcataaacaaatagaacgcagggaacatattgaattatcctgcctagatgacaacaaacagttatcgaaatcgatatcaattgagcaatcagacgcgattgataggctcgattattcctaccactcatacaaattgagcaggaagaggaaaggaactgctgcaacgctagaaagcattggcgccattatacaaagaggatcactttctagctcgcaagtcaaaaaatctaattttccgactttgcatattaccaacatacacaacactgatgctggaagatggatcaattttgaagaatttgaaagtacaactaaacatgagaaggcattaatccatgcacagcctggagacattttaatatctcgtgtcggaagaaaattagaagataaggtcgttggagtagagtccgggtgctttcctattagcgactgcatatacttgatccgctgctctgagtttcaccgcgaagctgttctatctcagttggctagccaatctggcaaggaatggctggcagcacattcctatggagtagcagccaagcaactgccaaaaaaacaactattaaaattcccattaacacttgagcaataa

SEQ ID NO: 354661 - DNA, 666 bp, Pseudomonas aeruginosa
atgccacataccacagaaaaattgactgccgatgagtatgataaaaaattcgaaggcaaagaagagaaggctctagctcaagcgttagacatcagaaaatttgagattgacctttactggaagagagccgcttatttttggacattcataggcgccacttttgctggctttattgccattgaagcctccagcgcaccaaacaaacaagatctagcaataatactggcaaatcttggctttgtattttcttttgcttggttttgcgccaacaaaggtagtaagttttggcaggaaaactgggaaaaacatgtagatgttcttgaggatgacgtcatgggccctctatacaaggtggtgctttctcgaaatattagtacctcagcctttgaaaaggcaatagactttacaactggaccttcaaaaatatcagtctccaagataaatcagctcatcagcctgtatgtctcgatactttgggtattcttatacttctattcattgccagagttctcaatgagcaagtcagtaaattggttctacgtactaatatcaacaatgagcctgctggtgagcgggagttttttattcttagggcgctcatactggggtggctattatcacaccgctgaaatacgtaagtctcgagtcaaccctgaaggtaactga

SEQ ID NO: 354662 - DNA, 1404 bp, Pseudomonas aeruginosa
atgtcgcacaacttacctagcagcacaccacgagatggaagcccactgctcaaaggcaaaaggcctgatttaatcgaactgatcgcagctacccttcattcagtaaaggcgtatgacttgccagcggaatgcgagcggctcggattggcgaccgggacaggtagcgaagcgcactccagcaagcgcgtgtacgtgcgaagccgtctccaaggactgagcaacgatcagcttctcctgctcgcacgccaggttgagcaagatcacttcagtttttcgctgagcgaatttctccgactgttggacgagtcgagcgacgatcagacagtcactgaactgacgcggcgctcgatcctcaagctgctgaacgacgtggatctcttcggcgaactcccgcttgtcgaacaattggccaagatctggccattatcggaaatgcgtggcgcaggcttcgaggtaaacttggaggagtccgtcatacggcactgcgtgaccaacgacgactggaccaacgctgaattgctcgaggtggtgggcgcactaagcagttcccgacaactgttcttcaagttgcttgaggctgtcgtctctccgaatgcccgaagaggaaaggagcagacgcagctcgttgagacactgaatgctctcctcaaggcggacggcttccaactaaggccatcggggagcatctcaggatattcggtgttcgcggtgtgtcgaatcagtggtggcgtatctggcgcgcccaagaatttgatcttcgcgtcaacggggccgaagcccgagatcgtcatccaggatgccatcaacaacgacatccgaatcgttaggaatgaagagcactgcctcgtgtacgaccgcccgattcaagccagcgggcttaccaaggaggagatgctctcgtggtggagggatcggcaaggtatccaggacgaatcagatgcacggcgatcgctttctcaacgtctgatggcatctcttgcatcggacggcgagcgaaacgtattcagcgtctactaccgggcattcaaggatttcggcgacaagctgccagccctcattccgcaggtctatctgcattacgacccatacacgctggcgcagctcggcggggctggacgcttgcctcggcaacgcatggacttcctgctcctgttcagcgacgcaggccgtgtggtcgtcgaggttgacggatctcagcacttcgccgaagacgggaagccatccctcgccaggtacgcggacatggtggcggccgatcgtgacctccggctcgccgggtacgaggtctatcgtttcggggcaaacgagctcaccggccacgggtccgcagaacggattgaagcattcttccggcgcttacttcggaagcatgcagtccttcccggagcctgttcggctgagtga

SEQ ID NO: 354663 - DNA, 900 bp, Pseudomonas aeruginosa
atgcccaaagaccaacttgcagaactgacccagcctcagcgcgaccggctcgcgttcattgagctgcgcgtgcgcttcgtgggggagatccgtcggcaggacttggttgcgcggtttggcatccagtccgcagcggcaactcgagatttggcgctctataaggagttgtctccaggtaacatcgactatgaccccaaaggcaaggcctacgtcctggggccagacttccgccccatcttcgactttcctccggagcgggtgctgtcttggctgacgcagggctttggagacggcgagccgatgcggctcaaggcgtgggtggccagcgaaagcccctcacggcttacacacccggatctcgatgtgctggccagcgtgacccgggcgatccatcaggggtgtccgctccgcgtcgagtactactcaatatctagcggctgtactgagcgggaagtcgtcccctttgcgctgatcgacaacggcctgcgctggcatgtccgcgcctttgaccggaagtctcaggagttccgggatttcgtcatcacccggatcaagaaccctgtcgtgctcaaggggcagccagttgcagcccatgagatgagcgatcaagacatccagtggacgcggatcgtcgaactggagttggtgccgcacccggatcagccccggccggagatcaccgaaatggattacggcatgcgcgacggcgtgcttcggatgaagctgcgcgctgccacggctggatacatcctgcgcaaatggagtgtcgactgttcgcccgatcattgcctgcgcggaccggagtaccggttatggctcaaagatcatcttgcgatttacggcgtgaaaaatgccgtactggcaccaggctatagcgccactacgaaggcggactcttga

SEQ ID NO: 354664 - DNA, 375 bp, Pseudomonas aeruginosa
atggctgacgtctactacgcccccgatgcgctggacaaagccaatctcgacttgtttgttgacaatatcaagcctgaccgcacggcggaagacttactgttccaggtaatgctggactggggcgttgatcttgcgctgccaattgccaaagaaactattcagggcaaggaggtgttctttgtcgacggcaacgcactggctgcctgctttgacgcgcgaagcggtatcgacgaagccttcgtcaaggaactggccaagcgccagccgctgcgcgtagtgttccgcgatgcaggcttcaaggacagtgcggtaaagatcaacgtggagcagatcttcaaacttttgtcgcctgccaccgaagtgaagtgcatctga

SEQ ID NO: 354665 - DNA, 741 bp, Pseudomonas aeruginosa
atgagttactacaaaaccaatgccgtatacaacgcactaagcgcagagcaaagccatccgtttgtttgggtgtcaggtaatgcatggatgctcatttatggcgatcaaaatgtcacacccagagcaatggtcttggtctatggcaaatcatgggttagacaaaacgatgtcataaagacggcgaaaacaatggccacgaagtcagggcttccattgtttttcgttaattttgatgatggagctcagttaattgataaggttggatttggaagaccggggcaaaccccaaccgaactaactttggatcagctaaaggatgagtttcaaaaaataggacttcccgttaaaaacggggtgtgcggaaaaagcgttaatgatgtcacgagcagcgcatatcataaatggcaacgagacaatcttggatcgattaaggtaaccgatattgaccttgttcgcttggacttaaacggcgagccggtagaagcaatcgaacttaagcgatctttttatccactcgaccaatggaacccgtattccgatgactacgtgaatttcaatttacttctttcggtgtgtcaacaggcggcaatgaaattgactatcgcatacaacgtgcggcaaacaaagccattcttcaatgacgatgcctcccagcttttgttattctcatattcgacgccgaacaagcctgtcaaactcggcaagtttagctacgctgattttttggctggcgactattga

SEQ ID NO: 354666 - DNA, 375 bp, Pseudomonas aeruginosa
atgcccagcctgaatgatccgcgcctggacgtcctggtcagcctcggcaactggttgcgaggccaggactaccgtttcgtcaccgtcaccccggctacccatgagcgcgtcaacgcccgcccggaaaaccgcatggcccgggacctggccggcatcttcggctggagccgggcattcgccggggaaagcctgccgggcgactggctgacccttcttgccggcgccgacctgatccgccgcgaggcggacggctggcgcagccagaggtgcgcgtctccagcctcggcgagcaactgttcgtccattcggccttccctaccctggccgccgacgcggtgttcttcggccccgacacctaccgcttcgaccggctga

SEQ ID NO: 354667 - DNA, 249 bp, Pseudomonas aeruginosa
atgatttacggatatcaagaaatgacggaaagcaagggaagagcattgcggggcgacttccttatcgctacgtcatcgcttcctggcagcaagcgatgcaggtggctgcattatgccattatgcccttcttgtgtcaggccctgaaggggagagaggattacaacgaggaacatccgcagcgcactgaactaccgctcgccgctgcgcaattgcgcttacttgaccacctgattgtagtggtctactga

SEQ ID NO: 354668 - DNA, 429 bp, Pseudomonas aeruginosa
atgatcattgaaacggccgcgccagacttcgatgagagcgccgacgtacagatacgggcctgtctgaatcccgccgcgccgcaaagcttttttctctacgccggggcaggatccggtaagacgcgctctctgaaaagggcgctcgacacctttcgcgaagatcatggcgcgacctttaggcggactggtaagaagatcgcggtcattacatatacgaacgtcgcggccgacgaaatcgccgaacgtgtcggagaggatccgctgtttcctatatcgacgatccacagcttctgctggcgccatatcgaggcctaccatcgtgatatccaggcgtggctcctcaacagacttccggttgagcttgccgacctacgcgagaagcaagcgaaggggcgctctggcaccaaggccgcgcaagaccgcgtgtag

SEQ ID NO: 354669 - DNA, 426 bp, Pseudomonas aeruginosa
gtgttcttcgtcctcgatgaaggtcgccggctgaacgaggagtggcgcgaggaactgacccgtcgccgccaggccgtcagcctgcgccaactgatccgacgcgaagagcggccacaacggatcgccgccgccgagctgcaggcacgactggcgccaaccctgcgcaagaaggcgcacaactatagcgagcgcggcatcgaccacggcgaactggacctgctggccttcgtcaacctgaagcgcgcggtgcccgatttcaatacgcccttcccgccgcccaccgaatacctgcgccaaggctggcgctctctgtcgatggtcggtccgacctttgcccgggtgctcttcgctcactccggcgcccccgaattcctgcgcgccaacctcggccgcagcatcctgttcgacgccggggtaggcctgtga

SEQ ID NO: 354670 - DNA, 354 bp, Pseudomonas aeruginosa
atggccggacgcaggttggcgaacaggcccagttgcgagcgaatcttcagcagaccgcgctcgggacggatatcgcgttcgatcctgtcccacttcggccccccctaccgcgcccagcagcaccgcatcggcctggcgcgcgcgctgcagggtctggtcggccagcggcacgccgtgcttgtcgatggccgcgccaccgatgacgtcctcggccagttcgaagccgagctggaacctgtcgttggccagttccagcaccttgaccgcttccgccatgatttccgggccgataccgtcaccggggagaaccaggatctgcttgctcataacaccctcttgtccttcattcattga

SEQ ID NO: 354671 - DNA, 384 bp, Pseudomonas aeruginosa
atgatcaatcacctgcacgacgcccagcaaggcaaggaacacgcggcgatcgccgaggtgatcgaggagctggtggactacacgctgtcgcacttcgccttcgaggaaaccctgatggaggatgccggctaccagttttcccgggcgcacaagaagatccacgagctgttcatccgccgggtctccgaataccgggtgcgcttccaggccggcgaggatgtcggcgatgaactcaagggcttgctctcgcgctggctgttcaaccacatccgcaacgacgacgccggatatgtggatgcggtacgccacagcatgtccgaactggtcaaggacaagagcgagggcggttggttgtcgcgctcgatgaagcgcttcttcggctga

SEQ ID NO: 354672 - DNA, 294 bp, Pseudomonas aeruginosa
gtgcccaggccctgggcgcgggccaaggtgaagtcggacctgctgcagaaggccgaggtccacagcgacaaggcccgaccgaccccgccggtgttcgtcgaatggcacttcctgcagcggatcgtctacgagtactgcgccgcggagtacctgcgcatgggactggccaacctgaaggcattctggaatccgatgccgggaacggacgagcacgacgactaccaggaaacccgcgcgaaggaacaggaagagatgaaaaggttttgcgaagagaacccggggtattgcgcatga

SEQ ID NO: 354673 - DNA, 1542 bp, Pseudomonas aeruginosa
atgaacccttcgcgtcgtgtcgccctggtcgccgccatttacctgggaaccttcatcgcctcgctcgacatcagcatcgtcaacctcgccctgccgacgctgcagtacgccctggataccgacctggccggcctgcagtgggtggtcgacgcctatgcgctgtgcctgagcgccttcatgctgtcttccggaccgctgagcgaccgctacggtcgcaagctgacctggctgctcggggtcggcctgttcagcttcggttcgctgctctgcgcgctggtcacctcgctgccgctgctgctgttcggacgcgcggtccaaggcatcgccggggcgctgttgatacccggcgcgctgtcgatccttacccaggctttccacgatcccggccagcgcgcccaggtgatcggcggctggacctccttcagcgcgctgtcgctgatcctcggcccgctgctcggcggcctgctggtggagcacgccggctggcagagcatcttcctgatcaacctgccgctcggcctgctggcgctcgccctgggcctgtggggcatcgaggaaaccgcgcaccccgagcacgccgccttcgatcccctggggcagctgctcagcgtggtctggctgggggcgttgacctacgccctgatcgccgcgggagagggcggctggttgtctcccacggcctggccggcgctgctcctggccggggtcggcctgcttggcttcctcttcgtcgagcggcggaccgcccgaccgctgctgcccctggggttgttccgccaggccgggttcgccgtctgcaacctggcctcgttcgtcctcggtttttccggctacgccagcctgttcttcctctccctgttcttccagcaggtgcagggtgcctcggcgcagcaggccggcttctacctggcgccgcagttcctcgccatgggcgcactgtccatgctgttcggccggttgcagcggcacgtaccgctgcgacgcctgctggtgctgggctacctggtgatcggcctggccatgctggcgctggccgcttgcggtacgggaaccgcgtatccctgggtcggcctgttgctggtggcgctcggcctgggcatgggcctggccgttcccggcaccggtctggcggtcatggcgagcgtggcccgcgagcgttccgggatggcctcggcgaccatgaataccctgcgccaggccggcatggccgtcggcatcgcgttgctgggagcgctgctgagcgggcgggcgatcgtcgtcctgggcgatcggctggaggagctggggattgccgatgcgcaacggctcgccacccaggcgatcacggcccatcgcttgcctggttccctggcggggctcgacgccgagctgccggccgcgctggccgagggcttccgtctggctatgctggtggccggagccagcgccctgctggccgccgcgctgctctggcgcctgcgcgttagcgccggcccggcggcggatacagttggcgcatctggacgaacggcaggggtacagttgcaggccgatagacactga

SEQ ID NO: 354674 - DNA, 438 bp, Pseudomonas aeruginosa
gtggtgatcggcgccttcgccgcccgcgccgcgatcggagcggcgctgggcgccggcatcgagctggggatgcagaccggcaagcaggtgctggggcagatgaaggacaactgggacagcgatcgcgacctcaccgatatcaagtggaagtgcatcgacatcaactggaaacacgtcggcgcctcggcggccatcggcaccgtggcgccgggcatgctcagcaccggcaagaccgtggtgcagtccgccaaggcgatcaggaccctttccggacaggcggccaacaccgccaaccgcgcggccaagctggccgcgcgcaaggccgcccatgccgataccatcaagaaggccgtggccacccaggccgcctggcagacgggcaagcagatcgtcaaatgcccactgaaggacgaagaagaggagtgtccgccgcaatga

SEQ ID NO: 354675 - DNA, 1134 bp, Pseudomonas aeruginosa
atggacttcaaccttgacgattcccagaaaaagctggcacgacaaatcgctgagacctgccgcgaacgcctgccggagcgcccgaccgcgcatttctcgcccgagcaatgggctgtctgcggggaggccggcctgctcggcctctccattccccgcgactatggcgggcaggggcttggcgcgctgtcgacggcggtcgcgatgcacgccttcggacactcctgtgcggacatgggcctggtgtttgcagcggcagcccaccagttcgcctgcgcgatgcccatcgtcgaattcgccagcgaatcgctgcggcgcgacctgctgccgaagatggccagtggcgaactgatcggctccaacgccatcaccgagccaggcgcgggttccgactcgaccgcactgaagacccgcgcactgccgcaggacgacggtggttatatccttgacggtttcaagagcttcgccggcaacgcaccggtagctgatgtattcgtcgcctacgccaccacccagccggaatacggtgcgctgggcatcaccgggttcgtggtggagagcgagcgcccgggcgttatggtcagcgagccgttgcgcaaggtctgcctgcgcagctgtcctgccggcgaagtgactttcgccggctgccgggtccctgttgccaaccgcctgggtgaagaagggcagggccgcttcgtgttccagagttcgatgggctgggagcgcgcctgcctgttcgcggcattcctgggcatgatggagcgccaactcgaagagacgcttgcctacgcccgttcgcgtcgccagttcggcaaggcaatcggcgcctatcaggcggtatcgcaccgtatcgccgaaatgaagtttcgcctggaatcctcccgcctgctgctgtaccgggcctgctggggcatggaccagggcgatccccagcaactccacatcgccttgtcgaaactggccatcagcgagggcgcgctggcctcgagcctggacgctgtgcgcatcttcggcggtcgtggttgcctggaggggttcggcatcgaggaaatgttccgcgactcggtcggcacggtgatcttttccggaacctcggacatgcagcgcgagatcgttgcccgggagctcggcctatga

SEQ ID NO: 354676 - DNA, 576 bp, Pseudomonas aeruginosa
gtgtcaccccttgaactcttcgccgcttcgctcggcgccatcgccgtctacctgaccgtccgccagaacccctggtgctggcctatcggcctggtgatggtggcgctctatgcctggatattcttcgaggtgaagctttattcggacatgctcctgcaaatggtctacgcggcgctacagctctatggctggtggcagtggacccgcggcgggcaggaccacgacggccgctcggtgagccgcctgaacgccgcgcagcgcctctacgggctcggtgcgggcctggtcggcagcgtcgcgctcggttacctgatggccaaccacaccgatgccgccagtccctggtgggacgccggattgaccgccttcagcctggtggcgcaatgctggatggcgcagaagcgcctggaatgctgggccctgtggatcgccgtggacgtgctgttcgtggcgctcttcgccagcaaggcgctgtacctgaccgccgccctctacgccctcttcaccctgctggcgatccacggctggcggacctggcgccgcgacccggcattgcgcgagggcgtcgccgcatga

SEQ ID NO: 354677 - DNA, 564 bp, Pseudomonas aeruginosa
atgagtgccgcgaaaaaggcccccgtcatcctgattgccgacccggacccctggagtcgcgacttgcttggccaactggtcctcggcgtgcgttgcgatgcccggctggtcctctgcggcgatggcggagaagcgctggcgcattgccggcgccggcgcttcgcgttgatcctggccgagctgaacctgccgcaggtggatggcttcgagctgctgcgcgaagcgcgcctgcgccgctcggtcgccgagcagccgttcatcctgatcagcgaccgcgccgaccaggccagcgtgcgcgccgccgtggcactggcgccgaccgcctacctggtgaagccgttccaggccgagaacctgatgcaacgcctgcgagggttgttgctgaagggcgacgaagtggtcgcctgtccgctgccggagcgggacgcgggcgagaacctggaggctttcctcgaacgcgcgcgcgactccgcggaggggggcgccgttgctggccgacgtgcgtgccgccagcgatcgttgcctgagcgccgaggagcatccgctgcgcgtgctggaggatga

SEQ ID NO: 354678 - DNA, 300 bp, Pseudomonas aeruginosa
atggccgcagacccagccaaaggtaagctatatacattccacttcaacgccctgcgcagcattatggagaagaccgcctctttctttgggcattcggatatttccttctgcctcaaggcgatcaacaacgaggaagacagagctctgtacaaccgagcgctcaatcttcttagtcacggcaagtatgccatccatgaccccgttgagatgggcgaagacaataaggatttgtttcgccgcattctccaggatttcttgacggagtttaaattcagcttgccgagtattgtgaaaccatga

SEQ ID NO: 354679 - DNA, 2331 bp, Pseudomonas aeruginosa
atgatcagccgttatatggtgctggtcgccagcgagcagaaactgctcatgatgcggccctaccagatctatgccgtcaaaaacatcgttaagtgcatcgaagaaaacagcggtaatggctacatctggcacaccaccggcagcggcaagacgctcaccagcttcaaggcttccaccctactcaaagccaatccgaacattgaaaaatgtctgttcgtggtcgatcgcaaagacctcgaccggcaaacccgcgaggaattcaatcgtttccaagaaggctgcgtcgagagcaacaccaacaccagcgagctcgttcgccgcatgctttcggaagatgcagccgacaaggttatcgtctgcaccattcagaagcttggcttggccttggacgagagcagcaaacgtaataaaagccgtgaaaagcgagggctagcgacctacgctgaacagctcaatgcactgcgcgatagacgcatcgtcttcatcttcgacgagtgccaccgttcgcaattcggcgagaaccaccagaccatcaaggcgttcttccccaaggcccagcttttcggcttcaccggcacccctatcttcgaggccaatgccagtgttaagcagataagtggcgaagaaaagacactaaagaccacgcaggacctgttccagcagccgctgcacgaatacaccattagcgatgccattgatgatcgcaatgtcttgaagtttcacgtcgactactacaaacctgacgggaagaatttacccaagcccggcgaaaccctggccaaacgcgccatcgttgacgcgatcctcagtaagcatgacgccgctactggcggtcgcaagtttaacgcgatcctggctacagcctccattaatgacgcgatcacttatcacgcgctatttgaagaggtccaagccgagaaactcaaggtcgtccctagcttcgtgccactaaatatcgccgccgtgttttcaccacctggcgatgtaagcgccgatgtgcggcagctgcaggaagacctgcctaccgagttggaaaacaacaagcaggatcccgacgtcaagaaggcagcgctgcaagcaattattgcctcctacaatacccgtttcgatacaaaccaccgtattgaggaattcgacctctactatcaagatgtgcagcaacgcatcaaagatcagcaatggccggatgccgacctgcgcaaagccgcccccaaagccccgcaacacaaaatcgacatcactattgtcgtcgacatgctgctaactggcttcgatagtaagtacctcaatacgctctacgtcgataaaaatcttaagcaccacggtctcatccaggccttcagccgcaccaaccgtgtattgaatgatactaagcccttcggccatatcctcgacttccgtggacagcaggatgcggtggatgcagccatcgcacttttttccggggcgaaggccaatgaagcacgcacaatctggttggtggataaagcctccgtcgttatcgaaaagctgcaagaagccaagctcggtctgcaaagcttcatggcgacatacgagctttcaggcagacccgaagaaatagccaatctcaaaggcgaggaagctcgcattggctttgtagaagccttcaagaaggtgcagaagttgcaaacccagcttgaccaatacactgacctcacccccgagcaactagccaatatccagaacatcctaccgccagacgaactcaacgcctttcgtggccaatatctggagacggccagacgtctgcgggacgagcgcgccaagcccggcgatgacaagagcgggaaactggaacagctcgatttcgagttcgtacttttcgcttcctccacgatcgattacgactacatcatgaagctgatcaccgacttctccaccaggaagcctggcaaagccaccatgagccgtgaacaactgattagccttatcgcgggcgacgccaaatttatcgacgagcgcgaggacatcaccgaatacgtaatgggcctcaaggccggcgagggcttggacgagcgcgccatccgctccggttatcagcaattcaaggcagcaaaagccgcccgcgagctggccgagctcgccgcgaagcacgatttgccaactgcggcactgcagaactttgtgaacggggtgctggagcgtcgcatcttcgacggcgaacaactcaccgaattgctagccccgctggagctgggttggaaggctcgcacgcagaaggagttggtcttgatgaacgaactggtgccgatactgaagaagcgtgccgggggggcggatatttcaggcctccaagcctacgaggattga

SEQ ID NO: 354680 - DNA, 570 bp, Pseudomonas aeruginosa
atggacattgatttcaagaaattggctccctggaactggttcaagaaggagcaggaagaacaacagagcactgcctcgctcccggtgcagcgcaatgacctgccggtggcgggtgggcccgtcagtcccatcctgcaattgcatcgcgagatcgaccgcctgttcgacgacgcgtttcgaggcttcggtttcccgacgctggccatgccacgctggccgtcggactggccgggcctgctgaagccggcgctggacatccaggagaccgacaagcagtacaagatcgccctggaagtacccggcatcgaggaaaaagacatccagatcacgctcgacaacgacgtgctgctggtgcgcggtgaaaagcgtcaggagcaggaaacgaaagacggcggtttccatcgggtggagcgctcctacggcagctttcagcgcgctctgaacctgccggccgatgccaaccaggacacgatcaaggccgctttcaagaacggcgtgctcacgatcacgatggaaaagcgcgaggccagtacgccccagcaggggcgctcgatcccgatcaacggctga

SEQ ID NO: 354681 - DNA, 717 bp, Pseudomonas aeruginosa
atggcgatttctgagttgaagctgccggccggcgtcggcctgcaggtctggggcagcgccgccgagcaggcccgcggcctggccgccgaggtcgccggccggttgcgctcggcgctggccgagcagggccaggcgctgttggtggtgtccggtgggcgcagtccggtggccttcctcgaagccttgagcgaggagccgctggactggtcgcggatcacagtcagcctggccgacgagcgctgggtgccggagtcgcatgccgatagcaacgccggcctggttcgccgccacctgctccgtggcgaggcggcgaaggcgcgcttcatcggcctctaccagccggcggcgagcctggaggaagcggccgagctggccgaccatcacctgcacgagctgccattgccgatcgacgtgctggtcctcggcatgggcgacgacggccataccgcctcgctgttcccgaacagccctggcctggacctggcgatggatccccaggggacgcgccgttgcctgccgatgtgggcgccgagcgtgccgcaccagcgcctgaccctgccgcgcgccgtgctggcggcggcgaaggtgcagctgctggcgatccagggccagtccaagctggccaccctgaacgccgcgctggcggtcgaggacgaacggcggatgccggttcgcgccttcctccgcgcgcagctgacgatccattggtacccctga

SEQ ID NO: 354682 - DNA, 750 bp, Pseudomonas aeruginosa
atgaatccttctttgcaggaccacccggtgagcagccgggaacaatggctggacgcccgtcgccgcctgctggcgcgggaaaagcaactcacccgcctgcgcgaccaggtcgccgccgaacgacgcgaactgccctgggtcagggtggacaaggactaccgcttccagggcgagcgcggtgagcgttcgctggccgagttgttcggcggcaatagccagctaatcgtctaccacttcatgttcgcgccgggctggagcgaaggctgcgtcggctgttcgttcctcgccgaccacatcgacggcgccaaccggcacctggcgcaccacgacgtcagcctggtggcggtatcgcgcgcgcccctggaagagttccaggcgttccgccggcgcatgggctggcgtttcgactggtactcctcgtacggcagcgatttcaaccgtgacttcggggtgtccttcgacaaggcgcaactggccgccggcagcgtcgactacaactaccagccgacccccgacgccggcgaggaaatgccgggtgccagcgtgttcctgcgcaatccggcgggcgaggtgttccacacctattcggcctatgcgcgcggcctcgacatcctgctcaccacctacaccttcctcgacctgacgcccaaggggcgcaacgaggacgcgatcatggactggctgcgtcaccacgaccgctacgacgaggcgccgaaaagcgcctgctgccacgcgcaggccagccattga

SEQ ID NO: 354683 - DNA, 1245 bp, Pseudomonas aeruginosa
ttgagggagcacggcgagccgttgcgcagccgcatcgaggcgctgtaccgcgaggagtcgcggcgcgtgctggcgacccttatccgcctgctcggcgatttcgagctggccgaggaggccttgcacgacgccttcatcgccgccgtcgagcagtggccgcgcgacggtatcccgcgcaacccgcgcgcctggctggtttccgctgggcgcttcaaggccatcgacaacctgcgccggcgagcgcgtttcgacgcctcgcagcgactgctcgccgagcaactggaagagcaggccgaggcgccggcggaggagggcgatgcggtggaagacgaccggctacgcctgatcttcacctgctgccacccggcgctgacccccgaggcacaggtggcgctgaccctgcgcgaggtctgcgacctgcgcaccgaggagatcgcccgcgccttcctcgccgcgcccagcgccatcgcccaacgcatcgtgcgggccaagaacaagatccgcgaggcccggattccctaccaggtaccgaccctggaggaactccccgagcggctgggcaacgtcctgcaagtgatctacctggtgttcaacgagggctactcggcctccaccggcgccagcctgacccgcgccgatctcagcggcgaggcgatccgcgtcggccgcctgctggtcgagctgctgcccgaccccgaggccctcggcctgctcgccctgatgttgctgcacgactcgcggcgccaggcgcggatctcggccagcggcgaactggtgcggctcgacgagcaggaccgcgctctgtgggatcgtggactgatcgtcgaggggctcggcctggtcgagcgggccctggccagccgccgtttcggggcctacaccctgcaggcggccatcgtcgcggtgcacgcccaggccccgcgcgccgaggacaccgactgggcacggatcgtcgccctctacgacgcgctgctgtacctggcgccatcgccggtgatcgaactcaaccgcgccgtggccttggccatgcgcgatggcgtcgaggtcgggctggccgtggtcgatgcgttgctggcgcgaggtgaactggccgattaccacctggcgcactcggcgcgtgccgacttctgccgccgtctcggtcgccgccgcgaggcccgcgaggcctaccgcgcggcgctggccctggcgcgccaggagccggagcggcgcttcatcgagcagcgcctgcgcgaactcgattga

SEQ ID NO: 354684 - DNA, 201 bp, Pseudomonas aeruginosa
atggatcgcgcacaggcgaagtgcttcaaggacactgttccgctctccttcctcaaagctagatcgataagcttccagcatcagcgaccatgcctgccagcgctggaacgggcttacggggccatcgtctccagcggcctttgcttgctcaaaactccaagttgggtcgaagtctgcaaaatccatctcaggcactcctaa

SEQ ID NO: 354685 - DNA, 474 bp, Pseudomonas aeruginosa
atggtcagccagagcctgcgactggcccggcgagtctcgcgccgggcgtggcgactgcgcgtgccgggcgcctggcgggcctgggccttgccgctgctggcactatcgtcgtgggaggcgctggtgcgcctgggctggctgccggcctaccagatgccggcgccgagcggcatcctgctgaccctggtggaactggctcgcggcgagctgtgggggcatgtcggcgcgaccctgaccctatccaacttcggcaccctgttcggccgctacgccaaccccgtggtggtgccgccgcaggtggccatcctcggcgccggcggcatccgcgacgaagtagtggcctggcgcggcgagatggcgatccacccgatcctgccgctctcgctgagcttcgatcaccgcgccgtcaccggtggcgaggcggcgcgtttcctcaaggtactggtgaacgccctggagcagcccgacggctga

SEQ ID NO: 354686 - DNA, 399 bp, Pseudomonas aeruginosa
atgcccgctctccccgcctcccccgtccgctcccgacgctggcgcctggaccggcgcagcctgctgctggcactgctgctgttcggcctgctggtcctgctcgccaccctgggccggcattggggctggatacgcagcttcggcggcgacctgctggcggtggtctggctctactacctgatgggcagcgcgctcagggcgccggccgcctggctggcatccgccgcctttggcgtcggcgcgctgctggaactgggccagtacctggcggcgcaactgcattggcaattctccagccccgtgctgcgcatcgttctcggtagcaccgccgacggcttcgacctgctcgcctatgccctcggcgcgctgctggcatggtggctggagcgccggcgctga

SEQ ID NO: 354687 - DNA, 1581 bp, Pseudomonas aeruginosa
atgccgattccggtgaagcgagccaggagaaaggcgctccggctgtcgttgtccgtgctggtcggggtgatgccgatcgtcctggggctgctcatcctctactggcaggccgagcgaagcctccaggagacgtccgagcaggcagccgggaatgcggtgcggcagttcgaacggatgctcgacaacgctgcgttggcggcgcgcaaggtcatgccggtggcggggcgtccttgtcccgaggccgagctggcgctgcgcgagcaagtggcgatcatgccgttcgtgcgctcggtcaatttgacgcgcgacaatacgatctattgcacgtcgttgttcggcggcttcgacgagccggtgcggatcgagaactatgtcgacggacgcctcttgctgatgcccggcaaccaggtcacgccggacgccgcgctgctggtcctgcgggacttcgacggcaagcgcggggtattggcggcgatcgacgggcgctacttgagctacgtgctggacctcgtcgaccgacgtagccgacaggtgctggtggtcggtcccaattggctggatgccgagggccgcactcaccgcgacgcgccgcccacctatgaggtcgccgccgtatcgctcgcttcgcagcgttatccgttgcgggtgctgtcgggcttccccgagggcgaggaatggcgatcgatccgctcgcagaacccggcgatgttcggcctgctactgttcttcggactgctggccggcactctgtgctactggctatccaggcgggtcgcctcgcccagcagcgaactgcgccgggccctggaggccaacgagttcattccctactaccagccgctgagtcccggccagggcggacgctggataggcgtcgaggtgctcatgcgctggcgtcatccgcgtgagggactgatccggcccgacctgttcatacctttcgccgagcgctcgggactgatcgtaccgatgacgcgcgcgctgatgcgccaggtcgcggaagacctgggcgggcatgccgggaagctggagccgggcttccacatcggtttcaacatcagtgccacccattgccacgaactggccttggtggacgactgtcgcgagctgttggcggcgtttccgcccgggcacatcaccttggtcctggaactgaccgagcgcgagctgatcgagtcgagcgaagtcaccgaccgcctgttcgacgaattgcatgccctgggagtgaagatcgccatcgacgatttcggcaccggacattccagcctggcctacctgcgcaagttccaggtggactgcctgaagatcgaccagagcttcgtcgcccgcattggcatcgataccctttccgggcatattctcgacagcatcgtcgagctgtccgccaagctcgacctggatatcgtcgccgaaggcgtggagacccccgagcagcgtgactacctggccgcccgcggggtggattacctgcagggctacctgatcggccggccgatgccgctggagagtctgctttccagcctgactgtgcaggaagggcagggggcttccgtcgtcgcactgccggcggaccgaggctag

SEQ ID NO: 354688 - DNA, 498 bp, Pseudomonas aeruginosa
atgccgaaacacatgctttctccccagggcgactatgcccctgccggtctggtccgccgcctggcggcgatgttctatgacttcctgctctgcgtggcgctgatgatggtggtcaccctggtttaccagcaaggcatccttcgactgatctacggcagcgaccatctgcgcgaactggccgaccgcggcgcgctgatcggcgacccgctgctctcgaccctgctggtgttcgccctgttcggcttcttcgccaaattctggacccacaacggccagaccctgggcatgcaggtctggggactgcgcgtgcagaaccgcgacggcagcgccatcagcctgctccaggcgctgctgcgcttcatgatcgccatcgcctcctggctgtgcctcggcctcggcttcctctggatgctctgggacaaggacaagcgtacctggcacgaccgctattcggagagccaggtggtcaggctgccgaagaacactcacaagaagtga

SEQ ID NO: 354689 - DNA, 1068 bp, Pseudomonas aeruginosa
atggttaagctcgatcgttacatcggtgtcaccgtcttcgtcgcgatcctcgcggtgctcggggtgatccttggcctggcgctgctgttcgccttcatcgacgaactcaacgacatcagcgccagctacggcatcggcgacgccctgcgcttcatcttcctcaccgcgccacggcgcgcctacgacatgctgccgatggcggcgctgatcggctgcctggtcggcctcggcaccctggccagcaacagcgaactgaccatcatgcgcgcggccggggtatccctgtcgcggatcgtctgggcggtgatgaaaccgatgctggtgctgatgctggccggcatcctggttggcgagtacgtcgcgccctggaccgagaacatcgcccagagcggccgcgccctggcccagggcggcggcgattcgcaaagctccaagcgcggtctgtggcatcgccaggggcgcgagtacatccacatcaacgcggtgcagcccaatggcgtgctgtacggcgtgacccgctaccgcttcgacgagcagcgtggcctggaatcggccagtttcgccaagcgcgcgcgcttcgagaccgatcactggcaactggaagaggtcaccaccaccttgctgcatccgagggaaaagcgttccgaggtggtcaagctaccgaccgaacgctgggatgcccagctcagcccgcaactgctgaacactgtggtgatggagcccgaggcgctgtctatcagcggtctctggcagtacatccactatctcgccgaccagggcctgaacaacaaccgctactggctggcgttctggaccaaggtcctgcaaccgctggtgaccgccgcgctggtgctgatggcgatttccttcatcttcggtccgttgcgctcggtgaccctgggccagcggatcttcaccggcgtgctggtgggcttcgtcttccgcatcgcccaggacctgctcggaccctccagcctggtgttcgacttcccgccgctgctggcggtggtgatccccgcctcgatctgcgcactggcgggtgtctggctgctacgccgggcgggctga

SEQ ID NO: 354690 - DNA, 1119 bp, Pseudomonas aeruginosa
ttgatcgttttccgttatttgtcccgtgaagtgctggtcaccatgagcgccgtcagcgccgtgctgctggtgatcatcatgagtggccgtttcatcaagtacctggcgcaagcggcgcaggggttgctcgaccccggttcgctgttcctgatcatggcgttccggattcccggcttcctgcagctgatcctgccgcttggcctgttcctcggcatcctgctggcctacgggcgactctatctggaaagcgagatgactgtgctctcggcgaccggcatgagtcagaagcgcctgctcggctataccatggccccggcgctgctggtggcgatcctggtggcctggctgagcctgttcctggcgccccagggcatcaaccagttcgccctgctgttgaacaagcaggataccctgaccgagttcgacaccctggtcccgggccgtttccaggcaatgcgcgacggtacccgggtgacctataccgaggaactgtcgaaggatcgcggcgaactggccggcatcttcatctcgcagaaggacctcaacagcagcaaccaggagcgcggcatctccatcctggtggcggagaagggcacccagaacatccaggcggatggcagccgttacctgatcctgcacaacggctaccgctacgacggcaatcccgggcaggccaactaccgggcgatccagtacgacacctatggcgtgatgctgcccaagcccgaggccagcagcgaggtgagcgagcgtgacgcggtgcccaccgccgacctgttcggcagcgacaacccacgctaccaggccgaattgcagtggcgcctgtcgacaccgctgctggtgttcgtggtgaccctgctggcggtgccgctgtcgcgggtcaacccacgccaggggcgcttcctcaagctgctgccggcgatcctcctttatatgggctacctggccctgctgatcgctgtccgtggccaactggacaaaggcaagatccccatggccatcggactgtggtgggtccacggactattcctggcgatcggtcttcttctgttctattgggaacccttgcgcctgaagctggcgtcctcccgtgccggtcgcgaggtggcgcatggttaa

SEQ ID NO: 354691 - DNA, 666 bp, Pseudomonas aeruginosa
atgtacaagatcctgatcgccgacgaccacccgctgttccgcgaggccatccacaatgtcatcgccgacggattccccggcagcgaagtgatggaaaccgccgacctcgacagcgccctgggcctgacccaggaacacgacgacctcgacctgatcctgctcgacctgaacatgcccggcatgcacggcctcaacggcttgatgaacctgcgcaacgaggccccgaccattcccgtggttatcgtctccgccgagcaggacaagcaggtggtgctacaggccatcacctacggcgcggtgggcttcatcaccaagtcctcgccacgcgcgcagatgaccgaagccatcgagcagatcctcaacggcaacgtctacctgccctcggacgtgatccgcacccagaagagttcgccgcgacgcagcggccacgaagaacacggcatctccccggaactgctccaggccctgacccgcaagcagctgctggtgctggagcggatgaccaagggcgagtcgaacaagcagatcgcctacaacctggacatcgccgagaccacggtgaaggcgcacgtctcggcgatcctgcgcaagctcaaggtacacaaccgggtccaggcgatcctcagcgccggcgacatcgacttcgccgcctacctgcgccgctga

SEQ ID NO: 354692 - DNA, 912 bp, Pseudomonas aeruginosa
atgcgctgcgccctggtcattcccacgcgcaacgccggcgcgcacctggaccggctgctgccggccctggtcgcgcaacggcggcagccggacagcatcctggtggtggacagccgctccagcgacgacacggtggagcgcttccgcgccttcggcgcgcgggtcgagatcatcgagccggccagcttcaaccacggcgggacgcggcgctgggccagccagcaggtcgaggccgacgcgctgatctacctgacccaggacgccattcccgcctcgcccgacagtttcgccaacctgctcgacgaactctatgccgaggccgacatcggcgtggcctacggccgccagttgccgcaccccggcgccggcctgctcggtgcccaggcgcggcgcttcaactacccgccggaaagccgcagcaagcgcctggccgacgcctcggaactggggatcaagacctgcttcagttccgactcgttctccgcctaccgcagcgacgccctggcggccgtcggcggcttccccgaagacgtcatcggcagcgaggacgcctacgtcgccgcgcgcctgctgcaggccggctacgcggtgcgctacgcggccagcgccgaggtctaccattcccacgattaccgcttgctggaagagttccgccgctatttcgacatcggcgtgttctacggccgcgagcgttggatacgtgccgccttcggcggcgcgggtggcgagggcaagcgctatgtcctcgccgagatacaggccttgcgtgccgccggtgccctgtatcgcgtacctgaaatagcgctgcgtagcgcgttcaagctgctcggctaccgccttggccagttggaacgccacctgccggtcgccctcaagcgccgcatcagcatgtttccaggctactggaagtga

SEQ ID NO: 354693 - DNA, 456 bp, Pseudomonas aeruginosa; identical to SEQ ID NO: 339352

SEQ ID NO: 354694 - DNA, 405 bp, Pseudomonas aeruginosa
gtgtcgatcaagaagctggatgacggccaatggctggtggactgccggccggaagggcgctatggccccaggatccgcaagaaatttcgttcgaagaacgaggccatgtacttccagaaccgggctatgggtgacggtgctcggggcgagttcgagaagcgcccggcccgcgacgaacgccggttgtctgagctggtgcggttgtggttctcattgcacggccagaacctgaagacgggggccgagcggctgcgcctgctggaagcgatggccgagcgcatgggagatccgaaggcctaccggttcgatgcggcgatgttcgcgcagtatcgcgccgagcgcgccgagggccggcacgttcgatccagcgtcggcagggggccggcgcaaaggggcggcgggtaa

SEQ ID NO: 354695 - DNA, 147 bp, Pseudomonas aeruginosa
atgagcagccgcgccacacccgccgttcgtatcggtaagctggaacgcgacctggccgtgctcgatcaccgcttgggtgacgtcgagcgcctgaaccgcgacgtgccccccggctcacccggctggaacagcagttcgagcacatga

SEQ ID NO: 354696 - DNA, 1587 bp, Pseudomonas aeruginosa; identical to SEQ ID NO: 345697

SEQ ID NO: 354697 - DNA, 792 bp, Pseudomonas aeruginosa
atgagcgccgataaacccgagcagcccgagcacgaccaggaaatgcccctggtctcgcacctgaccgaactgcgtacgcgcctgctgcgcagcgtggcggcgatcttcctgatcttcgccggcctgttctacttctcgcagaagatctacaccctggtctccgagccgttgcgccgcttccttccggaaggcaccagcatgatcgccaccgacgtcgcctcgccgttcctcgcgccgttcaagctgaccatggtggtggctctgttcctcgccatgccggtgatcctcgcgcaggtctggggcttcatcgcgcccggcctgtacaagcacgagaagcgcgtggcgctgccgctgctggtgtccagcatcatcctgttctacgccgggatggccttcgcctacttcctggtgttcccgatgatcttccacttcttcgccagcgtgacgcccgagggcgtggcgatgatgacggacatcaacagctacctggacttcgtcctgaccctgttcttcgccttcggcgtcgccttcgagatcccggtggccacggtgctgctgatctggatcggagtggtcgacgtcgagtacctgaagaagatccgcccgtacgtgatcatcggctgtttcgtggtcggcatggtcctgaccccgccggacatcttctcccagaccatgctcgcggtgccgatgtggctgctgttcgagatcggcctgctgttcggccgcctggtacgcaagcgcggcgagcatccggccagcgacggcgaccagcctccggccacccgccagtga

SEQ ID NO: 354698 - DNA, 939 bp, Pseudomonas aeruginosa
atgactgacaaagaaaaactcaaagaattgttagatatagttgggcactttaatgcccgcaaactcagagcagatgcttacttaagtgaaataaaggaggagtcctggagcctagggattgtgggcataaatacaaactttgatgactgcgcaattattcctggaaaagtttttcttgaaagaattcctgaacctcccggtgagattgagatagcaggagcaattgaccagcctcaatacttaagcgctatagcccgccattccaatctcatgactcatcagattgtgatactaaaaggggattggagtgacaaggcttgcattgaactcggctggtgggtggtgtcgctactgcgtataaaaagtctagctaactttattgttcccgcagtttcgaattatccctggactgctttagccgctgtcggccccaaaaagtgcaaggttagactattggaggataaaccgagtgctaaaaaggtgggagaggtagttgccatagagtcttcttgcatagactgggtttctaaatatgtttcaaattttgcaaagttagtaaacgttccaagcttttctatggctgttgatgcactaactacttatcattttcaaagcaatagcaggatgagcatagctatgctctggtcaggaattgaggctctttttaatattcatagcgaaataagtttcaggctggcaatatatgtagctgttgttttagaggcaccgggccccaagcgtagagaaatataccagagagtaaagaagctctattccatacgctctaaggccgtacatggcgccagcctatctgagtcaaaaggtgatgagcacatattagatgttagagatatattatctaggttaatatgccgttatactgaagaaggggaggttttctcagaggagcggattgaatgtgagctatttcacctataa

SEQ ID NO: 354699 - DNA, 129 bp, Pseudomonas aeruginosa
gtgaacagaagaactttgaaagccgtgggtgagggtgccctgctcggcctgggactggccatcttcatggtcggcatcgcgaccaccgcccgcgtgatcttcggcgcgctggccggctgccaaccgtga

SEQ ID NO: 354700 - DNA, 645 bp, Pseudomonas aeruginosa
  misc_feature (564)..(573): n is a, c, g, or t
atgccatcagcaacacaaatccctttacttcaagtcaagcagtggcttagcagctgggagttgagcgactgggttcagcctgaccttccagaaccgccgcacgaattttatattgcatctgttccgcttaagcagctacgcgacctggccggagttagccgccgtcaaattgaagaaagaagaagaggcgaaaaaggcgccggctaccagcgtgcgcatcaagctagtcgctcaagagatattgcccgatatatcaagttcggctatcccctttccaatcaaggcggacttaatcctgacgaccacaaaaaattaattcatcccggctggctaccaacatctatactagtcaacattatacagccgggtgagacaaggcggcgcggaggaagagagcttgccctcgagaaagagagcagcctcagcattcaaaaggaagggaattttcattttctttctatccctgactcactagcaagctcaagctacaaaggtacactcgagccaatagagatcattgatggtcagcatagactgttttccgttgatgagctaaatggtgannnnnnnnnnatacgagcttggcgttcgatctttacccagaactcagaagccaatcctggctcgaaagtggcgagggtataa

SEQ ID NO: 354701 - DNA, 915 bp, Pseudomonas aeruginosa
atgggactatcaatagggcagatgccgcgcgcccggccactggaagacgatgacctcttcgaagtggttcaggacggcatcaaccgctgcttcaccggacagcagctgcgccagctcatccaaaccgggcagcgcgtcaggaccgtcgccggggtgacccctgatgtatcgggggatgtacccctgaccgcggccgacctaggcctggccggagcggtcaagaaagtagccggcaaagcgccggatgctgctggcaacgtgcctctgaccgccgccgacctggggctgaaaggcatggtcgccaaggtggccggcaaggcgccggatgcgaccggcaacgtacccctgaccgctgccgacctgggcctggccggagcggtcaagaaagtagccggcaaagcgccggatgctgccggcaacgtgcctctgactgccgctgacctggggctgaaaggcacggtcgccaaggtggccggcaaggcgccggatgcgaccggcaacgtacccctgaccgctgccgacctgggcttgggaagtacggtcgaaggcccctggatcgagccggacatgctgacggcaagcttcacccccggtggccgcgatggctggacaatgcctggcgcgattgggcatgagcgccgcgtgcgatttcgccaggtaggccagcgcatctacgtcgacggctgcgtctattgcaagggcgggacaccttccggggtcgggatcttcagcctgacggaaacgttcgccccgcagtggagccgccggctgagcgccatctacaaagcatactcttccacctattcacgcccggtacccatcgagatacgtcgggtcaatggctacgtgctgctaggcgactcgattccagagcaaggcactctgtttctgagttgttccttcgacctcgactga

SEQ ID NO: 354702 - DNA, 156 bp, Pseudomonas aeruginosa
atgtttcttgaaataattctggtgtttctccagccacccggcacctttcatttttttgaattctctaaggtcaccgtagcgctcgacaatagtatccaggtagagttgaagcgagcccgccacgaggctcacgcacaccccacccagaagctttag

SEQ ID NO: 354703 - DNA, 309 bp, Pseudomonas aeruginosa
atggcccatccatatgacccccgcgacaactaccgtcgcctgctgttcccgatcggcgcgctgatcctcagcgagggcatcgaccgcctcatgcgtgagggccggctcgatccgatgtcctacttccggcgccacacccgtggcgattggggcgatgtcaccgacgagcagtggcagcagaacaacgctgcactgaagtctggggaacgcctcgattcgctctacatcgtcacccgcgaactgcgcatccgcattttcactgaagcggaccgccgcgccacccacatcgtgctgccttccgagcactga

SEQ ID NO: 354704 - DNA, 327 bp, Pseudomonas aeruginosa
atgttgaagaccttgtttcccaagctggggaaatcccagccatcccgtccattgttcaccttcggcaccttgcagctcagcgaaaaggtgcagtggttggacggcaagggcctgatcgaacccctgcgctacgtgcaacgccacatccgtggcgactggggggaacttagcgatgccgagcgcaaaggcaaccgcgatgcgctgcaatcgcaaggcgtgctgacctcgcgctacgagatcacgccacgcctggcgctcatcatccgcaccaacgaggacagaagcctcactgtggtgcagttgcctgaggaagaaaagcgcctctga

SEQ ID NO: 354705 - DNA, 651 bp, Pseudomonas aeruginosa
atgcctgcaacaccatccaaccagcgactctaccgcatcgatgaatgcccggacctaatggccgacgcttgcgtcggcgatgaccaaggcaacctgatcttcctgtcgatctgggcgcgggataccgccgtccagcagttcctcgctcgcctgaccctcgggcgcgacgagcagggactggaccaattccacgtcatcacagaccagggcggcagcgtcccggtcttcatcggcaacgtcgatcgcctggaaaagcgcatgacgcgcgcataccggcgaacgctgttcggttcgctgtccaacgtgtggctgttcgaccgccgctgcgtcaggcccgacaaggccaacgccagcgcactggcattgttgccacgcgacagtacccatcggcgtgatcgcctgtggatgctggtgcgggacacctgcccgttgccgctgctcgaccactggcgcgagaccgtgctggaactgctgcacacccagcagatgctggcccgccttccgttcgccctcgggccgctggaaggccatcggcttgccatcgacgtgccagcgctgacccaggcgctgggctccctgattcgcagtgacgtgctcaccgcctatccctatccggccaagatttggacgccggaaccggtagcggcttga

SEQ ID NO: 354706 - DNA, 342 bp, Pseudomonas aeruginosa
atgagtcagcaccacttcgagaccgttcacaaagggtttcccatcaccgtcattctcggctgggaccggtcgatgcattacttcttcctggtcatccgaaagcctgccgagttgattgataactccgcgaaagttttcgacgaggatttcctgtacagcaatctgtacgagaaagacccgttcggtcacagcctggactactaccgtgcagtcctgcgctatttcctgatcgacgtgcccgaaagcatgttcaccgaagttcagcaggactgcgcgggaaacgtcggcaatcgtgtcgtcaagcatgaggccaacggttcattcaccgagcagagcctctga

SEQ ID NO: 354707 - DNA, 3816 bp, Pseudomonas aeruginosa
gtgggaaagaaatcccgtgagaagaggctgcgtcgagaagctcgtgcactgggctcatctgatacgcatagcaatttgttggaactctggaacacggcccctcgtagggacgcagctgagaaggcattcgcacaacacgtttcctctgtgcaagcgatccttgagcgctatgagccgttcgacgtagcactggccataactgtgtcggatctgtggccggctaatgcggccagcccgatcaagcatctcctcgcctggaccatccttgccgggatggaacacgtgcctgcggactctcttcgcataactacctatgaggagttcaaggcattcactgaggccctcattgcagcgtatcctgaccttccgatgcttgaggactatgttcccgagatcgattggggagacgtccgagtgtcgctacagggcgaactcgtgcctatgttctacggcagttgcatagagcgtacccctgactttatagaagccttcagaattacccaggccagtaatgaacaggctcttgccgatatggatctggccattgcgatccaaagctatgttctgcgcagcatgccggaacttgcggatcgctctacggctgacgtgacgagcgggcacattgaagtgcctcccgcggagttttgggcctcttcccgtatagtgctcctcaatgctcaggctgaactcaaagactggcgcacaaactcaactggtcgcctcgacattccgatcggcacctataaggggccactaagccttgaggcgtttggcgatgcttgcatgcagggtatcgtgttgccatttgtaggtatggtgtttaacaaccgatggcttccgattggtatccgaagtgcaccaagcaatgtgattgatgtttgggctgatcaagaccgaaccaggcctataggccacgctacacactgggcgctggcgaggttcctacaagagaggtttcggcgcgtcgatcccggccctatgcaggtctgggttgaggatcgggagttcgatctcccaattagctgtgtcgtctcagacactaacctctggctatttgtctgctgctctcactccacagtcgatacagccggccaacaggcacatgaggtcctatcagcactacagccgggcaggaggtggggctttaagcgtgcccgcggcccacgcgcactcattacaaacgggcgcggggagatcccatccgctcaggacgtaagggtgctgctggttctcacaatggcgggtacggcattcggagctctagacgtgcccaagaggcccgtccgtctattaccgctagcagacctagtcaccatctttgacgctctcgaagatttcgatgaactggagcgattttggaagtacgtcgacgggcaagtgcgatctctgagtccgttttcaagaggggcggctgacctcttcgcgtctttccgggacacccacgaggtgctagttgatggggccttaatgcccacgtttatcgcgttagatccaagctggggcagtaactggcggtacaagaatctcgctgcattctgggctgatgccccacggtactttccagatggaaccactggatggcacctcgatagaaacgctagcggagtgatttggatgcgctcgcgtcatgacgactcccaggcatactcaatcgaggtggctggctgcactgtccagatcgtcatgagcctcgaccgctccttgaacttgctcgagaatcgaatgctcgacctgttcatccaggcactctcggactgcctgcaactatgccgagatctggtatttggactcgcgatatttgagcggcaacacgtcatcgttcggtgtgaagtggatcccgtgcaccgactcgatgagtccaatctgcccgataacgccacgccagcaaatcctatcgtcacgtcatgcaacaagagctcagacgtcccgctgacggtgcagcttcaggtgaatacggtggcagtgcaagccgggcttaacgaagcggcgacggccaagttcgagattgaaagccttgttgagacactgttggccattcatcgcgccctaggttgggcactagacgactctgttctcgcccaggttagggaaactgccaatcgaccggcccggtatcgtttgaccgtggttcaacagtctgttgattcattggagcacatcgagccgattgtcccgagaccaatggactataagcttgctcgtcagcatctggctcgcagcatgcacaaacttggcctcactcctggccgctacgagttgaaagaggcgaaggagcgcatcgatgcagggcgagagcatcttaatcaacatattgaaggcttgatctctgtatacgatccaaatgagctgacccaatgtttcattgagcaacatgatgcactgctaacccgcgagcgtttaaaagttacgagagttcggcagagcttagagcatgaagtcgactatgaccggcacgaggcgattgccgaagcacgaaaaaactatggcaccgtcgcccgccactatcgctatttgattgagaaggtgttgagtgcctcgcagagcgctgggcagcaatcggttaatgagaacctactgcgtgagcttgtcggacttgttgactggtacatggttctcgctggagctagcgacgtcctacataacggcgttgatgttggtggcgtcgagattgatgagtcctacataccacaggtcttctactccgctgatctaggcatacgcgaagctgcttttgagcatcaggccgcccggtcgacgctgggtataggcgttactgactctgatgcagtgcagggtgatctgagtgccggcctggagagtcctgagctacgccaagcattcctaaaggatgctggcttcgaactcaaacaccttctacaagccttgctcgtgctgtcgcaacccgtccgacatggtttagcgtctgagccagcgttatcgtatgccatgccgattccggttatccgtgagacgatttttcatagcattgagggaatatctgcagagggtagtacggcaatcgttcatttcctcaccctgtctgggcccgacattcgcaggcttccaggacgtgacatcaatgaaagcgacgtccccttttgggaacacagtaagcgtctgcatcgatacgcaattcggcctctcgtctctgatggtgagcaactttgttggggagctgagcaggcgagccgggccctaagcatctggatcaaatctgttgttgatggctatcttcctgctgacttcccttggcctggggtcgagcgagaggtgcgactgattaaggagcgcatcgaaaagcaactagaggttcgaacagaagaagttttccagcgattcacgcccttcgtcacgcgtggcacagacttcaagaaattcaaaggtgagggcttcgcggatgttggcgacttcgatgttttagcctactggccagccacaaatacgttggtagtagtggagtgcaagtacaaccagccaccgttcagtgtcaaagactccagacgactgcgggatcgtatttttggcaaagacgagacagatagaactggccagttcagtcgcatcgctcgccggcgcgctttcgttaaggagcaccgaggacgcatgcttgagctgctgaagtggccaccagctgaggttgacgagagccgcgatgtagagatgtatgtcagccgtgatctgcattggtggatggttcacccaccatacccagttcccacattcttcgttgccgtagactctctggatatctggctcaaggaccaagcttggttaggcatgagagatgccgaagctttaccggcattgatccggtaa

SEQ ID NO: 354708 - DNA, 330 bp, Pseudomonas aeruginosa
atgcgatatgtgcttaaccttgcagctccgatggcattcaccagcattggcgtactgatcatgactgtgctggcgtcgctcaccggaaagggtggaatgctccatgctgtgggagggatggccagggtggcattcccgtttgtcgcaatcgccaccctcacagtggctgcttggggcggctatcgctactaccggatattgcgttgggaacgcggggagagggatggcgattgccaccattgcggcggtgatacggctcagctcactgggcgctacggaccgtatgtgaagtgcaggatgtgcggtgggaagcgggaagggtggcgttga

SEQ ID NO: 354709 - DNA, 711 bp, Pseudomonas aeruginosa
atgaaatacagcgactggattgttttcgtcgatgaaagcggtgatcacagcctcgagtcaatcgacgaggcctacccaatcttcgctttgactttctgtgtaatccgcaaagaagagtacctgcagaatctgatcgtgaacctgaaacggctgaaattcgaccttttcgggcatgacaagatcgtttttcacgaagcagagatcatccgccgtaaaggtaatttctccaggatgaacaaggaaagccgcgaaatgcttatggagcggttatccggcatcgttcgggataccgactttcagattttcgcagtcgtcatcgataagaaaaaacacaaagcgaagtactcaaagccggcccacccctaccatttagccatgcagttcgggctagaacgcataagtggcttcttgagatcaaaagggcaagacctactgatcaccaacttcatatttgaagccagggggtcgaaggaggatgatgcgctggagctggaattcaggcgcgtgtgcgacggtgaaaacttccaaggcaaagtctatcccttcgatatcgtgatggccgacaagaagtcgaactgcgaagggcttcaaatagcagacctaactgctcgtcccataggcctctcggtgctcagaccagaccagcctaatagagcctacgcagtgctcacgacaaaaatgaatcggtggggcaaaaaggtatttccctga

SEQ ID NO: 354710 - DNA, 252 bp, Pseudomonas aeruginosa
atgatatcgaatagcacccctagcttcgcaccaggtatggcgatcctagtgcagcccgaaggtttcgagctgatcagcgggaagttctacgtcttcaagcacatcagcggagagaccaccttcaaacagtacatttacgacgcaggtaccgcgtacatcgccccgctcaaccccaccttcagaactgtggaaatggatgaagaatggacagcaatcggccgcgtggtggatgcaaagattcgggggctatag

SEQ ID NO: 354711 - DNA, 723 bp, Pseudomonas aeruginosa
atgcctgcggctctcgccggcaagaacccgaatggacctgaatacagtgaattcgagaactgcatcctcgagactttccggcagttcactgaccggatctccggacttgtggctcagtggaagcagatcaaggtagtcgcctggtatttcgcggatgcaagcctcgaacagctctccgccgtcggaaaagagcttctcggcgccgatatagtttcctggcggctcaagagacttgatgaagtgctccggaaaaaggtcatccttgagcatgctgtcttcggtatccggatcgatgaagatgttggcaaatggcgtagccgtatagccaacgtaggaagagcgccgcgaacagctcagcaattcacgtatccgagcgttgatgcgcgtggtaacacccggatcctttgcggtattgaccgatgcattgtccgcttcgtcatcgatcagcaacatcggcccctcgagttgcccgtcctgacgaagccctctcaaccagtcggcaagacgagccagaaccttctcgttcttcttggtaacaaacagtattggatcagcaaaattgccctctgtggcaccgacacttttcgccgttttcacactgaagtcagcactctgcgtagtcccacagaagggatgccttatctcccctccctccccctcaagccccttgagaacataggagaccggatatatttccgaaacaaaattgtctccgagggatga

SEQ ID NO: 354712 - DNA, 171 bp, Pseudomonas aeruginosa
gtggtgttgccttcctggaagaaattcaccttcagcgcccagaccaggctcccggcagacctgaccttccaggggctgcccgccgccggggtccgcatcaccaacctcgaaaccacgctcaaggacagccagttggactggactgtcacaggagaaatctatgcgaactga

SEQ ID NO: 354713 - DNA, 234 bp, Pseudomonas aeruginosa
atgcacgtcactggcgcgcagctcagtggccttacgaatgatcttgaccacgcgctcctgcatctgggtggcgcgctggccatcgctatcgaccaggccgtccatggcgacggcgcggtaaagctggtgaatggtctgcaggtcggtgaggttgagctggtatcggaagccacggcgatcgagacggtcgatgaacgacagaacgtgtatgtcgttctggtggctctccgatag

SEQ ID NO: 354714 - DNA, 534 bp, Pseudomonas aeruginosa
atgcgaactgagccgatcggcatggccgtggccgtgctcttcctcctcgcgtccggccaggcctgcgctggcaccgttggcgaacttgcggagatccaggcccaggccatcctcaccgaggccaaggtgcgcctggccacggcgcagcggcaattggaaggcaaaggcgaaaccggccaggtcgtcagcgcccaggggcagacattcgccatgccggtgccggcggcggcgccgacgatcacgcagccggttccgccagtggtgcggaccatctacggcgccggcggcaagatgactgccacgttcttgttcccgggcgggtacgaggttgacgccgccagcggcgcggagctgccgggcaactaccgcgtcgagtcaatctcgctggaccaggtcgtgctcaccgacaaggacggcaaccgcgtgcccgtgggcttctccagcgttgccccctcccaagcctcctctacggcccaaggcgcctcggttccgccggcgctgcccggggctgtaccgcagccgttcattcagtag

SEQ ID NO: 354715 - DNA, 165 bp, Pseudomonas aeruginosa
atggcaggggacgccgcaaggaagagcctaaagatgcaggacaaacgcgaaagggaagctaatagaggcgtgcgtaagtccatgaaggaatgcattaagcccgacaatgtcattgatgatgacgtaaaagagtgtatcagcgggctgcgcgaaaagagttggtaa

SEQ ID NO: 354716 - DNA, 1332 bp, Pseudomonas aeruginosa; identical to SEQ ID NO: 347702

SEQ ID NO: 354717 - DNA, 561 bp, Pseudomonas aeruginosa
ttggccgccggcgcgatttccggcgtcgtgcgctcgaagtcgggccggatcctggtcgtgaagggtgacacctacaaggacaaggcccgcaagaccgaattcaccgaagacgaagacggcaacatcaccgaggtgaggatcctcacagaccgtttcatcccgatcatccgggcatgggaaatgacaccctcctcggtcaatcagggccgcgtgctgaccatcagctcgtcggctgcgaccacggaagaggctgaagagccccaacctgagccggcccccgaaccgctgctgttcagccctggccaagtcgtaatgaccgctgccgtgagccacctggtggaaaccggtcaactcaacccagcgcctttgctgaaccgccatctggcgggagattgggggacgctggaccaggaagactggaacaccaaccagagagccctgaagttcggcgataggctgctgtcgtcctacgacatcgatgccggcggcgaatccaggctctggatcatcaccgaggcagaccgcagctcaaccacgcttttgctccctagcgactactga

SEQ ID NO: 354718 - DNA, 519 bp, Pseudomonas aeruginosa
gtgcatcacgaccattactatgatgaggcagggaagctaatcatcacccctcagaaaatcgataaacacatcgtgggcgccaaagagatcccgtctggcttcttcttccaaccaggcgcggaaaacataagtgcaatcatgttctcggcaagcggcaccatttcaaagttcaacaggatgggcaagcaagcgggctttggagaaagcaccgtaaggctgttccgtatgggcacttaccacgaccatgatcccgacgcttctatgccgaaaatgttcgcatatgaggtcgatgagagctgcggggaaacatgggccgaaggcatgagtatgttccataaccccaatgccttacatccggtaccggaggagctgtttccgtcgattgcgcatcactactttgaggatgaacagatcgtgagccatcttcctgatttccacgtctactcgtcgctgaccacgattgtgaacgtcgtgagcgatgaggaatgggagcgtagaaaacagagaaacaatagttga

SEQ ID NO: 354719 - DNA, 678 bp, Pseudomonas aeruginosa
atgaccagcttcctcaagtgggcgaaatggctgaaccaggacgaggtgagcgaggcagtcattcgccaggtgatatccccctccagccaggttaagggcaacgtctacagcgattatggcgggcaggtgggcggtaccgtctggaatggactttcgagaacagccggcacctttggcgtggccctggggagcctggcctacttcccggcgatggacatggtccgccaggcgctgccgatggtgatgtcgttcctgaagatggccatgatcatctgcattccgatggtcctggtcatcggcacctatcaactgaaagttgccatgacgatgacggtcgtattctttgcgatgatgttcgtcgacttttggttccaactggccagatatatcgatagcacgatacttgatgctttctatggttcggggtcaccgcatctttcgttcgatccagtcatggggctcaatacggcgactcaagatgcaatcttgaacttcgtgatgggctctatgttcttgattcttcctgcactctggatcactgccatcggctgggcaggtcttcagattggaacggtgctcagtgggctcgagacaggagttaaaagggtagatgcagccgcagcccaaggtggaggtctagctaaacaaggaattagttctttccagtcaaaagactaa

SEQ ID NO: 354720 - DNA, 660 bp, Pseudomonas aeruginosa
atgaccagcttcctcaagtgggcgaaatggttgaaccaggacgaggtgaccgaggctgtcattcgccaggtgatctcaccctccagccaggtcaagggtaacgtctacaccgattacggcgggcaggtgggcggcaccgtctggaacggcatcgcgagaaccgcaggaaccttcggcgttgccctgggcagcctggcctacttcccggcgatggatatggtccgccaggcgctgccgatggtgatgtcgttccttaagatggccatggtcatctgcattccgatggtcctggtcatcggcacttatcaactgaaagttgtcatgacgatgacggtcgtcttctttgcgatgatgttcgtcgacttctggtttcagttagccagatatatcgacagcacgatacttgatgccttctatggttcgggatcaccacatctttcattcaacccagtcatggggctgaatacggctactcaagatgcgatcttgaacttcgctatgggagcaatgtttattatcctgccacttctctggatcacagccataggctggtctggtgtacaggcaggacaagtcctccaaggcctttcccaaggcaccaaagacgtccagacagcgggtggagaagcggcaaataatgccaagcggcatatattctaa

SEQ ID NO: 354721 - DNA, 957 bp, Pseudomonas aeruginosa
gtgctccacgcgcgcgacgccgaactgggcgactcccaggccaccgagaacctgctggccgacctcaacgaaagctacaacgccaagaacaaggcctggggcttcttccagggcgagtccggggcctacccgttcagcggctggctcggtgaatacctggagggcgaccgcgacttcgtcggcttcagccgcgaagcggtcgagcacctgcagaagctgatggaggagtccaatctctccaccggcggccacgtcctgttcgcccactaccagcaaggcatgaccgactacctggcgatcgccctgctgcaccacagcgaaggcgtggcggtgaacgagtcgctggaggtctccccgtcgcggcacctcgacttcggccagctgtacctggccgcgcggatcaacatctccgagtggcgtaacaacaagcagtcgatgcagtacatctcgttcatcaagggcaagggcgggaagaaggtcaccgactacttccgcgatttcatcggctgccaggagggcatcgactcaccgggcgaaacccgcgccctgctcaaggccttcagcgacttcgtggagagcgagggcatggccgagcagcaggcccgcgagaaaaccgagacgctggtcgactacgccacctcgcaggcgcgcatcggcgagccgatgaccctcgacgcgctctcggaactgatggacgagcagcaaccgcgggcgttctacgactacatccgtaacaaggactacggcctgtcgccggaaatcccggcggacaagcgcaccctcaaccagttccgccgcttcaccggccgcgccgaaggcctgtcgatcagcttcgagtcgcacctgctgggctccaggatcgagtacgacgaggagcgcgacacgctgcagatcagcagccttcccactcaactccgcgaccagctcaagcggcgcaaggcccaaattggagaatga

SEQ ID NO: 354722 - DNA, 720 bp, Pseudomonas aeruginosa
gtgcgtgagggcgccgagtacaagtacgtcacccttggcgagcgcggcgagcagatcatcctggccacctacggagagctgttcagcatcactcgtcaggcgatcatcaacgacgacctgcagatgctctcggatatcccgttcaagctgggccaggctgccaaggccaccatcggcgacctggtctatgcggttctgaccggtaacccggcgatgagcgatggcaaggctctgttccatgccgaccacagcaacctgctcactggcgcggcttcggcgctttccatcgacagcctgagcaaggccaagacccagatggccacccagaaagcccaggtagagaagggcaaggggcgcaccctcaacatccgtccgggcttcgttctgactccggtggcactcgaggacaaggccaaccagatcatcaactccgagtccgtgccgggcgccgacgtcaatagcggcatcgtcaacccgattcgcgcattcgcgcaggtgatcggcgagccgcgcctggacgattcctcggcgaccgcctggtacatggctgccaagaaaggctctgacaccatcgaggtggcctacctggacggcgtcgatactccgtacctggagcaacaggaaggcttcactgtcgacggcgtggccagcaaggtccgcatcgacgccggcgtggcgccgctggacttccgtggcctgcagaaatccaacggcgcctga

SEQ ID NO: 354723 - DNA, 219 bp, Pseudomonas aeruginosa; identical to SEQ ID NO: 342243

SEQ ID NO: 354724 - DNA, 753 bp, Pseudomonas aeruginosa
atggctatcgagaaagagacgtacgtgatcggcggctggcttaaggcacgcgaggcagggactacagggcctttcaagaaggtaggtctggtatccaccattcagcagaccatcgagagcagtgagatcacgctacccgacaccaccactccgcagggcggcgagtacgactcggtatcgcgcatctcctcggtcggcctggggatcaacttccgcgaactgcatacctcgatgctggcggccctgatgtggggcgacgccaccaacgttccctctgccacccacaccgacgaagcgcacaccgccgttccgggaggcacgatcgcgctcgacttcatgccgctggagatcaccagcgtgaagagcgatgacggcaccactacctacgaagagttcgacgactggaacatgaccggggccggcctcgaaatcgttgaagggggcgcgatctctgcggccacaccgatcaaggtgacctacaagtccgccaccgtcgatgtgatcgaggcgctgaccaacagcggcaagacgttcgagttcctcttcgagggcgagaacgccgctggtacccagcggcgcatccaggcgcgctacttcctctgccgcttaaacccgtcgagccagcaggattggatcaacaccgaagacttcctggccgccgaggccactgccaaggtgctgatggacccaaccaaggtcggtgctggaaagtcgaagtacttcaacatcaagaaggaactggcgacggtgtga

SEQ ID NO: 354725 - DNA, 357 bp, Pseudomonas aeruginosa; identical to SEQ ID NO: 324377

SEQ ID NO: 354726 - DNA, 339 bp, Pseudomonas aeruginosa
ttgttcggcagcctgctcaatctttggctgttcgatcggcgcgcctcggcgcccgaccgaggcaatcacctcgccttcgcactcctgcagcgcgatgaggatccacaccaaaggctctggccgctggtgatggaaacctgtccgctccccctcctgcagcactggcgcgagccggtgatggaggtcctcacccagcaccagatgttgaccgccctgccagggacgatcggcaacgtctgcgcctggcgactcgccctgcgggtcgacgtgctcgagcccaccctcggtgagctgatccgcgaaagcattcttaccaccgatgctcaggcgcaagcctga

SEQ ID NO: 354727 - DNA, 1350 bp, Pseudomonas aeruginosa
atgagtctacatgccgcggcagtcggtccctccgtgcttccggaccttcgcgagcaggtcgagcagatcatcgccgaggcccgccgccagggcgccagtgcctgcgaagtggcggtgtcgctggagcagggcctgtccaccagcgtgcgccagggcgaggtggaaaccgtcgagttcaaccgtgaccaaggtttcggcatcaccctctacgcaggccagcgcaagggctcggcgagcacctcggcgaccggcgaggcggccatccgcgagacggtggcggcggcgctggcgatcgcccgccatacctccgaggacgaatgcgccggtctcgccgatgccgcgttgatggcccgcgagttgcccgagctggacctctatcatccatggagcctgagtcccgagcaggccgtggaacgtgccctggcttgcgaggcagcggcgttcgccgccgacaagcgggtgaccaaggccgacggcaccaccctgaatacccaccagggctgccgggtatacggtaacagccacggtttcatcggtggttacgccagcacccggcacagcctcagctgcgtgatgatcgccgagggcgaaggacagatgcagcgtgactattggtatgacgtcaaccgccgtggtgaggccttggccagcgccgagtcgatcggccggcgcgccgccgagcgcgccgccagccgactgggcgcgcggccggtgcagaccgccgaagtgccggtgctgttcgctccggaaatcgctgttggcctgttcggccatttcctcggggcgatctcaggcggcagcctgtatcgcaagtcatccttcctcgaaggcgcgctgggccagcgcctgtttcccgagtggctgagcatcgacgagcggccgcacctggtcggcgcgctcggcagcgccagcttcgatagcgacggcctggcgacctatgccaagccattcgtcgagaacggcgagctggtgtcctatgtcctgggcacctattccgggcgcaagctcggcctgccgagcacggccaacgccggcggcgtgcataacctgttcgtcagccatggcgacgaggaccaggccgctctcatacgcaggatggggcgtggcctgctggtcaccgagttgatggggcagggcgtcaacctggtgaccggcgattattcccgcggcgccgccggctactgggtcgagaacggcgagatccagttcccggtccaggaagtcaccatcgccgccaacctgcgcgacctgttccgccgtatcgtcgcggtcggcaaggacatcgaacggcgcggcaacctgcataccggttctgtactggtcgagtcgatgatggtggccgggcgctga

SEQ ID NO: 354728 - DNA, 525 bp, Pseudomonas aeruginosa; identical to SEQ ID NO: 342790

SEQ ID NO: 354729 - DNA, 1443 bp, Pseudomonas aeruginosa
atgagcgagttgttgtcatccgtcagccagcaattgctggcccccggtggtctagaactggacagcctgcccggcattcttcatgaactgaacggcccgggcatcgatgccgccgacctgtatttccagagccaggtctccgagtcgtggatgctcgaggacggcatcgtcaaggaaggcagcttcaatctcgaccagggtgtcggggtacgcgcgcagtcgggcgagaagaccggcttcgcctatagcaatgcgatcaccgccgaggcgttgaaacaggccgcggtggcggcccgttcgatttcccgtgcgggacagaacggcagtgtacaggcgttcaaggccgtggtgccggctcgcctgtacgccggcgagaacccgctggacgtgctcagccgtgccgagaaggtcgagttgctgaagcagatcgacgccgctacccgtgcgctcgatccccgcatccagcaggtcacggtgagcatggccggcgtctgggagcagatcctggtagcggccagcgacggttctctggccgccgacattcgtccgctggtgcgtttcaacgtcagcgtgatcgtcgaacagaacggccgacgcgaacgcggcggccacggcggcggcggtcgcaccgactatcgctatttcctccaggaggatcgtgccatgggctacgcccgcgaggccctgcgccaggcgctggtcaacctcgaggcgattcccgcgccggccggcaccctgccggtggtgatgggcgcgggatggtccggggtcctgctccacgaagcggtcggccacggcctggagggcgacttcaaccgcaagggcagctccgcctacagcggccgggtcggcgaaaaggtcgcctcgagcctgtgcaccatcgtcgacgacggcaccctggccgggcgtcgcggctcgctgagcgtggatgacgaaggcacgccgagcaactgcaacgtgctgatcgagaacggcgtgctcaagggctacatgcaggacaagctcaacgcccgcctgatgggcgtggcgcgcaccggtaacggccgccgcgagtcctacgcgcacctgccgatgccacgcatgaccaacacctacatgctggccggcgagagcgatccgcaggaaatcatcgcctcggtggagaagggtatctactgcgccaacctcggcggtggccaggtcgatatcaccagcggcaagttcgtgttctccaccagcgaggcctacctgatcgagaacggcaggatcaccaccccggtgaaaggcgccaccctgatcggcaacggtccggaagcgatgagccgggtgtccatggtcggcaacgacctggccctggacagtggcgtgggaacctgcgggaaggacggtcagtcggtgccggtcggcgtcggccagccgaccctgaagatcgatgcgatcaccgtcggcggcaccggcgcctga

SEQ ID NO: 354730 - DNA, 876 bp, Pseudomonas aeruginosa
atgaaccctccgcaaccacgcctcatcgataacggcaacggccatccgctggccagccattggtaccggcctgccggggagccgcgcggctatctcctgatcgtcccggcgatgggagtggaacagcgcttctacgcgcccttcgccgcctggctggcagagcgcggctacctggccatcaccttcgactacctgggcatggggcaatcgcgcaacggctcgctgcgcggtctcgaggtcgatgtgctgggctgggcccgtcatgactgcagcgccatgctcgccgccgcgctcgccgagagcgggagcaagcccctgtactggatcggccatagcctgggcggccagatcctgcccttcgtcgaagggcgcgagcgtatcgagagggtcttcagcatcgccagcggcagtggctactggaaggaaaacagcccgcggttgcgcaacaaggtctggttgttctggtacctcgtcgcgcccctgctgacgccgctgctcggctattttcccgggcgccgcctgggcatggtcggcgacctgccgcgcggggtgatcgaacaatggcgacgctggtgcctgcatccgcagtacgccctcgcggatggcgaggccatccgccgcgccttctccgccgtacgcacgcccatcgtgtcgctgtcgttcaccgacgatgaaatgatgtcccgacgcagcatcgagtcgctgctgggcttctaccgcgaagcgccgaaaaccgcctggcgcatcgctcccgaggaaatcggcgcccgccacatcggccatttcggcttcttccggccgcagttcgccgaatcgctctgggcgggctacctgttgccggagctgggctccggcaacgccctcagccgaggttga

SEQ ID NO: 354731 - DNA, 570 bp, Pseudomonas aeruginosa
gtgatcggtctgccgatccgggtgctctgcaccctgtggctgggcttgctgctggtcggttgcgcgggctcgccgaagaatccgccggccaccgagcaggtcgacctccagcgctaccagggcacctggtacgaactggcgcgcttgccgatgttcttccagcgcaactgcgcgcaatcggaggcgcattaccgcttgcaggaagaccagagcatccaggtgatcaatcgctgcctgaccctggatggcgactgggagcaggtggaggggcgggcagtcgcccagcagccgggtcgcaccgacaagttgtgggtgcgcttcgacaactggttcgccaatctcttccccaacgtggcgcgcggcgactattgggtgctggcggtggacgacgactaccgtaccgcgctggtgggcaatccgaaccgtgaatacctgtggctgctgtcgcgtaccccgcaggtttcgcagcagacccgcgagcgtctgctggaagaagcgcgcagccgcggttacgcggtggacgagctgatctggcgggtacccgacggccagttgaagcggagccagtga

SEQ ID NO: 354732 - DNA, 513 bp, Pseudomonas aeruginosa
atgcgcatggtcctggcagaccccggcgcgtgcgccgaaggcctcgatggcggtgctgtcgacgcgggtcgcccccggctggtagaggatatgctcgtgcagcgcatgcatcaggtcgagcaggccgccgcgatccttgcggccgcccatggcgcgttcggcaaaggcgcgcatctcggcatcggcgccggtcaggcgggtgctgcgcaggaacggcaacggcgactggcgatcgtgctccacctcgcgctcctcgtcgatctcgaccaggccgtgggcggcgatcaggaccgactcatgcggttcgtccagggtcaggacgtgcaggatgttgccgtacggatcgcgcagcggccgcgccgggcgcggcaggtccaggcgccaatcgaccacgtgctggcgctcgctgtcctgcggggtcaggcgcaggtactggatgctggcgcgcacccggtcttcgtagcgataggtggtgtcgtgggtgatcgagagtctcatgcggcctccaggtag

SEQ ID NO: 354733 - DNA, 1023 bp, Pseudomonas aeruginosa
atgacagagcagcaaccgattgccgtgctcggcggcggcagtttcggcaccgccatcgccaacctgctggccgagaacggccaggcggtccgccagtggatgcgcgacccggaacaggccgaggcgatccgcacacgacgcgagaacccgcgctacctgaaaggggtcaaggtgcatcccggagtcgacccggtcaccgacctggagcgcaccctggccgattgccaactgatcttcgtcgccttgccctccagcgccctgcgcaaggtgctgcaaccacaccaggcggcattgacggacaagctgctggtgagcctgaccaagggcatcgaggcgcacaccttcaagctgatgagtgagatcctcgaggaaatcgccccgcaagcccgcatcggggtgatttccggcccgaacctggcgcgcgagatcgcagagcacgagctgaccgccacggtggtcgccagcgaggacgacgagctgtgcgcccgcgtccaggcggccctgcacggccgcaccttccgcgtctacgccagccgcgaccgcttcggcgtggaactcggcggtgcgctgaagaacgtctacgcgatcatggccggcctggccgcggcgatggacatgggcgagaacacccgcagcatgctgattacccgggcgctggcggaaatgacccggttcgccgtcaagctcggtgccaacccgatgacctttctcggcctcgccggcgtcggcgacctgatcgtcacctgttcctcgccgaagagccgcaactaccaggtcggccacgcccttggcgaggggctcagcctggaggaggcggtatcgcgcatgggcgagaccgcggagggtgtgaacactctcaaggtactcaaggaaaagtccgacgagatgcaggtgtacatgccgctggtcgccggtctccatgcgatcctcttcgaaggccgcaccctggcgcaggtcatccagctgctgatgcgtggcgagccgaagaccgacgtcgatttcattcccaccaccggcttctga

SEQ ID NO: 354734 - DNA, 873 bp, Pseudomonas aeruginosa
gtgctggttcgagccttccttggccgccagttgccactccaggctctggttcggcgccaggctgtggctggcgttgaggttgaagcggctgagccggcggccgtcgcgcagggcgtgaccgtcgtggtcgtggtcgaagccgtcgtcttcctggccggacagcgacaggcggaagtcgctgtcttccagggcgatgctctggctggcgtaccagtggcggatgccgcgctggcctgcggtgtatttcaggcgcgtgccgggcgactcgccgggggcccgggtgatgatgttgatcacccccatcaatgcgttggcgccgtagctgacggtattcggaccgcggaacacttcgatccgctcgacatcctcgagggccagcggcaggtcgctccagtcgacgctggcgaggcccgggcggtacaccgagcgaccgtcgatcagcacctgcaggcgccgcgcccccgacatgctggtgccgtggtagttgaccgtgggctggttgccggacaggtagccgaccatcatgcccgggaccaggcgcatcagttcgggaatgtcgcgggcgccgctggcgacgatcagctcgcggtcgagcacgctgatgctgccgggaacttccgccggggattgtttcaggcgtgtcgcggtcaatacttcgggaacgccgctgggatcgttgaacaggtcggcggccgcgagcttgctgccgaacagcagggccagcagggtcagggagacgggagcacgcgaagcgatgggcacggaacgaccttgttctcgataggtattgtctggcccgggcatggtaaacgaggcgcgggcttttgccagcgccggcgtcaagactggtcggccggctggccgaccgtataa

SEQ ID NO: 354735 - DNA, 402 bp, Pseudomonas aeruginosa; identical to SEQ ID NO: 320946

SEQ ID NO: 354736 - DNA, 1761 bp, Pseudomonas aeruginosa
atgaacctgttgctggacgcctggccgcactggctgcgcccctactggctgctgctggcgccgctgcttggctggttgctgtggaagctgctgcatcgccagcgtcgtgccggacgctggcagttgctgttgccgacggccttccagccctggctgctggtcggcggcgccgggcggcagaaccgcatgccctggatctgcctcggcatcgcctggctgctggccctgttggccttgctcgggcccagttggcagcaactggaacagccctcgatgaagcgtagcgacccgctggtggcgatcctccagctgactcccgggatgcttgccggcgacctgtcgccgacccgcctggagcaggcccggcgcaagctgctcgacctgcttcgcacgcgcaacgacgcgcagaccgcgatcgtcgtctacgccggcagcgcgcataccctggtgccgctgtcggacgaccagctcaccgcgcgcaacctgctcgacgccctgaaaccttcgatcatgcccgagcccggccagcgcgccgacctcgccgtgcgccaggccctcgacctgctggaacagggcgcccagggccgcggccgcctgctgctgctgaccagcgagctgagcgaacccgagcgccagggcatccgcagcgccctcgagcaccgggcggcgcgcctcgccgtgctcggcgtcggcacgccgaagggcgctccggtgcagcaggaggatggcagcttcctcaaggacgaccagggcggcatcctcctgcccaggctcgacgaaagcgggctgcgccgcttcgccgcggagatcggcgccggctaccagcgcctgcggccgaacgaccgcgacctcgacagcctcggcctgctggcccgcggcggcacgctggaggaagatcgcgagaacgccctgctgcgcctgcagcgctgggccgaccagggttactggctgctcctgccgctgctcctgctggccgcctgtgccggacggcgcggctggctgttctgcctgccgctgttgatgctgagcctgccgcaaccggccatggccttccagttcgaagacctctggctgcgtccggaccagcaaggccagcgcctgttgcaacggggccaggcggacgaggcggcgaagcgcttcgaggacttccgctggaaaggcctgtcgctctaccaggcccgcgactacgccgccgcggcccaggccttcgcccagggcgaccaggccgacgatcactacaaccgtggcaacgccctggcccgccagggcgaactggaagccgccgtcgacgcctacgaacaagccctggagcgccagccgcaactggtcgccgcgcaacgcaacaaggccctggtcgaggaactgctgcgccaacgccaggaacaggcggcgcagcagcaggccggcgagaacaaggaacagcgccaggaagcgagccagcagagcccgccatccggaagcagccagcggccgccgcgcgacgcggcgaccgtcgatgcgcagaaggcccaggccgcggcgccctcgaccagcctgccggaagacgaaggcgagaagaccgccggagcacccggccaagcgcagccgcagcccaacgccgaggacgagcggacgggcgacgaggaagccgacgacggactcgacgacgaacgtcgccaggccctcgagcaatggctgcgacagattcccgacgatcccgccgaattgctgcggcgcaagttctggtaccaacagcagcaacgccaggaagccacgccatga

SEQ ID NO: 354737 - DNA, 1632 bp, Pseudomonas aeruginosa
atgatccgcctgttctgcagcctgcttctcgcgctcctctgcgtttccgcccatgccagcttcagcgccagcgtcgaccgcgcccgcctgaccgaaggggaaagcgtcgaactgacgctggaatcggacgacccgaccctcttcggcaaacccgacctgagcccgctggacgccctcttcgaggtcctcggcacgcgccaggtcaaccgtctcgccacgcagaacggccgggcccaggccaccacccgctggatcgtcaccctcctgccgaagcagagcggctacgtggcgatcccgccgatcagcctcggcgccagcagcacccagccgatcaggctgcacgtactggaggcgcgcgaccgcgccaagagcagcaagctggcgccggtcttcatcgatgccagcgtcgaccaggagacagtctacgtgcaggcccaggcgatcctcaccctgcgcatctaccactcggtgtcgctatacgacgacagcagcctgaccccgctggcgatgaacgacgcgaaggtcgaacagctcggcgaggcgcgcacctacgagaaggagatcaacggcatccgccacggcgtgatcgaggtgcgctacgcgatcttcccgcagaagagcggcaccctggagattcctgcgcaagccttcagtgcgaccctggtcgaccgtggcagcgacgactacaaccccttcggcccgcgccccggccggcagatgcgggtgacttcgccgagcatcccgctgcaggtccggcccaagcccgccgactatccggccgacgcgccctggatgccggcccgcgcgctgagcatcagcgaaagctggagcccgcagccggagcaggcacaggtcggcgaatcgctgacgcgcaacgtgctgctgaaggtcgaggggctttccggcacccagcttccgccgttgccgctgcccgacgtgcaaggcctgcggcgctacccggaccaaccgcagctggccgaccagagcaccgaccagggcctcatcggcagtcgcgaggagcgcgaggcgctggtgcccgagcaggccgggcgcatcgagttgccggcgctcgaagtggtctggtggaacacccgcgaagaccgcctggagcgcaccagcctgccaccgcgcaccctggaagtggccgccgcgccgcaggccgaggcggagccgccggcggcggcgctgccgctcggcgaacgcctggagccgacgctctggccctggcaactggctaccgccgtgctggccctgaccaccctgctcggcttcggcctctggtggcgcgcccgccagctgccggcggtgatccgcgccgcggccaacggcccgagcagccgcagcctgctcgacgagctgcgccgcgcctgcctggccaacgatccccaggcgacccgccaggccctggacgcctgggcccgtcagcaacccgataccctggccgacatggcggcccgcttcgtaccgctgtccgacgccctggatggcctcaacggcgcgctgtacagcgagagcggccattcctggcagggcgaggacctgtggcgggcgatccgcgccctgcccaccacggaacaagcgccggcgggagcggtcgacaatggcggcctgccaccgctctatccgcgctga

SEQ ID NO: 354738 - DNA, 1080 bp, Pseudomonas aeruginosa
atgcgcttccgtaccctgtacctcgtcctgtgcggcctgctcctgggccacgccgcgacggccgccgaaccgccgaccgcgcccacgccgccgacgcagccggccgaagggccgggcggcgcggcctatcgccatgccagcgtgcatcagtggcacttcggcgaaggcgctcgcgaatactgggtgttcacccccgagcaaccggtccccggcaacgctccgctggtgatcttcctgcacggctggagcgtgatgcagccggacctctaccgcgcctggatcgaccatatcgtccgccgcggcatggtggtggtctacccgcgctaccagccggacctgaagacgcccaacgcagacttcctcgacaatgccgccggcgccctcggcgacgccctcaggcgcctgcaggccggcgagctgggggtgcgcccgcggctgaaccaggtcgcctacctcggccactccgccggcggactgctcgccgccaacctggcggccgccagcgaacgcctgaagctgccggcggcgaaggcgctgatggtggtcgagcccggcaagagccagggcaagcgctgggacggcgtggcccaggaacgcctgtcggggctggccaagggcaccctgctgctggcggtctgcggcgacgaggacagccacgtggcctgcaccgacgccaagcgcatctaccgccagagccggcacattccgcccagcgacaagaacctgctgctgctgcgcagcgatcgccacggcgctccgccgctgctggccaaccacgcggcacccaccgcgccggtattcggcccgcagtatccgaaggaagaagacagcgactggttgctcgaccgcgtcgagaagcgcctcgaagtccagcaggccgaaggccgctataccggccacgacccgctggtgatcgacgccctcgactggtacggcacctggaagctgttcgatggcctcaccgacgcggcgttctacaaccgcaaccgccagtacgccctgggcgctacgccggagcagaccggcatgggccagtggagcgacggcaccccggtgaagccgatcaaggtgctcaagtag

SEQ ID NO: 354739 - DNA, 468 bp, Pseudomonas aeruginosa; identical to SEQ ID NO: 321819

SEQ ID NO: 354740 - DNA, 795 bp, Pseudomonas aeruginosa
atgctcgtcgcgctccaccagccgcgtctcgcccttgcgtccggcacgcacctccaccggaaggatctcgccgaggaaaaagccctcctccagcgcagcctggtagcgcgcctgggaagaagcggcgaaacggtcggcgtcttcgcgggcgatgccgaaggcgcgggccacgttgtcgccggtctccggcatgctgtcgttgccatagcgctcgaccagcctggggttggcgaagcgcgcgccgatggtgctgtcgaagacctccagcgtgcggctgaaggcgctctccgccttgcccatgacgaacggcgcccgggacatgctttcggcgccgccggccaggtacagccgaccctcgccgcaactgatcgcgcgcgccgcgtcgatcaccgccgacagtccgctggcacacaagcggttgaccgtctgcccgggcagccgcgccggcaggccggctgcgagcagcgcgttgcgcgccaggttgcggctgtcttcgccggcctggttggtgcaaccgaggatcacatcctccaggtcgtcgacggcgaacccggaggtttccgcgagacgcgccagcagcaggccggccaggtcgtccggacgcaccgtcgagagtgcaccggcatgccggccgaaaggcgtacgcaggccggcgtagatataggcatcgagcatggtgtgtttctccgccaagggatcaggaggccaacgggctgtccggctggcgcagggaaaggcccagttgggcgcgccggcgcagccagggactggggcgatagcgcgggtcgccgctga

SEQ ID NO: 354741 - DNA, 771 bp, Pseudomonas aeruginosa
atgcttgcggtactgggcgaggacctcgccaagaatgtcgatgacgtagccagccttggtcaccgccagttcgatatagacatcttccaggcgtatgtccggatcgaaaccgccgaccttctccagggcttcccgccggaacatcagggtgggcgccatcgggcccggcttgcggtccaggaacaggtcatcgaagtcgagacggcggaaaggcaggtcgcgtttgcgctgctcctttcccggcatgacccggccattggaatcgatgatctcgatattgcccgcgcagatacctacctcgggcttgtcccacatgtgtgccacctgtttctccaggcgttgcggcaacatgatgtcgtccgacccgaaaggcacgatgagatttccccgggccctggcgatcgcctcgttgagcgttttcgacagtccctggttctgctggaccctgaggtcgaagccgtacttcgcctggagcccgcgcaaaagctcgacgctgccatcgctggaaccatcgtccaccaccagcagttccacgttgcggtatgtctgcgcagccacgctggcgatgctcgcttctatgtacttttcgtggttataggaagcgatgatcacggaaaccaatggctgcgaaccatcatcgacgagcgccataactacaaccttacctgtccttcacgtccccattcaaagcgccagacatgcatgagcgatcctgcgatcttcatcggtcctacacctccccccagcccggaaaaacaagctgaacaatag

SEQ ID NO: 354742 - DNA, 375 bp, Pseudomonas aeruginosa
atggaggtaggcttgcagcgcgccggtattgatcacgcccagtggccggtcgccgcccaacaggcgcgccgagcgcggcgtctcgcgtgcgccggtggccagcagcacgcgtgtcgcgcgcagactgcgcgggccttcgggggtggccagttgcagcaggccggcggcggcgagagcaaccacgctatggcgcaggcggatatccaccccggcccgttcggcctgttcgacgttacgctgtgcataggccgggccggtcaacaggcggccgtgttcgcgcaggccgaacggcggatgcgcgcaatgccggggtataccgccggcctcgccgtcgcgctccagcacgcagacccgggcgacgccctggcggcgtag

SEQ ID NO: 354743 - DNA, 981 bp, Pseudomonas aeruginosa
atggagcaccggcaggccataacggctgtaggcccagaacagcccctgcgcatagagcacaagaatggcgaagaaccagcgggcaccgcgcgaatacttgagcaacgcgccgaagccgacgcccaggaccgccaccatctccgccagcgccaccatcgcccctgccggccagtgccgccccagtgccaacgccgcagcgagcgccactaccacccccagggtccagtaccaggcgcgcggacgtaccagcagcgccaccccgccgagagcgccgagcaggaatgcgatagccagggtctgccgtaccgcgccgggctccagcgggtcgcgcggcggcggcggcaacgcctcgccgtcgatcagtcgtaccaggcgctgcgccgccgcttccaggccgccggcgtagtcttgctgacggaacgcaggggtcatgtattcgcggatgatccgcccggcatcgatgtcggtgatcgttccttccaggccataaccgacttcgatgcgcatgcgccggtcgtccttcgccaccagcaccaggacgccgtcatcgatccccttgcgccccagcttccacgcctcgaagacccgcgtcgcataggcctcgatgctgtccggataggtgctgggcaccatcaggatcgctacctgggcacccttccgggcctccagcgcggccagcgaagcttccaggcgggcacgcccggcggcgtcgagggtcgcggtaaggtcggtcacccgccgcgccagcgctggaacctccgcggactcgtagcccgcatcgcgcgctgcctcggcctcggcgccgaccgccgatgcctccacggcctcctcctcgacatcggacgctgccaccgcgacggtgaccggcaccgtcgcggtggcaacggagggaatcgcggcggcgcagagcagcatgccgaacagccgaagcatggcgagataacgcgtgattgcagacatccttgtctccgaatgaaatga

SEQ ID NO: 354744 - DNA, 324 bp, Pseudomonas aeruginosa; identical to SEQ ID NO: 318235

SEQ ID NO: 354745 - DNA, 999 bp, Pseudomonas aeruginosa; identical to SEQ ID NO: 318236

SEQ ID NO: 354746 - DNA, 285 bp, Pseudomonas aeruginosa
gtggtccgcagccatcccgaattcagcggcgcgctggtggtcgacgcgatcatctacaaccgcgccagcttctcgcagccgttcccgctgctggaactgcgcttcgccgacctcaacggccacctcatcgccaatcgccgcttcaagcccggcgagtacctcggcggcgagctggccggacgaacggaaatgccaccgcaggtaccgatccacgtgtcgctggacatcctcgacccgggtccgaaggcggtgaactacagcctgagcttccattccccggagtga

SEQ ID NO: 354747 - DNA, 1008 bp, Pseudomonas aeruginosa
gtgatcgaattccacgacgtccacaagacctatcgagttgccggtcgggaaatccccgccttgcaaccgacccgcctgaacatccaggccgggcagattttcggcctgatcggccattccggtgccggcaagagcaccctgctgcgcctgatcaaccgcctcgaggagcccagcggcggccgcatcctggtcgagggcgaagacgtcaccgccctcgacgccgaaggcctgcgccgtttccgccagcgcgtcgggatgatcttccagcacttcaacctgctgtcctcgaagaccgtcgccgacaacatcgccatgcccctgcgcctggccggcggcttcagccgtgccgaagtcgatgcgcgggtctccgagctgctcgcgcgggtcggcctgtccgaccacgcgcgcaagtatccggcccagctctccggcggacagaaacagcgcgtcggcatcgctcgcgccctggcctgccggccgagcatcctgctctgcgacgaggccaccagcgccctcgatccgcagaccaccgcctcggtcctgcaactgctggcggaaatcaatcgcgagctgaagctgaccatcgtcctcatcacccacgagatggacgtgatccgccgtgtctgcgaccaggtcgcggtcatggacggcggcgccatcgtcgagcagggcgatgtcgccgatgtcttcctccatccgcagcacccgaccacccgccgcttcgtgttcgaggccgaacgggtcgacgaggacgagcgccacgacgatttcgcccacgtgccgggtctcatcctgcgcctgaccttccgcggcgaagccacctatgcgccgctgctgggcaccgtggcgcggcagaccggggtcgactacagcatcctttccggacgcatcgaccgcatcaaggacacgccctacggccagctgaccctggccctggtcggcggtgacctggaagccgccatgagccagttgaacgccgctgacgtacatgtggaggtactgcgctga

SEQ ID NO: 354748 - DNA, 678 bp, Pseudomonas aeruginosa
atggacttcttcgaaaccatgagcttcgccaacatcgactggtacgaaatctggctggccagcgtcgacaccttctggatgctcggcggttcgctgctgttcacagtggtcctcggcctgcccctcggcgtcctgctgttccttaccgggccacggcagatgttcgagcagaaggcggtctacaccctgctctcgctagtggtgaacatcctccgttcgttgccgttcatcatcctgctgatcgtgatgatcccgctgaccgtactgatcaccggtacctcgctgggcgtcgccggggccatcccgccgctggtggtgggcgccacgccgttcttcgcgcgcctggtggaaaccgcgctgcgcgaggtcgacaagggcatcatcgaggcaacccaggcgatgggcgccagcacccggcagatcatctggaacgccctgctgccggaagcccggccgggcatcatcgccgccatcaccgtcaccgccatcaccctggtctcgtacaccgcgatggccggagtggtcggcgccggcgggctgggcgacctggcgatccgcttcggctatcagcgcttccagaccgacgtgatggtggtcaccgtggtgatgctgctgatcctcgtccagattctgcaaaccgtgggcgacaagctggtggtgcacttctcgcgcaagtaa

SEQ ID NO: 354749 - DNA, 783 bp, Pseudomonas aeruginosa
atgaaaaaactgcttgctgctttctccgctgtcgcggcgctcggcctcaccgccgcccaggccgccgagtccctcaccgtcgcggccaccccggtgccgcacgcggagatcctcaacgtggtcaagccgctgctggccaaggaaggcgtggacctgaagatcaaggagttcaccgactacgtgcagccgaacgtgcaggtctcggaaaagcgcctggacgccaacttcttccagcaccagccgtacctcgatgagttcaacaaggccaagggcaccgacctggtcgccgtgaccggcgtacacatcgagccgctgggcgcctactcgagcaagtacaagaagctcgacgaactgccttccggcgctaccgtggtgatccccaacgacgccaccaacggcggccgcgccctgctcctgctggacaaggccggggtgatcaagctcaaggacaacaagagcatcaccgccacgccgaaggacatcgtcgacaatccgaagaacatcaagatccgcgaactggaagccgcgaccctgccgcgcgtgctgacccaggtcgacatggcgctgatcaataccaactacgccctggaagccaagctgaacccgaccaaggatgcgctggccatcgaaggcagcgactcgccctacgtgaacatcctcgtcgcgcggccggacaacaaggacagcgacgccatgcagaagctggccaaggccctgcacagcgccgagatcaagcagttcatccaggagaagtacaaaggcgcggtggtaccggcgttctga

SEQ ID NO: 354750 - DNA, 519 bp, Pseudomonas aeruginosa
atgccacgctgcttctggtgcaacgacgatcctctctacatggcctaccacgacgaggagtggggtgtgccgcagcgcgatcccgacgcgctgttcgaacttctgctgctggagggcttccaggccgggttgtcctggatcaccgtgctgaagaagcgcgagcgctaccgcgaggtgctgttcggcttcgacgtgcagcgggtggcacaaatgagcgacgctgagatcgacgaactgatgctcgaccccggcatcattcgcaatcgggccaagctcaacgctgcgcggcagaacgcccaggcctggctggagctggacgacccggctgggttcctctggtccttcgtcggcggccagccgaagatcaaccatttcgctggtcgtgccgaggtgccggcgattaccccggaagccgaggccatgagcaaggcgctgcgcaaggccggcttcaacttcgtcgggccgaccatctgctacgccttcatgcaggccagcggcatggtcatggaccatacctag

SEQ ID NO: 354751 - DNA, 726 bp, Pseudomonas aeruginosa
atgaacaacaagaccctatgcccttcgctcttgctctgcctttcgctgcttgcaccgctgtcttgtctcggggagaccgccgccgcgccctatccgctggcccacccaccgcgcctggccgactacctcccgccgccgccggcggcggactcggctgcggccgtcgccgatctcggcgcggtgctggaggcgcaacgcctgcgcacgcccgaacaggtacgccgggtacgcgcccacgaccagtgggaggacaacgtctttcccttcgccggcgacctgctgggcgcctcgttcgacaaggaacgcctgccgctgacccggagtttcttcaaccgcgcccaggaaaacctggtcgaggtgctgatgccggcgaagaagcacttcgcccgcccgcgtccctacgaagtgacaccgaaggtgaagccggtgctgccgccgccggagggggagtcctatcccagcggccacaccatggacagctacttcaaggcctcgctgctgagcatgctggtgccggagcatcacgatgcgttcttcgcccgcgccgaggagcatgcgcagagccgtgtgctggccggcgtgcacttccccagcgacctggaaggcgggcagaccgccgccgcggcgctggtggcgagcctgctggccgatccggcggtggccgccgacttcgccgcggtgcgcgaggagctgcgcggcgcgctggggttgccgaaactccagtag

SEQ ID NO: 354752 - DNA, 918 bp, Pseudomonas aeruginosa
atggatctgcgccaactgcgttacttcatcgccctcgccgaacaccgcagtttcgtccgcgcggcggacgccatgggcatcacccagccggccttcagccgcagcatccagggcctggagcaggagcttggctgtcagttggtggaccgtggcagcaaggacctgcgcccgacgccggaaggccaggtggtgctgcaacacgcgctgagcctggtgcaggggtcggccaacctgatccacgagatcgcccagttgaacaagctggatgccggcgagctgcgcttcggcagcgggccggcgccggcccagcaactggtgccggacgcggtggccgacttcatcaaccgccacccgcgggtgcagatcagcctggacgtggacaactgggaaaagctcagccgcgccctgctccgcgaagagatcgaattcttcgtcgccgacatccgcgacttcgaggccgacccgaacttccagacgcgcccgctgaccccgcgccgcggccagttcttctgccgtccgcaacatccgctgctgggcaaggacagcctgtccaccaacgacctgttcaactacccgctggcctcgaccctgattcccccgggcatccgcaagctgctggcgaacctcagcggcaagatcgacttcgccgccaacatccgctgcgagaacatgcacgcattgatccgtatcgtccgccagaccgacgccatcggcatcgccagcgacgagaccctgcgcccctacctgcagcgcggcgaactgcaaccgctacagtggcgcaacctgccgcagaacctggatagcctcagcgcccgctgcggcatcatcagccgcagcggctaccggctttcggcagcggccaaggcgatgatcgagacgctggtggaactggaccaggcgcaacacgcggcggcctga

SEQ ID NO: 354753 - DNA, 2373 bp, Pseudomonas aeruginosa
atgaagcaccactaccgcctgccgctccgccgaacgccgcccggcggctccgactacgccctggccctgctgctcgccctcggcggtgcgttgccggccagtgccgccgatgctcccgcgcccgccgaggaagcgccgccgctggccagcagcgtcccggacaaggccgatacggccctgggcaaggtcactgtcaccgcgcgtcgccgcgaggaggattcgcagaaggtaccgacgccgatcaccgtgctcggcggcgagactctcgaggcccagcgcatctcccgggtgcaggacctgcagcaggtgctgcccagcgtcaatgtcgcctacatccatgcgcggcagtcgagcgtcgccgtgcgcggcatcggcaacaaccccgccagcgacggcctggaaggcagcgccgggatctacctcgacaacgtctacctgggacgtccgggaatggccgtgttcgacctgctggacatcgagcaactggagctgctgcgcggtccgcagggcaccctgttcggcaagaacaccaccgccggggtgctgaacatcagcacccgcgcgccgaccttcactgccgagcgtaccgtcgaggtctccggcgggcaggatggctacttccagggccgcggcacggtttccgggccgctcggcgaaaccctcgccggacgcctctcggcctatcgcacccgcgacgacggctacatcaagaacatccacgacgacaactatctcaacggcggcgagcgccagggcgcgcgcgggcaattgctgttcgagccgaacgaggacttcagcctgcgctggatcgccgactacaacgaggaggattcgagcaacggcagcatggtggtctacggcgccgccgagcgtttctggcagcgcgccgcgctggtcggcgcttcgccgttgcgcgatccgcagcgcaagaaggtcaacatcaacggccgccagcacgtcagcgtgcaccagggcggcagctcgctggaggccaactggaacctcgccggcggctaccgcctgacctccatcagcgcctaccgctactggcacttcaccccggccaacgacgagcaactgaacgtctcggcgatcaacgacaccggggtggaagtgcacgaccggcagttctcccaggagatccgcctggcctcgcccaccggcggtgccttcgactacgtggtgggcgcctacgcgttcaggcagaacctcggcaacaagaccttcacctcctacggaccgttggccgacctgtacctgctcggcgccaatctcggcgcgctgaacgacacctactcgaaggccaacggcaagatcgagaccgacagcttcgcgctgttcgcccagggcacctggcacctcaccgaacgcctggacttcaccgccggcctgcgcggtacctacgaggagaagaacgccaaggtcgagcgcttcgctccgctgggcggcgcggcggtcggcggggtcggcgcggcggtgcgcaacggccagctcggcgcctacgattccggcgatctcagccagtacaacttcgccccttcggcgttgctcagcctcagctaccagttcagcgacgacctgctcggctacgccagcctgtcccacggcgagaagtccggcggggtcaacctggcggtgggcagcgcaccgagcgccggcgccgattcgctgctggtcggaccggagcgcgccaacgacgccgagctgggcctgaagagcacgctcttcgaccggcgcctgctgctcaacgccaacctgttctggaccggcatccacggctaccaggccaccaccctgtaccaggcgccgggctcgacccagttggtgcaggtgctggccaacgccggcagcgtgcgctcgcgtggtctggagttcgaggccaccgcgctgccgttgcgcggcctgaccctgaacttcaacggctcctacaacgacgtcacctacctgtcgttcaaggatgccccgtgccctgcggaagtcagcacccggcccggcgcgccgagcagttgcgacctcaccgggcagcgcgtggtcggcgcctcgaaatggatcgccaatctcaatggcgaataccagtggcgcctcgacgaccgcttccaaccctacgtcagcgccagctacgcctaccgctccgccgccgagggcacgctggacaactccgacctttcgaagatcgacggctacgccctggtgaacctcgccgccggtctgcgcagcgatctcggcgacggccaactggacacctcggtatggctgaagaacgccttcgacaaggactactacctgagcgccttcgccagcatcaacggctcctacaccgcatcggtggggcagccgcgcacgctcggcgtatcgctgcgctacgacttctga

SEQ ID NO: 354754 - DNA, 1119 bp, Pseudomonas aeruginosa
gtgcagatcggtgtccccctcgagacccatgccggtgagacgcgggtttccgccaccccggaaaccgtcaagaagctgatcggccaaggccaccaggtgatcgtccagagcggcgccggcgtcaacgccagccagccggacagtgcctatgaagccgccggcgcgacgatcggcagcgccgccgaggccttcggcgccgacctggtgctgaaggtggtcgcgcccagcgccgccgagctggcccagatgaaaagcggcgccgtgctggtcggcatgctcaaccccttcgacaacgagaacatcgcccgcatggccgagcgcggcatcaccgccttcgccctcgaggccgcgccgcgtacctcgcgggcgcagagcctggacgtgctctcctcgcaggccaacatcgccggctacaaggcggtgatgctcgccgccaaccactacccgcgcttcatgccgatgctgatgaccgccgccggtaccgtgaaggccgcccgcgtgctgatcctcggcgccggcgtcgccggcctgcaggcgatcgccacggccaagcgcctgggcgcggtgatcgaggcttccgacgtgcgtccggcggtgaaggagcagatcgagtcgctcggcgccaagttcgtcgacgtgccctacgagaccgacgaagagcgcgagtgcgccgaaggcgtcggcggctacgcgcggccgatgccggcctcgtggatggagcgccaggccaaggccgtgcacgagcgcgccaagcagtcggacatcgtcatcaccaccgcgctgatccccggccgcaaggcgccgacgctgctgcacgaggcgaccgtggcggagatgaagccgggctcggtggtcatcgacctggccgccgcccagggcggcaactgcccgctgaccgaggccgaccaggtcgtggtccggcacggcgtgaccatcgtcggccacagcaacctggccgcgctggtaccggcggacgcctcggcgctatacgcgcgcaacatcctcgacttcctcaagctcaccctgaacgccgaaggcttcagcgtgaacctcgaggacgacatcgtcgccgcctgcctgatgtgccgcgacggccaggcggtgcgcaagaacggctga

SEQ ID NO: 354755 - DNA, 255 bp, Pseudomonas aeruginosa
atgccacgacacccgcacaccaccctgctcctctgcctttgcctgaccctgcccggttgcgagagcggccgcagctacagcctttccgaaggcgcgcctgtcacaggcatccgcatccagcgcgacgaccgctcgccgttgcagcgcctgcgggactgcgaacgccagggttgcagcaagcggcagaagatcgacccgttcacccccgatcctgactacctgcgcgcggaaggccacttcccgctgccctggtaa

SEQ ID NO: 354756 - DNA, 477 bp, Pseudomonas aeruginosa
gtgaccgggccaatgaccgagacgaacgcactggggctgccccaaggcccgctgtacctgatgacggagatcgtccgccagcgcgaacggcaactcaccgccctgcttgcccctctcgaactggggctgcatgaatggcgtgcgttgcggatcatccacgccttcgacggtgacgtgccgatgagcgtgctcatcgagcactcgcagaccgaccgcactgcgctgggccggaccatcgaacggctggtgcggcgcggctgggtcagccgcctgccggatccggacgacgggcgcgccgtgctggtgcgccgcagccccgcggcacaggcggtgttcgagcaggccctggcacaggtcgcagggctcgacgaaaggctgctggcgggtctcggcgccggcccggaagaagaggcgctgaccctcgtcctgggcaagttgctgcgggccttcgacgggctttcccgcgtgacgcaatag

SEQ ID NO: 354757 - DNA, 1428 bp, Pseudomonas aeruginosa
gtggacgtgcacaccgaggtcgacgccaacctggagatcggcgccatcacccgccgggtctacgaacgccgcgcacccgccccgctgttccacaacatccgcgacagcctgcccggcgcgcgggtactgggcgcgccggccggcctgcgcgccgacagggcccgcgcccattcgcgcctggcgctgcatttcggcctgccggaacacagcaggccgcgggacatcgtggccatgctgcgcgccgcgatgcgcgcggaaccgatcgcgccgcgccggctggagcgcgggccggtgcaggaaaacgtctggctcggcgagcaggtggacctgacccgcttcccggttcccttgctccatgagcaggacggcgggcgctatttcggcacctacggtttccacgtggtacagacgccggacggcagttgggacagttggtcggtgggccggctgatgctggtggaccgcaacaccctggcgggtccgaccattcccacccagcacatcggcatcatccgcgagcagtggcgccgccagggcaagccaacgccctgggcgatggccctcggcgcaccgccagcggcactcgcggcggccggcatgccgttgccggagggggtcagcgaagccggctacgtaggcgccctggtcggcgagccggtggaggtggtgcgcacgcagaccaacggcctgtgggttccggccaatgccgagatcgtcctggagggcgagatcagcctcgacgaaaccgcgctggaaggcccgatgggcgaataccacggctattccttccccaccggcaagccgcagccgctgttccacgtccatgcgctgagcttccgcgaccagccggtcctgccgatctgcgtcgccggcacgccaccggaggaaaaccacaccatctggggcaccatgatttccgcgcaactgctggacgtggcgcagaacgccggactgccggtggacatggtctggtgctcctacgaggcggcgacctgctgggccgtgctgtcgatcgacgtacagcgcctggcggctctgggcaccgacgccgcggccttcgccgcacgggtcgccgagaccgtcttcggctcgcatgccggacacctggtgccgaagctgatcctggtcggcaacgacatcgacgtcaccgagatcgaccaggtggtatgggcgctggcgacccgcgcgcatccgctgcacgaccatttcgccttcccgaagatccgtgacttcccgatggttccctacctcgatgccgaggacaaggcacgaggcagcggcggtcggctggtgatcaactgcctgtacccggaacagttcgccgggcaaatgcgtgccgctacggcgtcgttccgccacgcctatccgacggcgctgcgcaggcgagtcgaagaacgctggagcgactacggattcggcgacgcctga

SEQ ID NO: 354758 - DNA, 594 bp, Pseudomonas aeruginosa
atgcatttgctgttcagcgtctacctgaagatgctggtgctctatagccccttcttcgtgctgtcctgcttcatcagcctcagccgcggcttcggcccgcgcgaccgcaagcgcatggcctggcgggtggccctggcggcgctgatcgccagcgtcgcgctgtacctgttcggccgctacatcttcatcctcttcggtatcaccgccgacgccttccgcatcggcgccggcagcgtgctgttcatctccgcgctgggcatggcccagggccgcgcggcggtgcagagcgacaacgtgcagcaggacgtgaccatcgtcccgctgaccattcctctcaccgtcggccccggcaccatcggcgcgctgctggtgatgggcgtcggccagggctgggaggccaagctgatctccctggtggcgatcttcctcgcctgcctgaccctcggcaccacgctctatctttccgaccgcatcgaacgcctgcttggcgaccaggggctacagatcgtcagtcgcctgatgggcctgttcgtctgcgcactggcggcgcagatcatcgtcaccggcctgaagggttcgctgttcccaggctga

SEQ ID NO: 354759 - DNA, 2619 bp, Pseudomonas aeruginosa
atgacctatcgccatgaacgccgctgccgcaccggcacggccctgatggcgggcggcatggcgctggcggcgagcgccttcggtcatgcccagcccggctacgaattcgatgatcgcctgttgctcggctcttccctgggcggcggcgacctgtcgcgcttcaaccaggacggtcggatcgatccgggtcgctatcacgtcgatgtctacctcaacgagcgcttcgccagccgcagcgaagtgagtttccgcgccaaccccgccagcggcgcggtggagccctgcctcgacgaagacttcctgcgccagcgcctcggcgccaagcctggcgaaaagccgcgcaagagcgacgaaggtgcccactgcgcctttctcgacacgcgcctgcccggctcgcggttcagtctggacgtcgcccgcctgcgcctggatctctcggtgccgcaagccttgctcgacctcaagccgcgcggctacgtcagccccgaggagtgggacgccggcgacagcatgggcttcgtcaactacgacaccaacctctatcgctccgaataccgcggcggcgaatcgggacgatcggactacgcctatgtcggcctgaacagcggcatcaacctcggcctgtggcgtttgcgccaccagtccaactacacctactcccgctacaacgggcaggccaggcgcaagtggaacggcatccgcacctatgcccagcgcgccttgccggcctggcgcagcgaactgacggcgggggagagctacaccgccggcaacctgctcggcagcatcggctaccgcggcctgagcttggccaccgacgaccgcatgctgcccgagtccctgcgccgctatgcgccgcaggtgcggggcaccgcggccaccgcggcgcgggtggtgatcagccagaacggcaggaagatccgcgaggtgaatgtcgcccccggtccgttcgtcatcgacgatctctacgacagcgcctatgccggcgatctggatgtccaggtgttcgaagccgatggcagcgtatcgagcttcagcgtgccgttcgcctcggtcccggagtccatgcgtcccggcctgtcgcgctacagcttcaccctgggccaggcgcgccagtacggcgacggcgacgacctgttcgccgacttcacctaccagcgcggcatgagcaacgccctgaccgccaacctgggactgcgtgtcgccgacgactacctggccatgctgggcggcggcgtcctcgccacccgcttcggcgccttcggcctgaacagcacctattccagcgcacgcgtcgaggatggcgcgcgcatgcagggctggcgcatcgggctcgactacagccggaccttccagcccaccggcactaccctgaccctggccggctaccgctattccaccgaaggctaccgcgaactcggcgacgtgctcggctcgcgcgacgcactgcgccacggggacacctgggattccggcagctacaagcagcgcaaccagttcaacctgctggtgagccaggccctcggcggttacggcaacctctatctttccggctcctccagcgatttctacgacggcaagagccgcgacacccaattgcagttcggctactccaatacctgggggcagttgagctacaacctcgcctggtcgcggcagaccaccacctactaccaggagcagggcgaccaggaccctggcgtcgagctgctccggcgcgaccggcgcagcggccagcgcaacgacaccctgaccctcagcgtctccatgccgctgggttcttccagtcgggcgccgacgctcagcgccatggctacccggcgctccggcgacagccgtggcggcagcctgcaaaccgggctgaacggtacgctgggcgacgagcgtacctggagctacgcgctgtccgccaaccgcgacagcgaggtcgccgacaccacctggaacggcacgttgcagaagcaggcggcgctggccaccgtgaatgccggctatgcccagggcgatcgctaccggcaatacagcggcggcatccgtggcgcgctggtcgcccaccgcgacgggctgacccttggccccagcgtcggcgataccttcgccctggtcgaggccaagggcgccagcggtgccgcgatacgcggcgggcagggcgcgcgcatcgacggcaacggctatgcgctggccccctcgctgtcgccctatcgctacaacccgatctcactcgatcccgttggcatcgatcccgacgccgaactgctggaaaccgagcgcaaggtcgcgccctacgccggtgccagcgtgcgcgtgacgttcaggacgctgaccggccatccgctgctgatccaggcgcggcgcgaggacggcagtgtgctgccgctcggcgccgtggtggtcgacgacggcggggcggccatcggcatggtcgggcagggcggccaggtctatgcgcgcgcggaaaaccagcggggcaggttgctggtgcaatggggaacggcgcgcaaggagcgttgcgagttgccctacgacctggccggtgtgtctcgcgaccaggcgctgatccgcctgcgcggcacctgccgggcagccaccaccgactccaacctggagaacgccagatga

SEQ ID NO: 354760 - DNA, 645 bp, Pseudomonas aeruginosa; identical to SEQ ID NO: 322095

SEQ ID NO: 354761 - DNA, 189 bp, Pseudomonas aeruginosa
atgaaggaggcgcccttgagcatgtcgaagctggtcgcgtccttcagctcgatggcggtgaaggtcggctcgacgccgccggtggcgagcatcacgatcaccggggtgaggatcagcgcgaagatcatcagcgaggcctgcacggtgtcggtccagctcaccgcgaggaagccgccgatgaaggtgtag

SEQ ID NO: 354762 - DNA, 483 bp, Pseudomonas aeruginosa
atggcggcaaacactatcacattcagcggcgaagtgaccgaccagacctgccaggtcgcggtcaacggcttcaccgaccccacggtgatcctcgacagcgtaccggtgagcgccctcgatggcgcagtgggccgcagcgccggcgaaaccgccttcaccctgcaactcaccgattgcgtcgcgccgacggccgacgagcatttcaccaccctgttccaggccaccaaccccagcgccgccgggaacctggtgaacaccgccgccagcggcgcgacgggcgtggcgctgcaattgctcgatagcgtcggcggcaacccggtcgacctggccggcggcgcggcggtgcccgccggcgacatcgtgctcgccaacggagccaccagcaccagctacgactacgcggtgcagtacgtctccgaagcggcgaccgtgacacccggtccggtactcggcgccgtgacctacacgctgcgttacgagtga

SEQ ID NO: 354763 - DNA, 963 bp, Pseudomonas aeruginosa
atgtcggtggaggaagtcggcgtcggccttgcgcggggtcggcagggccacccagaaggtacccttgcggtcgccctggaggttgtccggcaagcccggcaggttgtcgatgaacacctcgtgctggccagccttctcgcctttcagccagtagcgggtgatgcgatagcggtaggtctcgttgaccagtacgaagtcctcgtttgccgagagtgccacgccattggcgaagtacaggtccttgagcagcacctcggtcttgccggtggacgggtcgtagcgcagcagccggccgtgcggtcgggcctcgagcaggtcgaggatgtagtcgggctggtggaacttgctggaagcgtcgctgaagtagatgcggccgtcgctggcgatgtcgaggtcgtcggtgaaggcgaaggggacgccgtcggcctcggtggcgagggtttccaccttgccctgcggatcgatgcgaagcaggcctttccaggcgtcggcgaggatcaggttgccggcggcatcgaagtccatgcccagcgggcggccgccggtgtcgacgaaggtctcgaccttgccgctggcgtccaggcgtaccacgcggccgtcggcgagaccggcatagacgcggccctggctgtccacggcggtgtcctcggggccgtgcaactggccctggccaagcagctcggccttcatcagggtgtcgttgggttcgaggaccccggtcatctgcggagcggccggagcatcccaggcgagcgggtcgatcgggctggtcttcagggccaggtaaagagccgcgccagccagcaggaggacgattattccgctgagcttcttcatgcagttcccttgttcggattgtcggacaaagggcggagtatggacattcgctacgctcatcggcaagcgcggtgccgagcggaatgctcgcatggcgccaggctctatataatgcgccgcacttga

SEQ ID NO: 354764 - DNA, 666 bp, Pseudomonas aeruginosa; identical to SEQ ID NO: 321650

SEQ ID NO: 354765 - DNA, 459 bp, Pseudomonas aeruginosa
atgcgctatctcatcctcagcctgctggccgtgctcgccgcacctgcctgggctgccgacgacggcgacttctggtacctgcagaccagcgtctacacccggcatttcaacccggacccggaacacaacaatcaccaggacctgctcggcctcgaatacaaccgcgccgatggcgtgctggccggcggtgcgaccttccgcaactcgttcagccagcgctccaactacgcctacctgggcaagcgtttcgacagtgacagctacccggtctacctgaagctcaccggcggcctgttgcagggctatcgcggcgaataccgcgacaagatcccgctgaaccgcttcggcgtcgcgccggcgatcatcccctcggtgggcgttcgcttcggcccgctgggcagcgagctggtgctgctcggcaattcggcggcgatgatcaacctcggcctgcgtctctga

SEQ ID NO: 354766 - DNA, 795 bp, Pseudomonas aeruginosa
atgcagatcgatctgagcgacaaactggcaatcgtcagcggttccaccgccggcatcggcttcgccatcgccagcggcctcgccgccgccggcgccaccgtggtggtcaacggacgcagccaggcggcggtggaccgtgcgatcgcggcgatccggaacggccagccggatgccagggtgcgcggcgtcgccggcgacctgggcacggcggaaggctgtgcggccttcgttgcggccgagccgaaggcggacatcctggtcaacaacctgggcatcttcgagctgaaggacttcttcgacatcgaggacgccgagtggagccgcttcttcgaggtcaacgtgatgtccggggtacgcctggcccgcgcctacgtcccgggaatggtcgagcggggttgggggcgagtggtgttcctgtcttcggaatcggcgttgaacatcccggcggacatgatccactacggcttcagcaagaccgccaacctctcggtgtcgcgcggcctggccaagcgcctggccggcaccggggtgacggtgaatgcggtgctgcccggaccaaccctcaccgaaggcgtcgccgagatgctccgcgaggatgcgcagaaggccgggcagagcatagaagaggccggcaccgcctttgtccggcagcaccgttccagttcgatcatccagcgcctggcgacgcccgaggaagtcgccaacctggtggtctacacctgctcgacccaggcctcggcgaccaccggcgcggccctgcgggtcgacggcggggtgctcgacagcctggcctga

SEQ ID NO: 354767 - DNA, 1590 bp, Pseudomonas aeruginosa
atgtcagcagcctcgttagccaccctcgacgggtcgctccgcatgacccccgtcgagcaaccccgaccgccggctctcgccgatctcggcagccgcctgatgatcgtcgtcgagcgacgcgaggactgggcctcctacctgcccagcgaggaagtactcaccgcccaggaatacctcgagcaatcggcgcgcgaccacggcggccgccgcgtgcaggtgatcaacctgtgccgcggctacaagtacctcggcctcggctactactgttcgctgctggccgaggcccgtggccaccgggtgatcccgtcgctgcgctgcatcagcgaactggctcgcaagtcggtgtacgggctggccctgggtggcctcgacaaggccctggacaaggcgctgtgccgtacgccctatggcgccaccgacggcttcaccctgaccctgtatttcggccataccgagttcgagccactggccgacctcgcccgccagttgttcgaagcctttccctgtccgatcctgctggtggagttccgtcgccagcagggctggcatatcgagggcgtgcgccctggcgtgctgaaccgcctgcgcagcgaccaggaggacgttttcgccgacgctctcgacggtttcagccggcgcgcctggcgcatgccgcgttcgcggcgggtggcgcgctacgacatggcgatcctccacgatcccgacgaagcgctgccgccgtccaacccgcaggcgctggccaacttcgtacgggtcggcgccagcctcggcatcgacgtcgaactgatcggacgcaaggactacgcgcgcctggccgagttcgacgccctgctgatccgcgagaccacccgggtcgaccaccatacctatcgcttcgccgagaaggccgagcgcgaaggcctggtggtgatggacgacccggcatcgatcctgcgctgcaccaacaaggtctacctggccgacctgcttggttgccggcaactgggcatgccgctcaccgagatcctctacaaggaacgcccgcaggactggcagcgggtggcccggcgcctgggcttcccgctggtgctgaagattcccgatggctgcttctcccgtggcgtggtcaaggtcaacgacgacagcgaactgctggcggcggcgagcgagctgttcgagcgctcggtcctgttgctggcccaggagttcttctacaccgagtacgactggcgcatcggcgtgctcgaccgccaaccgctgtacgcctgccagtacttcatgtcgcgcggccactggcagatctacaaccacaaggccgacggccaggacgtcaacggcgagtgccgcgccgtgccgctggagcaggtgccgccggcggtgctggagctggccctggaggccgccgggcggatcggcgacggcctctacggggtggacctgaagcaggccggcgacaaggtgctggtcatcgaggtcaacgacaacccgaatatcgatgccggcatcgaggacggccagctcggcgacgaactctaccggcgcatcctccaggccttcgtccagcgcctggaactcaagcaccgtggccagttgagcaaggcgctgcgctga

SEQ ID NO: 354768 - DNA, 648 bp, Pseudomonas aeruginosa
gtggtctgccgctacctgcgccggcacggcatcgccccgttgcgcaccggcgactatcgcttcctgctgctgtttccccagggcgccagggcggaacacgcgcagccgctggtggacaggctgtgcgaattcaaacgccggcacgacgacgatgcgccgctgaagcaggtgttgccggagttgctcgacagctcgccgctgtaccgctacatcggcctgcgcgaactctgcgcgatgatccacgaagccagcctgcggctgcacctgaccgccctcgccgacgccgccgccagggctgccggccacgccgcgctggcgccggccacggtctatgggcacctggtcagggacgaaaccgaagcggtggcgatcgacaggctcggcggccgtgtggtcgccagcctggtcggcgtccatccggcggccacaccgctgctgttgcccggcgaacgggtggccgaggaatcgccggcgctgatcgactacctgctggccttgcaggccttcggcgagcactttcccggtttcgctcccgagttgcagggcatcgagatcgatgagcgcggccgctaccgggtccgttgcgtcaggccggcagccctcgcccgcggctccggcctgcgcctggccacgcgccggccggactga

SEQ ID NO: 354769 - DNA, 780 bp, Pseudomonas aeruginosa
atggaccgcggcgccggtgaattcgaaggcgttacgcaggtcgtcgccgagcagcaggcgagagaggaacagccccgaggccaggtcgccgaccccgaccggttgccgcgggaaggccagcagcgggcgttgcaggtgccaggcctgatcggcggccaccagcagcatctcgaaggtgtcgccggccttgcccggatagttcaggtgctttaccaggattgccctgggaccgcgtgccagcaggctccgtgccatttccacgcagtcggcgagggagttcggctggcggtcgcagaagctgtccagctccaactggttggggcacaggtagtcggcgaccgcggcggcttcttccagcaggaagtcgctgacttccggggccacgatgcagcctttttccgggtggcccatgaccgggtcgcagaggtacaacgcccgagggttggcctgtttgatccgtgccaccacatcgagaatggcgcggccctgggcggcgctgccgagatagccggacagcaccgcgtcgcagttgcccagttcgccgatgccggcaataccgtccaccagcgccggaatctgctccggcggcagcacctgcccggtccatcgaccgtactgggtgtggttggagaattgcaccgtgttcaacggccagacgttgattccgatgcgctgcatcgggaacaccgccgcggcattgccggcgtggccgaagaccacatgggactggatggcgagcaggtggggcgtacgtggcatgagacgacttcctacagctga

SEQ ID NO: 354770 - DNA, 501 bp, Pseudomonas aeruginosa; identical to SEQ ID NO: 353625

SEQ ID NO: 354771 - DNA, 1272 bp, Pseudomonas aeruginosa
gtgatcgtccttgtcgttcaggtaggcggcgttgacggtgccttcgctgctgtgggtcaggtagcggaactcgccttccagcatcatgccgcgcttggccatgtagcgcgggtacaacgtggcgtcgtagttcggcgccaggttgaagtagtacggggtgaccagggtgaagccggtgtcgctggtgctgctgaagctcggcggcaggaagccggactggcggcggtcgtcgatcgggaaatagatgtacggggtgtagaacaccgggaaatctttgacccgcagggtcgcgttggtcgcggtgccgaagccggtggccgggttcagcttgacgttgttgcccttcagggtccaggcgttgctgctcggttcgcagcgggtgtaggtgccatccttgagcatgatgatggcgttctcgctgcgcttggcgtagagcgcgctgccgcgggcatgggccttgtggatcacgtactcggcgttgtcgacctgggcctcgccgttgtccagctggacctgggcgtggtcaccgaccaccagcatgcccttgtcgcgcagcttgacgttgccgaccagttcgccgcggttttccagctgatgcaggttggcctcgtcgccttccacctgcatgcttccctggcgcaggaccacgtcaccggcgagggtggcgatctgtttttcctgctcgtagcgcgaagccttggcggatacgtaggtcgggctctcgtcgctgggcgcgccgtcatccatgcccggacgcaccggctcgatgtaggagccgccgcaataggggccgatttccgccaactgggcggcggtcagtttttcccgaggaatccagtcgaggtgcgagtagtccgcactgcgggatttcagcgcgcgaccgccggactcggtgaccaggcgctgggtcggctctgcctcgacggtttcgcctccgctgccggatacactggtgcccgccgcggcggtgctgaccgaggtcgcggtatgcgccgggcgcggtggcaggttggcattggcgttctgcagcggggagcaatcccagccgccggtggccgataccttgcagtcgaactgatcggcggcctgtacagtcaatgctgcgaccggctgcagagccagcaggctgccggtgaccagcaggggaaactttcttcgaaacacgagggatttcactgccatcttgttaatccgggcttcctgcgcgccatcggcccggtgggccgcacgcctctcgatgggctgaaaaagatgctggataataaagcatga

SEQ ID NO: 354772 - DNA, 234 bp, Pseudomonas aeruginosa
gtgccgtcgctgtacgacctgctgctgccccaggagcaacggccggccaccttctacaccggcagccacgagttcgatccgagccgggtcggctacctcaccgcgcccggcccggacaacgccttccttttcgacacccatctggaaggcaactccaacgccggccacgacttcgcccgcgagtacgacgaaagccagcgcctggcgctgctcgaatacctcaagaccctgtga

SEQ ID NO: 354773 - DNA, 234 bp, Pseudomonas aeruginosa
atgccgttcatgtccatgccggccatcttcgaatggtccatgccattcatgtccatgcccgacatcttcgaatggtccatctcgctggcgggcctcgtcgccgcgccatgccccatggcgccgtggtccatgccgcccatgcccatgtcgtccatgccgatcagcgggcgcggatcgggcgtcggcaccggcgcgctaagcccttcggccagcgccagggtgccgcgggcgtag

SEQ ID NO: 354774 - DNA, 351 bp, Pseudomonas aeruginosa
atgaacgaatacctgccgacttcgacggccaatggcctgccgcacaacctgcagcgcggcgagcgactcgcttccatcggcgccggactggtcctggccggcttcggcctggcccgcggtggcttgcccggcgcctgcaaggcggtcgccggcggcctgctggtcagccgcgggttgagtgggcattgccatgtcaagggcctgctcaatgaaccgcgggaagagttgcagttgctgcgcgaagaggtgcagcacctgacccgccgcctgcagcgcctgcaggagcgccagcgcgacgactcgcggcaggacgctgcgctggacgccgagctgccgccgaacctgccgtga

SEQ ID NO: 354775 - DNA, 222 bp, Pseudomonas aeruginosa
atggccagccagctgttcctgatcagttacatcctcgacgaccagccgatgacctgcgaattgcacagcgaggcggataccctcagccgcgaggaggcccgccgccacttggaggcactgcatcgaccgcacgacgccgaggcgatcagcgatatccaggtcagcaaggtggagcgtacccatgaaccgggcaccacgccgggacactaccagcagccctga

SEQ ID NO: 354776 - DNA, 1410 bp, Pseudomonas aeruginosa
atgaaaatactcgcccttctcgcagcctgcctgctggcaggctgcgccgccaacgccccgctgcgcgatgacagcgaatcgacctgcgccgacatgcggccttgcagcgacagctactacgaacgccatccgaactacgagatcggcttcgtcgaatacagcgagcgcggcaacgacttcgcgcctgccagaacgcaacgcctgatcgaccagctaaagcgctactccgcccggggggacatcgccatggtggtgttcattcacggttggaagcacaacgcgggacgggacgacggcaacgtcgccagcttcaacaaggcactcgccaatctcgcctcctccggggtgctgggcaaacgcaggctggtcggcctctatgttggctggcggggcaagtcgatgcatggcctgtatagcgagaacctgacctactgggacaggaaggccgtcgccgaggaagtcggccggggtggcgtcgccgagttgctcgcccagttggaacggatcgatcgcaaggacaggaactatctggtgatcgtcggccacagcttcggcggcgcaatcaccctcggcgcacttcacgacccgttgctcgaacgcctgctggctctccaggacggtcagcggatacgcgccttcggcgacgcggtaatcatgctgaatccggcgatagaggccaatcagggcctgttgctcaaggagaacagcctcaaggtcggcgccctgggagcccggccgccgccgctgctgtacgtcatcagttcgcacggcgacagcgccacccacttcgccttcccgctcggccaatgggtcggcgtcaacctcacctggagccaggtggacctggacaggacctacaacggaacccgctatcgcctccgggaagaagacctggataccaccgccctcggcaactacagcctgtatcggaccgccctgctgatcgaccgcgagtgcccgctgccggatggcagcgacaactgcgcgccaagaccgcccgaaccacgggtgatcgacgacaccgatatcggcaaatggcgcttcaggagcttctgcagcgcggacggcggcaacgccgatccggcgctgccgcgcatgccctgctacagcaacgagccggtcaacttcatctacacctcgcagtccttcatcgccgaccacaacgatatcttcaacgaccaggtgatcgccttcatggccaccgccgtcagcaaggccatctacgaacgcacggctggcgcctcctactaccgggagtgccacgacccggtgcggaagaacttctcgttcggcaagtgcttcgacttccactacctcaaagccacggccatgcaccggcggctgcaacggctactctcggaacccggcacccgcagcgaacaggacgtcctctatgaaaaccctctctag

SEQ ID NO: 354777 - DNA, 771 bp, Pseudomonas aeruginosa
ttgccggggcttgcccggcgcaagggggagggccgcgcccggcgtgggtggcggcgctgggtcggcgggctgctgttgctgctcggcgcgctcgccagcggatgttcgaacgcgccgcgcaacgccgccggcgaggacaccagccagggttcgatgcgcgctggcgaattcctccagaccgatgccgatcgcatggccaccctggccatgcgcgacaacctgcaaagcctctaccagttgctctggaagctgtacaagcgcaatcccgccgaatggcagaagaccggcctgccgagccaggccgacgccgagctggcgatccgccgggccatcgagcagaaccgcgaactcagcgacctgggcggccgccgcgacatcgccgcactgtcctactccctcgatccggcgttcaagggcgaccgcgtcggtgccttcatctactccctggccagcatgctgatcaccgcccatggcgggcgcaccgagttctacgtctaccaggggatcgacgcgcagtacgtctacaacgccgcgcgcaacgtcgaggtcgccacctggatgctggctacccgcaaggacgacaagggtgccccgttgctgctttccaacgccctcaccgacgacgccagcaacctcagctacgcccgcgagttcgccaagatcgtcgcgcgcctggacctgctcgccgaggtgctcggcgaacgctaccggcggatcagcgtgaactacgcccagggactgctgttcatgcatttcctgccggtgcagtga

SEQ ID NO: 354778 - DNA, 981 bp, Pseudomonas aeruginosa
atgagcaacgagccagaaagcacgcagcacaagagcgccctgcagggactgaagggctacctgtcgagccagatcctcggccaggaaaaactcgtcgaccgcctgctgatcgcgctgctagccgacggccacctgctggtggaaggcgcgccgggactggccaagaccaaggccatcaaggacctcgccgaaggcctcgaagccgagttccaccgtatccagttcactcccgacctgctccccgccgacatcaccggcaccgagatctaccgtccggagaccggcaccttcgtgttccagcaaggcccgatcttccatcacctggtgctggccgacgagatcaaccgcgccccggccaaggtgcagtcggcgctgctcgaagccatggccgagcgccaggtttcggtcggccgcagcacctacgacctgccacagctgttcctggtgatggcgacacagaacccgatcgagcaggaaggtacctacccgttgccggaagcccagctcgaccgcttcctcatgcacgtcaagatcggctacccggaggcctcggtggaacgccgcatactccagcaggcgcgtggcgaggcactgaacggcgaggcccggccggagcgccgggtgacccaggaaaccatcttcgccgcgcgccaggaaatcctcggcctgtacatggccgacgcggtggaggaatacctggtgcaactgatcatggccacccgcaccccggccaagcacgacgcggaactcgccgaatggatctcctacggcgccagcccgcgcggctccatcgccctcgaccgctgcgcgcgcgcccacgcctggctgggcggacgcgacttcgtcagccccgaggacatccaggcggtgctgttcgacgtgctgcgccatcgcctgatcctgaccttcgaggcggaagccgccggcatcgaccaggaccgggtcgtgcagcgcatcctcgacgtggtcgccgtggcctga

SEQ ID NO: 354779 - DNA, 939 bp, Pseudomonas aeruginosa
atgctgagcgccgccccgggcgtcgaactgggcctcgacgagcttctggaaatgcgccaccggctccacgaagcgcgcctgttctcctcgcagaaccgccgcagcccgttggtcggcctgcatcactcgcgcctgcgcggacgcggcgtggacttcgaccaggtgcgcatctaccagcccggcgacgacgtacggaccatcgactggcgcgtcaccgcgcgcacccgcgagccgcacaccaagctgttccacgaggaacgcgagcgaccggtgttcgtcctggtcgaacagagccagcgcctgttcttcggctccggcctgtgcttcaaggcggtgctggcggcacgcgcggcggccttcatcggctggtcggcgctggcccacaacgaccgtatcggcggcctggtattcagcgaccgcgactgccacgaaatcaagccgcgacgcagcaagcacagcctgctgcaactgttcaaccagctattgcgggccaatcgcgagctgcgcgagacgccggccgagcggcctggcgaactgttcggcctggccctgcgccgcgcccgcgaagtgctgcgcccgggcagcctgatcctggtgctgtgcgacgagcggacactcaatgacgtcgccgagcagcaactcagcctgatcgcacgccataccgacctggtgctgctgccgctgtccgacccgctcgaccatgccctccccgccgccggactgctgcgcttccgcgaaggcgccgccgacctcgagctggacacccacgccgacgagctgcgccaggcctatcgcgaactggccgaggcgcgccgcgcgcgctggcagcggctggcccagcgactgggcgtgccgctgctgccgctgtcgacccaggaagacctggtggagcagttgcgggacctgctggaacaacaccagccggggtatcgcgcatga

SEQ ID NO: 354780 - DNA, 1128 bp, Pseudomonas aeruginosa
atgctggaagtgccggaaggcttcgtggttcagcgccaggtttcgaagatctacgaagatcgccagaagatggcggccggtggcctgccgatcaactggggcttcgccgagaccctggcctacgcgaccctgctgttcgaaggccatccggtacggatgaccggccaggacgtcggccgtggcaccttctcgcaccgtcacgcggtgctgcacaaccagaaggacgactcggtctacgtaccgctggccaatctgttcgatggccagccgcgcctggatatctacgattccttcctttcggaagaggccgtgctggcgttcgaatacggtttcgccaccaccacgccgaattcgctggtgatctgggaagcccagttcggcgacttcgccaacggcgcccaggtggtcatcgaccagttcatcaccagtggcgaaagcaaatggggccgactctgcggcctgaccatgctgctgccgcacggctatgaggggcagggtccggaacactcctccgcgcgcctggagcgctacctgcagctctgtgccgagcagaacatccaggtctgcgtgccgaccaccccggctcaggtctaccacatgctccgccgtcaggtgatccgcccgctgcgcaagccgctggtggtgatgacgccgaagtccctgctgcgtcacaagctcgccatctcgaccctggaagatctggccaacggttccttccagaccgtgatcccggaaatcgacagcctggatccgaagaaggtcgaccgcgtcgtgctgtgcagcggcaaggtgtactacgacctgctggagaagcgtcgcgcggaaggccgcgaagataccgcgatcgtccgtatcgagcagctgtatccgttcccggaagacgacctggcggaagttctggctccgtacaagaacctcaagcacatcgtctggtgccaggaagagccgatgaaccagggcgcctggttctgcagccagcatcacatgcgtcgtgtcatcgccgcgcacaagaagggcctcaatctcgagtacgccggccgcgaaggctccgctgctccggcttgcggctacgcctcgatgcacgccgagcagcaggaaaaactgctgcaagacgcctttactgtttaa

SEQ ID NO: 354781 - DNA, 870 bp, Pseudomonas aeruginosa
gtggtacttcacgtcaccggagcccagctcgacgatcttcttgccttcgaactcgtcgaacaggtcgcgcgggttcttgcccagggtgttgaccaggacgttcaggcgaccgcggtgggccatgccgatgacgatttccttggcgccgtaggaaccgcagcgctggatgatctcgtcgaccatcgggatcaggctttcgccgccttccaggccgaaacgcttggtgcccgggtacttggtgcccaggtacttctccaggccttcggccgcggtcaggcgctcgagcaggtgcgcacgcgcctcggcggagaagccgggacggccacgcacgctttccaggcgctggaggaaccacttgcgctgctcggaatcgacgatgtgcatgaactcggcgccgaaggtaccgcagtaggtgctcttcaggctgtcgacgatttcacgcagggtcgcctcttccttgccgatgtaaagctcaccggtgcggaaagtggtatccaggtcggcacccgtcagaccgtagtggtcgatcgacaggtcggcaggcgcgggacgctgccacaggccgagcgggtcgagggtggaagcctggtggccgcggagacggtaagcgtgaatgagacgaaggacttcgacctgtttcttctcgtgctcgctgctcacgctaccggcggaaaccggctgggcacggcgctggttcttggccagcaggacgaaatgatcgcgcactgtggagtgcgagacgtcgggggcgggattgccatcggcgggaagcttctggaaatacgtgcgccactcttctggcacagcgttagggtcgtgcaggtagagctcgtagagctcttcgacgtaggcagcgttaccaccggatag

SEQ ID NO: 354782 - DNA, 597 bp, Pseudomonas aeruginosa
atggacaaggacgtatccggcgcgctgcgccgcctgttgctgctcgtcatgctcggactgccactggcggcggccgctgcggtcgaaccgcagcgactggtggatgcggcgcgtgcccaggtgggcgtgaccctgggctacgacccggcctaccggcaactggactatccgggcggcgacgtgccgctgcagaccggggtctgcaccgacgtggtggtccgtgcgctgcgtggacaggggctggacctgcagaaggcggtgcacgaggacatgcgtcgccacttcgcggcctacccgcagcaatgggggatgaaaggcaccgaccgcaacatcgatcaccgccgcgtaccgaacctgatgacctggttcagccgccagggcctggcactgacgccgagccgcgacgcctccgcctaccgggccggagacatagtcgcctggcgcctggacaacggcctgctgcatatcggcgtgctttccgatcgcaggctggagggcaggccgctggtgttgcacaacatcggtgccggcgtgcgggaagaggacctgctgttccgctaccaggtcatcggccactaccgcttcccgcagggctga

SEQ ID NO: 354783 - DNA, 1509 bp, Pseudomonas aeruginosa
gtgcgggaggagcaccgcggtggcgatcagggcggcgacggtgaagccgatgaacaccgtgtaggtgtcgaaatagccgggcagcaggccaccgaggatcgcgcccaccgaaccgcagccattgacgaagccggaggcggtgccggcggcctcgccggtgccgaagtcgatggcggcggagccgcagatcatcgagtccgggccgtacagggtcagtcccatcatgaacagcaggccgaccactatcggaatgctgccggtggtcatcgccgggacgaacagcgccaggcagacggtcagcgccagcaggctgatcacgcaggccggcatgcgccgtgcgccgaacagcttgtccgaggcgaagccgatcaggatcgggccgagcaggccggctacctcgaaggcggtgggaacgatcgccgcgccgaccttgccgagcgccggcatgcgttcgtagacgatcaccggtccccacaggaggatcgcgtagcgcgccggcttgagcaggaagtaggccaggccgaggcagagcaccgtgcggttgcgcaccaccttggcgagcacctgcaggctgccgccgttgccgccttccggcctgaagccggcatagcgcacggcttcgctcgcggcctgcggttcgacgggaggatggccgacgtcttccgggcggttgcgctgcaacagcaggaacagcagggccacgccgccgaccaccgcggcgctggagtagaacgccgcgtgccaggtaccgaacacgctgtacgcccaccagccggcgaacggcgaggcgaccaggccgccgaaggcgtagcaggtgctccacaggccgagcacccgaccgcgttcgtgggtggcgaagaaactgccgatgttcttgcacagccccgaccagccggtggactgcgccagtccctggaccaccatgcaggtggcgaagatcggcagggtggcgaaggtgcccatgaccagcgcggccagtgcggagatcagcaggccgccgaacaccacgatgcgcgggccgaagcggtcggccagcacgccccaggtgaactggccgacggcataggcggcgagatagatggcgtcgagatcggccatcgccatcttgtccaactggaagtccggatcttcggcgatgccgagcttggcgacggaaaaggccttgcgggtgaaatagaaggcggcgtaggccagccaggtgatcgcgaatatctgcaggcgccagcgctggaagctggacacgggagaggacggcagcgccgtcccgggacgttgattcatggatctgacctcgatcttgttatcggtgccggcaggtgtgaggggaacacgccttgttgttgttctgatgagcacttccgcaccgccatgtcgcggcgcctggtcagaggtatctggagtcggcttcacctcctgggtaagggttgcggctgccctggcaggggctggctgccgaggcgctggcgcgctgtggtgaagcgatggaaacaattccggataaataaatga

SEQ ID NO: 354784 - DNA, 1356 bp, Pseudomonas aeruginosa
atgaatgcaaccgcgctttccccgaacccggcgccggccatttcccggcgcaccatgctgatcgccttcgtcttctgcttcctcggcctgctcgccgacggcgtcgacctgatgttcctggcctacagcctcaacagcctgaaggccgaattcggcctgagcaacttcgaagccggctccctcggcagcctgactctcgccggcatggccgtcggcggtatctatggcggctggtgctgcgaccgcttcggccgggtgcgagtggtgacctggaccatcgtgctgttctccatcggtaccgcgttgctggggctgacccagaactactggcagttcgcgctgatccgcttcgtcgcctcgctcggcctcggctcgctgttcgtcgcctgcaacatcctgatgtccgagtgcgtcggaaccaagtaccgcaccaccatcctcgccgccatgcaggccggctggaccgtgggctacctggtggcgaccctgctggcggggcagatcatccccgagttcggctggcgcgccttgttcttcaccgccgtggcgccggtgctggtctgcctggccctgcggccctgggtgccggagtcgccgtcctggctcgcggcccaggccgggcgccagcgtcccggcgcggctccgcagagccacgccgaggctggcggcgccggcccgctgggacggatgctgggcgatccggaaacgcgcggcatgttcctgctctggagcctcacctcctgcttcctgctgttcggctactacggcaccaacaactggatgccgtcctacctggagagcgagttggggatgaacttcaagtcgatgaccggctacatggtcggcacctacagtgcgatgatcctcggcaaggtcgccgctggcgtctgcgccgatctcttcggccggcgcctgaccttcgccgccggggccatcggcagcgccgccttcatgccgttgatcgtgttctaccactcgccctccaacatcctctggatcctcatcaccttcggcttcatctacggcgttccggtcggggtgctggccacctacatgaccgagagcttctccacccgcgtccgcggctcggcggtgggcaccgcctacaacctggggcgtatcggcgcggcggtggcgcccgccggcatcggcctgctggccacccacgtgtcgatcggcgcgggtttcctggtgatgggcatcacctacgtgctcaccgggctgatcccggcgctgttcattgcggaccggctctacgacccgaaccgcgagtcccgcgatgccgagagcgcttcccgacggcaagcgccgggcagtgccgtggataccgccgagcggcgcgcggccaaggcctga

SEQ ID NO: 354785 - DNA, 867 bp, Pseudomonas aeruginosa
atggcgctcgatcctgaggtactcctgaactacccgatccccgaagtacgccagcgctacagccggcgcgacagcgccttctatgcattgaccctcggtctgggcggcgacccgctggacgagcgccaactggtctacgtcgatccgtgccgcgatctccaggcattgccgtgcatggccctggtgctcggtcatccgggcttctggctgggcaatccggcgactggcgtggacgcgctgcgcctggttcacggcgagcagcgcctggagtggcggcggccgttgccggcggaaggcgaggtgatcggtcggacccgggtcaccggtctggtagacaagggcgccgacaagggcgcgctgctctacagcgagaaggtgctcagcgacgcgctcagcggcgaggtgctggctgtcgcccgcagcaccaccttccttcgtggcgacggcggcttcggtggttcccggcaggtgccggaaatgccgcatcgcttgcctgaacggacgcccgacctgcgactcgacctgccgacccgtccggagcaggccctgtactaccgcctcaacggcgacgacaacccgctccacgcggagcccgcggcagcgctgcgggccggcttcccgcggccgatcctgcatggcctgtgcaccctcggcgtggcattccacgcggtgttgcgcgggctcgccgactaccgcgcggagcaactgggacatctgcaggtgcgtttctcggctccggtgtttcccggcgagaccttgcgtaccgagatgtggagcgacggctcgttccgcactcgcgtcgtcgagcgcgatgtggtggtgctggacaacggccgggtaggtccgccgccagagcggccggactga

SEQ ID NO: 354786 - DNA, 888 bp, Pseudomonas aeruginosa
atgaatttcatagccctgcgccgcgatcctgagggtgatctggaaatcctgcacgcgaatcgacgggtcgaagaaatccgcccgcttcatcgcgtccatgcggtagagcgccgtcagcggcatgaccaccagggtctcggccaatgctgcatcgaacccccaacgctccacacaaccctcgctgaaaccgtctcgcgccacttcgttaccggcactgtcgatacagatattgaaaccgcccacgcacccgacctcggggtgcgcaagcaagtagtcgacgcgcgtgtcgagcgctccaggcaggacaatgtcgtcgaggtcgggagtcatcacgaactccccccgcgcatgacgcaaaccgtgattaagcgcatcgctcacccctcggttagcctggcggtagagctggaaaccgtgacgctcgcggagcatggcgagacgctcataggtgtcgtccgtggatccgtcatccaccacgatcaactcgagattgggatagccctgcgcgtagatgctggcaatcgcctcgtccagatacttcgagatattgaaacaggcgcaaacgacggaaacgagcggtcgcatttcttcctccccagccccggctccgggactcggcacaaaccgataacctggctgtccgctggaaggaaaccgtgccatgcagctcggccacacatccgcggcgccttcaagcgccgggatactaagaagaaccgccccgaccatcgaaaccggcaggtcgcccgacccggcgctcgaaggacagaaaatcggaagcaatggagaaatgcgcgctcagcgcacccacgaaacccagacagagcgggacgaccacccagaggagaaggaaggacagaacgaaggaagggcccgcagcattcctag

SEQ ID NO: 354787 - DNA, 399 bp, Pseudomonas aeruginosa
atgactgtacgcgacgtggttttccccgccggccgccaggccctctacgagcgcaaccgctattccccggcggtccgcagcgacggcctgctgttcgtctccggccaggtcggcagccgcgacgacggctctcccgaacccgagctggagacccaggtccgccgcgccttcgacaatctgaatgcggtgctcgccgcggccggttgcgggttcgacgatgtgctcgacgtcaccgtgttcatggtcgacgccgaggccaacttcgagcgcatctggaagatcgtcccggagtactggggcgaggcgccgtaccccacgctgacggcggtgggggtgaactggctgtatggcttcagcttcgagatcaaggtggtcgcgaggttgccggaggggcggtga

SEQ ID NO: 354788 - DNA, 828 bp, Pseudomonas aeruginosa
atggacaaaccggcctcgcggcatttcagcgtcttgatcatcgatgatgaaccccaggtgacctcggaactccgcgaactgctggaaaacagtggctaccgttgcgtaaccagcacccaccgggagtcggcgatcgccagcttccaggccgacccgaacatcggcttggtcatctgcgacctctacctgggccaggacaacggtatccgcctgatcgagagcctcaaggaagtcgccggcaacggcaggttcttcgaatcgatcatcctcaccggtcacgatggccgccaggaagtgatcgaggccatgcgggtcggcgccgccgactactaccagaaaccggtggcgccgcaggaactgctgcatggcctcgaacgcctggagagccgcctgcacgagcgcgtccgcagccagttgagcctgagccacgtcaaccagcgtctggaatacctcgccgaatcgctgaactcgatctaccgcgacatccacaagatcaagtacgaggtacacggcaacagccagccgagcgccctcaggagcgaagacagccagccgtccgcgccgccggcgccggtcgcggaaagccaggtgtccccgagcaatccgctgttcggcaagctgtcgccccgccagcaggcggtggcgcggctggtgagcaagggcctgaccaactaccagatagcctacgagctgggcatcaccgagaacacggtgaagctgtacgtctcccaggtgctgcgcctgatgcatatgcacaaccgcacccagttggcgctggccctgtcgcctgcggcgatgcagcagggcagcggagcggtggtgcactga

SEQ ID NO: 354789 - DNA, 1671 bp, Pseudomonas aeruginosa
atgaacggatggcctgcaagacagcgcggggcgatcggcatcctggcggcgaccaccctgctgctggccttgatctgcctgttgctggtggtggataccgggcggctctacctggagcagcgcaacctgcagcgagtggcggacgtggcggcgctggagagtgcctcccagggagccttgtgcggcgaccagagttctgcccaggcgacgtctttcgccaaggccagcgcgatgctcaacgggttcgatgcggacgccgccggctccagcctgtcggcggaggtcggcggcgtgctgagtgccggcggcctgcgcagtttcatagccagcgcgtcgaacgcggctgccgccaacgaggcggtgcatgtcgaggtgaccaagagcgttcccggcagcctggtcgccaacctcgggggactgttcggcggcggcaatgccaacgtcgatctccgcgcagaggctgtggcgcgacgcctgccgaacgccacgatttccgcaggcacggggctggcgagcgtgaacagtggccaatcggcgttgctcaaccccatcctgagcggattgctgggtacccagatcgatctctcggcggcggcctacaacggtatcgccgacgcgaagctcagtgtgctggacattctcggcgcggatggaatgggcttgatcggggtcgataccagcctggggaccatcgaacagttgttgaataccaacgtcggcttgcagcaggtactcgccgccagcgtgaacgtcctggcgaagaacggcgtagcctcggtcgaggccctgagaacgcaattggtgggggtaaagtcggccacgttgaaactgggagacctgctggggctgagcgccggcgaggtgaacagcatgtcgcagctggatacggcgatcaatgcgctggatctcatcatggcggttgcccaggtcgccaacaagaattccgcggtcgccgtgaacctgggcatccccggattggccaacgcacggctcacggtcgtagagccgaagaggatcgtctccgggccgccagggcaggatgagagcggtgcctggcgcacggaggtgcgccagtcccaggtacgacttacggcggacatcgattccgggttcctgtccattctcgccaccacgaaactgcaactggccatcgaaggcgcgtcgggagccgtctggctgaaaagcatggcctgtacccgcccggataccgcgttggacttcggctggagaagcagcggagcgacgataaagatcggcagtccggccaacatcgatcaggtcggctcgattctggtgcttggcggcttggtgcgattggatctcaagctcgatacctcgatcgccggcagctcgggcgatacgcgattcaacgtgaaagccgacggttccgatctcgtccagagccgcaggttgccggaaagcggctttctcgccagtaccctgaaagccagcatcaacgtcaatcccgtggtgctcggactgtgcttgcctttgctgtgcggctcgacggcgctcaccgacctcatcgtgaattccgtggtggcacctctggtcgatgggctgctgacgccgatcctgaatctggtcctgcccttgctgggggtacaacttggatacatcgacgcggagattctgaaggtcgatgtcggcagggcggaactgctgatctag

SEQ ID NO: 354790 - DNA, 285 bp, Pseudomonas aeruginosa; identical to SEQ ID NO: 322873

SEQ ID NO: 354791 - DNA, 738 bp, Pseudomonas aeruginosa
atgaaagcactgatcggcatcggcctgtgcgccgccctgctcggcggttgcgccgcgctgccggggcgggacggcccacgggagtgttcgcagcagctcggccaggagcaggaactgcagatgaacatggtccgcgacatgatccgcgagggccgcctgcatgcggccctggccaacctggaaagcatgccgccggggttgctcgacgtgcgcgaggaaagggcgctgatcctgcgccggatcggcgacccgcgggccagggccgagtaccaggccctgctggaaacctgcaaggcacccgaggcgcaccacggcctcggcctgctcgccctgcgcaatggcgacagcgcccgggcggtcctcgagctgcgcgaggcggcgcgcctgcggccgaccgagagccgcttccgcaacgacctgggggtcgccctgctcaagcgcggcgaccgtgtcggcgcgcgcttcgaattcatcactgcgctggagttgcagcagggtggcaagctgccggcgaccaacctgctcggcctgctgtacctgcaaggcgaccgggaagatgcgcagcgcctgatcgagcgtttgcagctggatgcccgggacatccgcgcggccgaggcgcgggcgcgcagctggggtgccgtaccgacacccggcgcggcgccggcaagcgacgacccgctggcggaactgccggcggaggcgaatatgcataccgcgatggccaacgaggcgccctga

SEQ ID NO: 354792 - DNA, 912 bp, Pseudomonas aeruginosa
atgcaggcacagtggctgattttcacggcgctcctgatggcggtcggcggtgccttgttgctgttgctccaggcgcgcaacggcagccgtgagcagcgcctgatcgagaggcgcctgggagcgctggccaaccctggcggctcgaccaggtggctggccggcatgaccgagcggatggacgacagcttctgggtgcggcgcctgcaactgatggacagcgaggcccgccagttgctgcaacaggccggctggcacgagagtcgctaccggaccctgtacctgatctcggtgttcctcacgccgctgctgttcgttctcctggtcttgctggtcaagctgctgcgcgccgagagcgaggcgtcctacgcggtgccgctgctgttcgccgccggcatcggtttcctcctgcccaagcaggtgctcaagcacttcgccaaggcgcgccgggcgctgatcgccgacgagatgatcctgttcgtgcaactgatccgcatcctcttcgacgccggcctgaccgtggagcagacgctgcgcgtggtctgcctggaaggccgcgggatcaccccgcaactggcccgcgagctggacctggcgctgacccgtgccgacaacggcatcgacctggcggaagagctggacgcgcttgcccggcgcctgcaggtggacccgctgaacgactgctgcggcgtgctacggcagatgttgcgccagggcggcagtgcgcgcagcaccctgctgacgctcaagcaactgttcgaagaccggcgcctgaccaccttgcaggaacgcatcggcaagctgtcggcgaagatgagcctggtgatgatggtgctgctgttcccggcgctgctgatcgtcctcgccggtccgggcgtcatcgccattaccaaggccttgggaggactgggatga

SEQ ID NO: 354793 - DNA, 1146 bp, Pseudomonas aeruginosa
atgaaaatgctgaagcgctttatcgtgaagaagaacgaacgcggcctgctgtactccgaaggcgacttcctcgccgtgctcgaaccgggcacctaccgccgcttcgatccgtacgaccgcctgagcctggaaagcttcagcctgaacaccccgcagtttgaacaccgcctggccggctacctgcggcagagcgaaccgcaactggtggagcgctacttcacccggatggacctgggcgacaacgaggccggcctgcgctacgaggacggcgtgctggtggagttgctcgcaccgggcagccgccgactgtactggaaaggccagaccgagcagcgcctggagcgcatcgacctgacccaggactatcgattgtccgccgcgctggtcgcccagttgcaccagccgaacctgcgcgaccgcgccctggcgggcctggacgcagtgttgctggtccaggtgccggcgttccaggtcggcgtgctcaaggtcgacggcgcccttgccggcctgctgcaagctggacaatacggtttctggcgctacaaccggcaagtcagcgtggaactggtcgacacccgtatccaggcgctggaggtcagcggccaggagatcctcacccgcgacaaggtcagcctgcgcctgaacctcgccgccaactggcgctacaacgacgtactcaccgccttctcgcggctgagcaagccgctggagtatctgtaccgcgagctgcagttcggcctgcgggcggcagtgggcacccgtaccctcgacgaactgctggagaacaagcagtcgatcgacgaagcggtcagcgcccacctggccgccaagctggaagacagcggcctggaagtgagcggcctgggcgtgcgcgacatcatcctcccgggcgaaatgaagaccctgctggcgcaggtggtggaggcggagaaggcggcccaggccaatgtgatccgccgccgcgaggaaacctcggcgacccgctcgctgctgaataccgcgaaggtcatggaggaaaacccgaccgcgctgcgtctgaaggaactggaaaccctggagcgggtggccgagcgcatcgaccggatttcggtattcggtggcctggaccaggtattgaacggactggtcacgctgaagcaggcctga

SEQ ID NO: 354794 - DNA, 1215 bp, Pseudomonas aeruginosa
atgaaagacatgaatatcctcgaagtggccggcggcaagccgatcaagctctggacccagggcgtaccggtggaggaggaagcgcgccagcagttgctgaacacggcgaagatgcccttcatcttcaagcacctggcggtgatgcctgacgtacacctgggcaagggctcgaccatcggtagcgtgatccctaccctcggcgcgatcatcccggccgcggtgggcgtggatatcggctgcggaatgatcgccgcgcgcacctcgctggtcgccgccgacctgccggacaacctgcacggcctgcgcagcgccatcgagcaggcggtaccccacggcaagaccttcggccgccgcgaccgcggcgcctggcacgaggtaccggaggccgccgaccaggcctggaaggcgctcgccgatcgcttcaaggcgatcaccgacaagcacccgaggctggagaagaccaacaaccgccagcacctgggaaccctcggcaccggcaaccacttcatcgaggtctgcctggacgaggccgaccgcgtctggttcatgctgcacagcggttcgcgcggggtcggcaacgccatcggcaacctgttcatcgaactggccaaggcggacatgcgccagcacatcgccaacctgccggacaaggacctggcctacttcgaggaaggcagccggcacttcgacgactacgtggaagcggtcggctgggcccaggatttcgcccggcagaaccgcgcgctgatgatgcacgcggtgatcgaggcggcgcgccaggtgatccgcaagccgttcgaagccaacctggaggcggtcgattgccaccacaactacgtgcagaaggagcgccacttcggccaggaggtactggtcacccgcaaaggcgcggtgtccgcgcagaagggccagctcggcatcattcccggctcgatgggggcgaagagcttcatcgtccgcggcctcggcaaccaggaagcgttctgctcgtgcagccacggcgccgggcggaccatgagccggaccaaggcgaagaaggtcttcagcgtcgccgaccaggcgcgcgccaccgcccacgtcgaatgccgcaaggacgccgacgtgatcgacgagatcccgatggcctacaaggacatcgaccgggtcatggaagcccagcgcgagctggtggaagtgctgcacaccctgcgtcaggtggtgtgcgtgaaaggatga

SEQ ID NO: 354795 - DNA, 813 bp, Pseudomonas aeruginosa
atgaacagggaagaacgccatccgctccccgccgccatgcgcgagcgggtactggatgagctggaacggatcgaacgcgagcacgacgtagtcgtgctctacgcctgcgagtcgggcagccgggcctggggcttcgcttcgccggacagcgactacgacgtacgcttcgtctatgtgcatcagcccgagtggtatcagcgcgtcgaggaacctcgcgacgtgatagaacgtccgctgagcgacgagctggacatcagcggctgggaactgcgcaaggcgttgcgcctgatgcgcaaatccaacccggccctgctggagtggctcggctcgccgctggtgtatcgggaagagcctggcgtgcgcgaggaactgctctggctgggcagcgcctttcactccgtaccaggcagtcgccatcactacctgtcgatggcacgcaagaactaccgcggctacctgaagggcgacagcgtccggctgaagaaatacctctacgtcctgcgcccgttgttcgcggtgcgttggctggatgcaggcctgggcttgccgccggtggcgttcgagaggctagtggaagccacgctggacgacccgtcgctgcgcgaagagctggatgccctgctgagcctcaagcgtcagcgcgacgaatcggcctacggccctccgcgcctggcgctgcaacgcttcatcgaagcggagttgctccaggccgaacgaggggccgcccaaccaaccggcgcgcgccaggacagccgactgctggatcgctacctccacgacaagatatggcaatacacaagggaaacctcatga

SEQ ID NO: 354796 - DNA, 1026 bp, Pseudomonas aeruginosa
atgagaaaggacctcatcgaactcgacggcagcgaaggcggcgggcagatcctgcgtagcgccctgagcctgtcgatgaccagcggccagccgctgcgcatccgcaacatccgtggccggcgcagccgtccggggctgctgcgccagcacctcaccgcggtgcgcgcggcggcggaaatctgcgcggccgaggtcgagggtgccgagctcggctcacgcgagctggcgttccggcccggtgcgatccgcgccggcgactacgccttcgccatcggctccgccggcagttgctcgctggtactgcaaaccctgctgccggcgctgctcgcggccaacggcgaaagccgggtgaggatcagcggcggcacccacaatccactggcgccgccggcggactttctccgcgacagctggctgccgctgctgcggcggatgggcgcggaagtcgacctggaactgctgcgccacggcttcgtacccgccggcggtggcgagctgctggcgcgggtacgcccggcgcgctggcggccgctgcaactggagcatcccggcacggcgctgcggcgccaggcgcgggcgctgctcgccgggattcccgggcacgtcggcgagcgcgagctggagagggtccgccagcgcctcggttggagcgacgaagaacgccagctggagttcctcgcggaggaccaggggccgggcaacgccctgctgctgcggatcgactgcgagcacatctgcgcgaccttctgcgccttcggccaggccggcgtcagcgccgaacgggtggcggaacaggtcgcgacgcaagccatcggctggatggaaagcggctgcgcggcggacgagcacctcgccgaccaattgctgctgcccatggccctggccggcgccggcagcttcaccacgccacggctgagcgctcatctgcaaagcaaccgccggattatcgaacgcttcctgccggtgaggatcggcgaccaggcgctggacggcggcggtcatcgcatcgtcatcacatcggcttga

SEQ ID NO: 354797 - DNA, 378 bp, Pseudomonas aeruginosa
atgtcttcttcgcgtctcggcgtgcttgtcctcgccctgctcctgctcaccgccaccctgctcggcggctgcgaaagcacccaccagtacctgctcgccaagggctacccgcccgcctatgccgacggtttcgacgatggctgcggtagcggccgccaggcggccggctcgatcagcggcgaattccgcaaggacgtcccccactacctgcgcgaggcgatctacgccagcggctggggcgacggcttcgagcaatgccggtcgatggcgcggagcgaggagcggcggcgtttcgaggaacgccagtgggacgaccgcgacgacgattggcagcgcgaccgcgaccgcgcgctggcccgggccttgcgcgagcgctga

SEQ ID NO: 354798 - DNA, 375 bp, Pseudomonas aeruginosa; identical to SEQ ID NO: 354742

SEQ ID NO: 354799 - DNA, 2751 bp, Pseudomonas aeruginosa
atgaccgctggcgggagcggcgtggcgagcctccggggcgtttcgctgcgctacggcgagacgcgtgcggttgacgacgtcagcctggagatcccggccaaccgcatggtcggcctgatcggtccggacggggtcggcaagtccagcctgctggcgctgctggccggcgcacggaagatgcaggatggcgagatccgcgtgctcgatggcgacatgcgcgaccgccgccaccgccgggcggtctgcccgcgcatcgcctacatgccccaggggctgggcaagaacctctacccgacgctctcggtgttcgagaacgtcgacttcttcggtcggctgttcggtcacgacaaggccgagcgcgagcggcgcatcgccgatctgctgcaaagcaccggattggcgccgttcgccgagcgtcctgcgggcaagctgtccggcggcatgaagcagaagctcgggctgtgctgcgcgctgatccacgatcccgacctgctgatcctcgacgagccgaccaccggcgtcgacccgctgtcgcgcaaccagttctgggagctgatcggccgtatccgcgcgggccgcgaaggcatgagcgtgctggtcgccaccgcctacatggaggaagccgagcgcttcgactggctggtggcgatggatgacggaaaggtcctggccaccggtacgccgcaggagttgcgcgagcgtaccgggacgcagagcctcgagtcggcgttcatcgccctgctgccggaaagcaagcgcgccggccaccatcgattggtgatcccgccgcgaccgcagagcgaaggcgcgccgcggatcgccatcgaggccgagggcctgacctgtcgtttcggcgacttcgtcgcggtcgatcacgtcagcttccgtatcgagcgtggggaaatcttcggcttcctcggctccaacggctgcggcaagtccaccaccatgaagatgctcaccggcctgctgccggcgagcgaaggcacgtgcgcgctgttcggccaggcggtggacgccagcgacatggcgacccgtcgccgggtcggctacatgtcccaggccttttccctgtatgccgagctgagcgtgcggcagaacctggtgctgcacgcccggctgttccacctgccggcggctggtatccagccacgggtcggcgaaatgctccggcgcttcgacctggagaaggtggccgacgagctgcccaacgacctgccgctgggcattcgccagcgtctgtcgctggcggtggcggtgatccacaagccggaaatcctgatcctcgacgagcccacttcgggggtcgacccggtggctcgcgacggcttctgggagctgatggtcgagctgtcgcgccgcgacggggtgaccatcttcatttccacccacttcatgaacgaggcccagcgctgcgatcgcatctcgctgatgcatgccggcaaggtactggccagcgatactcccgatgagctggtgcgccagcgtggtctgccgaccctggaagcgaccttcatcgcttacctggaggaagccgcgggtgccgccgcgccagcgcaaccggccgaggcgccggccgtcgcggagcagcccggcgatggccaggggcgccaggcgcaacgcgaacgcttcagccccctgcggctgttcagctatgcgcgccgcgaagccatggagctgcgccgcgacccgatccgcctgaccctggccctgctcggcaccgcgctgctgatgttcatcatcggctatggcatcaacatggacgtcgaggacctctcctgggcggtcctcgaccgtgaccagaccaccaccagccaggcctacgcgctgaatatcgccggctcgcgctatttcgtcgaacatgcgccgatcaccgacccggacgacctcgaccggcgcctgcgcagcggcgagctgagcctggcggtggagattccgccgaacttcgggcgcgatctcaagcgtggctccgatccggccatcggcgtgtggatcgacggagcgatgccgacccgtgccaacaccgtgctcagctacgtgcagggtctgcacaccagctacctggcggacctctcgcggcaggcgggtggggccgaggccagcgcggcggccagcaccgaggtgcgctatcgctacaaccccgacgtggaaagcctgaaggcgatggtgccggcggtgatcccgctgctgctgatcatgatcccggccatgctcaccgccctcggcgtggtgcgcgaaaaggaactgggttcgatcaccaacctctatgtcaccccggtgacgcgcctggagttcctggtcggcaagcagttgccttacgtcgccatgggcatgatcaacttcctgctgatgctggtcctggccatcgtggtatttcgcgtgccgctcaagggcagcttcctggcgttgaccatcggcgctttcctctatgtggtcaccagcactggcctcgggctgttcctctcgacgttcatgcgcagccagatcgccgctgtattcggcgtggcgatcgccaccatgatcccggcgatccagttctccgggctgatccacccggtgtcctcgctggaaggtgcggcggcctggatcggcaagctctatccgacctcgcatttcctggtggtcagccgcggcgccttttccaaatcgctgggcctgtccgatctctgggcctactacctgccgcttgccgcttccatcgtggtgctgaccctgctcagcgtggcctgcctgaagaagcaggaggactga

SEQ ID NO: 354800 - DNA, 927 bp, Pseudomonas aeruginosa
gtggacgtggcggccaagcttcccgggcgggtcgccgagatcaaggtcgacgagggcgacttcgtcaaggccggcgaaatcgtcgcgcggatggatacccaggtgctcgaggcgcagttggcccaggcccaggcccaggtgcgccaggcggagaacgccaagctcaccgcgacctcgctggtggcccagcgcgagagcgagaagagcaccgcccaggccgtggtggcgcagcgccaggccgaactgacagcggcgcagaagcgcttcacccgtaccgaggcgctggtcaagcgcaatgccctgccgcaacagcaactcgatgacgatcgggcgaccctgcagagcgcccaggcggcgttgtccgcggcacgctcgcaagtgatttcggcgcaggcggcgatcgaggccgggcgttcccaggtaatcgaggcgcagtcggccatcgaggcggccaaggccagcgtcgcccggctccaggcggatatcgacgacagcctgctcaaggcgccgcgcaacggccgcgtgcagtaccgcgtggcacagccgggggaagtgctgccggccggtggcaagctcctcaacatggtcgacctggccgacgtctacatgactttcttcctgccatccatgcaggccggcagggtcggactgggccaggaagtgcgcttggtgatcgacgcggtgccggactacgtgatcccggccaaggtttcctatgtcgccagcgtcgcccagttcaccccgaaaacggtggaaaccgccaacgagcgggagaagctgatgttccgggtcaaggcgcggctcgatccggcgctgctggaaaaatacatcacctacgtcaagaccggcgtgcccggaatggcctacctgcgactggaccctgaggtcgagtggccggccaacctgcagatcaaggttccgcaatga

SEQ ID NO: 354801 - DNA, 1038 bp, Pseudomonas aeruginosa
atgggcgtcgacaccgccggtgagcaccttgccggagctggggatcacggtgttgtaggcccgcgccagacgggtgatggagtcgagcaggatgaccacgtccttcttgtgctcgaccaggcgcttggccttctcgatcaccatctcggcgacctgtacgtgacgggtcggcggttcgtcaaaggtcgaggcgaccacttcgccgcgcacggtgcgctgcatttcggtcacttcctcagggcgctcgtcgatcagcaggacgatcaggtggcattcggggttgttgcgggtgatgttgctggcgatgttctgcagcatgatggtcttgcccgccttcggcggcgccacgatcaggccgcgctggcccttgccgatcggcgcgcagaggtcgatgacgcggccggtcaggtcttcggtggagccgttgccggcttccatcttcatccgctcgttggggaacagcggcgtcaggttctcgaagagaatcttgttcttcgcattctccggacgatcgaagttgatcgagtcgaccttgagcagggcgaagtagcgttcgccctctttcggcggccggatcttgccgatgatggtgtcgcccgtgcgcaggttgaagcgccggatctggctcggcgagacatagatgtcgtcggggccggccaggtaggaagagtcggcggagcgcaggaagccgaagccgtcctgaagaatctccagcacgccatcgccggagatctcttcaccacttttcgcgtgcttcttcagcagggcgaagatgatgtcctgcttgcgcgaacgggccatgttttccaggcccatggcatcggacatttccagcagttcggcaatcggcttttgcttgagttcggtcagattcataggaaagagataggtacgcagaaagaggaattggagaaagcgtcgagcttgggaaagccgtgtcgcaagggggcgacaggagcgctagaaagttcgagtaggaagtgcgtccgggacggcatgcagaaggcgacggaaaaaacgtcgcgaacccgaatttaa

SEQ ID NO: 354802 - DNA, 294 bp, Pseudomonas aeruginosa
atggcggcgcacatggtccagcgccttgtcgccgagcttctgccagcgcggcttgcgcgccagcaaccggcgtccgtggcggcgtccgaggaagtaccagagttggtcaccggcgtagctgccgaggaaggcggtgagaatcacggtatccagctgcatgtagccgcggaaggcaaggaacccggccagcacgagaatggtttcgccctcgaagaaagtaccgagaaaaagggcgaaatagccgaagtcctgcaggaattgttggagcatcatcggggcagcgaagcgaaatga

SEQ ID NO: 354803 - DNA, 783 bp, Pseudomonas aeruginosa
atgtcctcgctcgatccgtcagtcctgttcgccgccctgccgttcagcctatggcaatggctgctggtcgaactggccatcgtcctcgcctatgtggtgttcggcatcgccggcttcggcaccgcgctggtcgccggcccgttgctggccggggtgctgccgctgtcgcagatcattccgctgctggtcctgctggatttcagcgcgtcgttcggcaactggctgccggcgcggcggcagatcgccatcactgagctcaagcgtctgctgccctgcatgctgctgggctgtgcgctgggggcgtacggacttctggcgctacgcgcggagctgctgatgctggccctcggcgtgttcgtcagtctctatgcgctctacgcgctgttcctccagccacgcggccagccgcgctggcgggcgacctgggcgttgccgttcggtgtcttcggcgggctgttcggcgcgttgttcggcagcggcggcttcctttattcgctgtacctgaacggacgcctggcgagcaaggagcagatgcgcgccacccagagcgcgttgatcggctgtagcaccttcgtccgcctggggctgttcctgctcgccgggctgtatgccgcgcgcgagccctggctgctcgccgcctgcctgctgccgggcatggcgctgggcctgtggatcggccgtcgggtgaccctgcgtctgtcgcgtgaagccttcgtccgcctggtcacctggctggtgctgtgcagcggcctggcgctggtcgggcgctacctggccgcttga

SEQ ID NO: 354804 - DNA, 492 bp, Pseudomonas aeruginosa
atgaacgccggactgcagtaccgcgtcgaacagttcctctaccgccacgccgaactctgcgatgcccaggactgggacggctacctcgcgcagttcgacgaacagtgcgagttccacctgccgcagtgggagtccgagcagcgctacacccgcgatccgaagcgcgagatgtcgctgatctactaccccagccgtgccggcctggaagaccgggtgttccgtatccgcaccggcaaggccgcgtccaccgtgccgatgccgcgcaccctgcaccagatcggcaacgtgcgcatcgccgaggaaggcgaaggcctgctgcgagtgcgggtcaactggcagaccctgttccagcgcctggaccagaccggcagcttcttcggccatgccacctaccgcctgaaaccccatggagaggcctggctgatcgcgcgcaagcacatcgtcctgctcaacgaccggatcgactcggtcctcgacttctaccacctctga

SEQ ID NO: 354805 - DNA, 468 bp, Pseudomonas aeruginosa
atgaacctttacctactgctgaagaccctgcatatcctttcctcgaccattcttttcggcaccggcctggggtcggcctactacgccctgcgtgcctggcgcagcgggcagttgccggtaatcgcagtgaccttccgccacctggtcgccgccgactggctgttcatcgccaccaccgcggtgttccagccgctcagcggcctggccatggtgcatgtcgccggctggtcgctggcccagggctggttgctgtggagcctgggcctctacgtgttcgccgggctctgctggctaccggtggtgtggttgcagatccgcgtacgcgacatggccgaggcggccttgcgcgaggcgcggcccatcgaaccgctggcgtaccgctacatgaacgcctggttcatcctcggctggccggccttcatcgccttcatggtcatcttctacctgatggtcaacaagccggtctga

SEQ ID NO: 354806 - DNA, 558 bp, Pseudomonas aeruginosa
gtgtgcgagagcgtcgaccgagcccttgtccatctgcaggttgagcaggccgtcgccgtcgaaattgaggttgatgccctggcctgcgcccagggccacgtcgccgagttgcgcctggatcacgccgtcgttgctgacccgggcgcccagcagggcgatgctgccgccttcgctggcttgcaggctgccggcattgcttacggttgcgccggagtcgccggagaactggtagttgccggcgaggaagtccctgtcggccaggtccagggtggaagccaccaggccgcctacattgacctgggcggacttgccgaagaccacgccgttgggattgaccaggaagaccttgccgttggcatctatccgcccctggatatcgctgccgttgcggccgatcacccggttcagggcgacggcgtcctggcccggctggtggaagctgacccgctcatcggcacggacgctgaactcgttccaattggtgatcagcttgtggctctgctggtcgatgaccatatgccggccatcggtggatgtctggaatccggcatcgcctga

SEQ ID NO: 354807 - DNA, 804 bp, Pseudomonas aeruginosa
atggtccttcaactggccggagatggcaaaatcggcccggctgttggagatgctggccacgcccctggctgtgctgatgttttcggctgcgagtccgcccagagcataggtgtggcggttgccgaccagcgtgccgctggcgctggcgttgtcgatactacccaggttcagtgcgaccagcccgccgaggctgttcagcttcgaggccgcggcgatacggatgtcgctggcgttcacattgtcgatgcgaccgaggttgacggcggccaggctaccgacctggacgttgtagtgggtggcctgtgctccatcggcggaaatgcgttccaggttcaggttgcggagggtgccccggttgacgctgaacaggccggagtaggcgccggtgccgtagacggcgagattatcgatggtgttgcccaggccgtcgaaggtaccgccgaaggcgctggcgttgcctatcgacaggaagctggaatggccgcctgcgattcgattgccgagggcatagctgccgcccaggttcctatcgatgccgcgcaactgctgcaggtcctggatcacgctgtagtcccgcccattggcgcggaatcctgcgttcttgccggacagggtgatccgggtgccttcggccagggcataacccttgtccgaattgaattcgacccgggctccctggccagtgagagagaggctgttgtcgatacggagagggcgctgcccggcattgagagtaaggctggcgttttctccctgggccgtcagcgcgccattgatcctgaggtccccgcgctcggcggttag

SEQ ID NO: 354808 - DNA, 1653 bp, Pseudomonas aeruginosa
atgacccgaacagctgaaagccttgcccatgaaaccctgactctcctcaagccgttctggccgcacgtcctgctttcggtactgctgggaatcgccggcggcctcagcgtcacggccctgctggccactatcaacactgcaatgaatacagaaggcggcccgaacctgcacgtggccctgcttttcgccctcctgtgcgtcatgaccctggtctgctcgaccctgtcgaaactgctgacgaattatgttggccagcgcgtggtcgccaccctgcgtcgagacttggccgccaggattctcgccgcgccgatcgaacaactggaacgctatcgtgcgcatcgcctgatcccggtactgctcaacgacgtcggcgcactcagcgtcttcgctctgagcgtatcgcccatgctcatcgccttcactgtgaccatcggctgcctgagttacctggccttgctatcctggcagatcctgctggtcacggtgctgacagtggtgctcggtagtggcgcccaatatctggcccaccgtcgcggcacgcatagcctacaggcagctcgcgacggcgaggacgaactgcagaagcactaccaagccatttccgccggagccaaggaactgcgcatacagcgcgaacgccgcatcgatttgctggagaggcagatccatggcacgacagaagacatctgtaaggccaacgtacgctccgccgccatattcataagcgccgagaccttcggctcgatgctgttcttcgcggtgatcggaatggcgatcgccttcctggcactctggcccgctgccgaaagaaccgtgttgggaggattcgtgctggtcatgctgtacatgaaggctcccctggaacaactggtcatcaacattcccaacctgagtcgcgccaagatcgcactacgccgtatcggcgagctggcaggacagttctcctcctccgagccacaccttctggaaagcactcccgctccggcggacatgagcctggagcgaatcgaactgcgccaggtgcgctacgactacccacaatccgaaggcggtcagtctttccatctcggccctctcgacctgaccattcgccggggcgaaatcgtcttcgtcgtcggggagaacggctgcggcaaaaccacgttgatcaagctgctcctgggtctatacaccccacagcagggcgaaatccgtctgaacggcaagactgtggacgacgcgcgacgagacgactaccgccaattgttcgccaccgtcctcaccgactactacctgttcgacgaattgcttcgcggccgcaccgaattgccagcggaagcccacaaatacctggagcgcctggacatcgcacacaaggtgggtatccgcaatggcagcttcaccaccaccgacctctccactggtcaacgcaaacgcctagcgctgatcaacgcctggctggacgaccgcccagtgctggtattcgacgaatgggcggccgaccaggaccccgcattccgccgcgtgttctacaccgagttgctgcccgaactgaaacgccagggccgcacgctcatcgtcatatcccacgacgaccgttacttcgacatcgccgacaaattggtacatatgcacgccggccagattgtggaacccgcgctgcaccccgcctga

SEQ ID NO: 354809 - DNA, 828 bp, Pseudomonas aeruginosa
atgaagaaacggaaactcgcctacatctggtcgctgcgcaatgctgcagcggacaaggccggtcagtatgtcccctacaagggcgaagagcgctacatgaagtcggtgctggagtctctcgtcgagggattgaaccagacgtcgctgggagaggcatacgagttggtcggcgtgatctatgacgacgatgcggggttgccgcgcgaccaggaaaaaatcagggactacggtttcgcctatcgtcccgggcagcaatggttctatccggcagacctgcaggtgcaaggcaagaccctgaacgacctcttgctcagcgtgccttccacctaccgtcggtacccacggggtacgcccgagcacgtggccggcaagagcgatttcgagcgacgcctgcatgacaccctggtggagctgggcgccgatgtagtggtattggacgggctcctggtaatcctcgatgagctggtgcgcccaggcgctccgttcgcacgacggatcatgaatatccatcctggcgtgacgcgcgaggactcgccttacgagcgtcgtggtgcctatgcgaccctggatgccctctatggagcgcgtggcgagaaggtggtggattggtcgaccctggaaaaggtcgcggtcgagccgctgtactggaccggggcatccttccactatgtggacaatggcatcgattccggcgaggtattccacgatgtgttgaagaccgagatatcgcccgaggataccatcctcgaactacgctggaacaacttcaacaacagtctgttcccggcgctgcatgagggcctggcgctgctggcggaaaaaggctga

SEQ ID NO: 354810 - DNA, 447 bp, Pseudomonas aeruginosa; identical to SEQ ID NO: 320902

SEQ ID NO: 354811 - DNA, 867 bp, Pseudomonas aeruginosa
atgacggattccacccgcgacgtcccggtgttcaagctctacggcgctcccctcgaatggccgaccccggacctgctgcactgcgagtcgatccccgcccgcagtcgtctgcacgactgggagatcaagccgcaccggcacgccgatctcgctcagttgctctacgtgcgcaagggctgggcgcagctccaggtcgagggcgagccgactcgcgtcgagcagccttccatccagttcgtaccgccgttgtgcatccatggcttccagttctccgagcgcatcgacggctacgtgctgacgctcgccgcaccgttgctggcccgcttgcaggcgcacctcggcgcgcagcgccaggcgctggaggcgccggggttgtacccggtgggcgcggaccggcgctatatcgacacgctgttcgacgccatagacggcgagtacgccggcgctgcgccggcgcgcgagctgttgttgcagtcgctgatcggcgtgctggcggtgtggctggggcggcaggtgatggtccggcgggcggaggcacggccgggtcgtggtcaggaatacctatcggccttttcgcaactggtcgagcggcatttccgcgagcacctgggaatcgacgagtacgcgcgtcgcctgggcatctccccggcacacctgaacagcgtggcgcgccgcctcagcgggcagaccgcactgggcatcgtgcaccagcgcctgctgctggaggccaagcgcgacctggtctacacggcgatgacggtgaacgagatcgccgaccgcctcggcttcagcgagccggcctacttcacccgtttcttcaagcgcctgagcggcgtctcgccgagcgttttccgtaagggcgactag

SEQ ID NO: 354812 - DNA, 1185 bp, Pseudomonas aeruginosa
atgaagactcaagtcgccatcatcggcgccggtccgtccggcctcctgctcggccagttgctgcacaaggccggcatcgacaacgtgatcctcgaacgccagaccccggactacgtgctcggccgcatccgcgccggcgtgctggaacagggtatggtcgacctgctgcgcgaggccggcgtcgaccggcgcatggcgcgcgacgggctggtccacgaaggcgtggagatcgccttcgccgggcagcgccggcgcatcgacctgaagcgcctgagcggcggcaagacggtgacggtctacggccagaccgaggtcacccgcgacctcatggaagcccgcgaagcctgcggcgccactaccgtctaccaggccgccgaggtgcgcctgcacgacctgcaaggtgagcgcccctacgtgaccttcgaacgcgacggcgaacggctgcgcctggattgcgactacatcgccggctgcgatggcttccacggcatctcgcggcaatcgatcccggcggagcggctgaaggtcttcgagcgggtctatccgttcggctggctcggcctgctcgccgacaccccgccggtcagccacgaactgatctacgccaaccatccgcgcggcttcgccctgtgcagccagcgttcggcgacccgcagccgctactacgtgcaggtgccattgtcggagaaggtcgaggactggtccgacgagcgcttctggacggaactgaaagcgcgcctcccggccgaggtggcggagaaactggtgaccggtccttcgctggagaagagcatcgcgccgctgcgcagcttcgtggtcgagccgatgcagcatggccggctgttcctcgccggcgacgccgcgcacatcgtgccgcccaccggcgccaagggactgaacctggcggccagcgacgtcagcacgctctaccggctgctgctgaaggcctaccgcgaagggcggggcgaactgctggaacgctactcggcaatctgcctgcggcggatctggaaggccgaacgcttctcctggtggatgacttcggtgctgcatcgcttccccgacaccgacgcgttcagccagcgcatccagcagaccgaactggagtactacctgggctccgaggcgggcctggcgaccatcgccgagaactatgtcggcctgccctacgaggaaatcgagtag

SEQ ID NO: 354813 - DNA, 1506 bp, Pseudomonas aeruginosa
ttgtccgatctcgcccagaacccgcccgccgtccgtaccgtcctcgccggcctgatgctgtcgatcttcctcagcgccctcgaccagaccatcgtcgccgtctccctgccggcgatctcggccgacttcgccgacctcgacctgctggcctgggtgatctcggcctacatggtggcgatgaccgtatcgatgccgatctacggcaagctcggcgacctctacggccgccgccgtctgatgctcttcgccatcgtcgtgttcaccgccgcctcgctgctttgcgggctcgcgcagagcatgggccaactggtgctggcgcgagtgctgcaggggatcggcgcgggcgggctgatggcggtgagccaggcgatcatcggcgacatcgtcccgccgcgcgagcgcggccgctaccagggttacttcagcagcatgtacgccatcgccagcgtcgccggcccggtgctcgggggcctgctcaccgagtacctgtcgtggcgctgggtattctggatcaacctgccgatcggccttctcgcgctggccatctcgcggcgaaccctggtcggcctgccggtgccgcgccggcaaccggtgatcgactacctgggcatcgtgctgatggtggtgggcctcaccgcgctgctcctggccatcacccagatcggccagggcgcagcctggagcgaccctgcgctgctcggcctgttcgccctggcggcgctcgccctgctgctgttcgtcgcccaggagcggcgcttccgcgaaccgctggtgccgatgcaactgttcgccgtccgcgccgccaccctcagttggctggttgcgttcttcgccagcttccaggccatctcgctgaccgtgctggtaccgctgcgctaccagagcgttaccggcgccggcgccgacagcgccgcgctgcatctgctgccgctggtcatgggcctgccgctgggcgcgtactgctgcgggcggctgaccgccagcctgggacgctacaagccgctgatcctgctcggcgccgtcctgttgccctgcggcatcgccggcctggccctggtcccggtcggcgaccactggctgtccgggctgtgcatgctgctcaccgggatcgccatcggtacccagttcccgaccagcctggtggccgcgcagaacgccgtggagcaacgccacatcggcgtcgccaccagcaacgcgacgttgttccgctccctcggcggggcagtcggggtggcgctgatgtcggcgatcctgctggccctgctcaagcacctgcggatcggcggcgggctcgaccagggcttttccgagagcgccctgctgagcagcctggacgccgccagcgggccggcccgggtgatcctccagcatgtcctcgcggatgccttcaaggtgctcttcctggtcaacgcggcggtggcgctgctcggcctggcggtggcctcggcactgcccgacatgaccctgcgcggccgcggcgcgacgcaaccgacggcaggcgagtga

SEQ ID NO: 354814 - DNA, 447 bp, Pseudomonas aeruginosa; identical to SEQ ID NO: 320906

SEQ ID NO: 354815 - DNA, 855 bp, Pseudomonas aeruginosa
atgagcgcgccgcgatcggttctcgccggcctgatcggtgccggcatccaggcgtcgcggacccctgccctgcacgagcgcgagggcgacgcccagggcatccgctatctgtaccggctgatcgatctcgacccgctgggcaagtcggcggacgacctggagttcctgctcgccgccgccagcgacctcggcttcaccgggctgaacgtcaccttcccctgcaagcaggcgatcatccccctgctcgacgacctctccgccgaggcacgcggcatcggcgcggtgaacaccgtggtgctgcgcgatggccggcgcatcggccacaacaccgactgcctgggcttcgccgagggctttcggcgcggcctggccgacgcgccgcgccagcgcgtggtgcagatgggcgcgggcggcgccggcgcggcagtggcccatgcgctgctcgccgagggcgtcgagcggctggtcctgttcgacgtcgacccggcgcgggcccaggccctcgcggacaacctcaaccagcacttcggcgcgccacgagcgctcgccggcagcgacctggccggcgccctgggcgacgcccagggattggtcaacaccaccccggtgggcatggccaagctacccggcatgccggtgccggcggaactgttgcgcgccgacctgtgggtcgccgaggtgatctactttccgctggaaaccgagctgctgcgccaggcccgcgccctcggctgccgcacactggacggcggcaccatggcggtgttccaggcggtgaaggcattcgaactgttcagcggggtggcggccgacgccgcgcgcatgcaggcgcacttcgccagcctgggcgactga

SEQ ID NO: 354816 - DNA, 669 bp, Pseudomonas aeruginosa
atgtccaagcctgatcccgccgtcgtggaggaatccgctccgcgcggcaagggacgcaagaacaatcccgagaagacccgccaggacatcctccgcgccgccatcgacgagttcgtcgcccagggcctctcgggtgcgcgggtggacgccatcgccgagcgcacgcatacctcgaagcggatgatctattactacttcggcagcaaggagcagctctaccaggccgtgctggagaagctctacagcgacatccgcggtatcgagggcaccctgcggctgggcgcgctgccgccggccaaggcgatggagaagctggtggagttcagcttcgactaccacgaccggcatgtggatttcgtgcgcatcatcagcatcgagaacatccacaagggcgagcacatcgccagcagcgaactggtgcagagcgtcaacagctcgatcgtccagagcatcgccgagattctccgccgcggcgaagcggaaggggtgttccgcgccgggctggaggcgctcgacgtgcacatgctgatcagttcgttctgcttctaccgggtgtccaatcgctacaccgtgtcgcggatctttcgcaccgacctgcacgacgccgaggttcgccagcggcaccggcggatgattggcgaggcggtattgcgctacatccgtgcctga

SEQ ID NO: 354817 - DNA, 1905 bp, Pseudomonas aeruginosa
atgcagcgttcgatcgccaccgtatccctgagcggcaccctgccggaaaagctcgaggccatcgccgccgccggtttcgacggggtggaaatcttcgagaacgacctgcttcattacgacggcagcccgcgcgacgtacgccggctgtgtgccgacctggacctggaaatcctgctattccagccgttccgcgacttcgagggctgccgccgggaacgcctggagcgaaacctggagcgcgccgaacgcaagttcgacctgatgcaggaactcggcaccgacctggtgctggtgtgcagcaacgtcgctgccgatgccctcggcgaaccggcgctgctggccgatgacctccggcagctggccgagcgcgccgccgtccgcggcctgcgcatcggctacgaggcgctggcctgggggcgccaggtgaacacctgggagcaggcctgggacctggtgcggcgggccgaccaggcgaacctcgggctgatcctcgacagcttccacaccctctcgctggacggcgatccccgcggcatcgccgatcttccgggggaaaagatcttcttcgtgcagatggccgacgcgcccttgctggcaatggacgtgctggaatggagccggcacttccgctgcttcccgggtcagggcggcttcgacctggcaggcttcctcgcgccggtcgtcgcgtccggctatcgcggtccgctgtcgctggaggtcttcaacgacggcttccgcgccgcgccgacccgcgccaacgccgtcgacggcctgcgctcgctgctctacctcgaggagaagacccgcgagcacctgcaacgccagacgccgcacgtggcggtggacgagctgttcgcgccgccgccggcgagcctctgcgacggcatcgagttcctcgagttcgccgtcgacgagacgctcagcgcgcgccttggccagtggttgcagcgactgggcttcgccagggccggcgagcaccgttcgaagaatgtcagcctgttgcgccagggcgacatcaacctggtactgaacgccgagccctattccttcgcccacggtttcttcgaggcccacggaccgtccttgtgcgccaccgcgctgcgcgtgcgtgacgccggccaggcgctggagcgcgctcgtgcgtacggaggccagccgtaccgcggactgctcggccccaacgagcgggaaatcccggcggtgcgcgccctcgacggcagcctgctgtatctggtcgagcggcacaccgagggccgcagcatctacgacagcgacttcgtgacgaacgacgccgacacctccggcctcggcctgcggcgcgtcgaccacgtggccctggcgctgcccgccgaaggcctggacagctgggtgctgttctacaagagcctgttcgacttcggcgccgatgacgaggtggtgctgcccgacccctatggcctggtcaccagtcgcgccgtgcgtagcccctgcggcagcgtgcgcctgccgctgaacatttccgaggaccgcaacaccgccatcgcccgttcgctgtccagctatcgcggttccggcgtgcaccacatcgccttcgattgcgccgacatcttcgccgccgtggcccaggccaaggaggccggggtcgcactgctggaaatcccgctgaactattacgacgacctcgccgcgcgcttcgacttcgacgacgagttcctcagcgaactggcctactacaacgtcctctacgaccgcgacgcccagggcggcgagctgttccatgtgttcaccgagccgttcgaggagcgcttcttcttcgagatcctccagcgccgccacgactacgccggctacggcgcggccaacgtgccggtgcgcctggcggcgatggcgcaagcgcggcggggtgtgcgccgggtcaagctgtga

SEQ ID NO: 354818 - DNA, 1326 bp, Pseudomonas aeruginosa; identical to SEQ ID NO: 320910

SEQ ID NO: 354819 - DNA, 138 bp, Pseudomonas aeruginosa
atgctcgggatgcggctgccgccaggggtgccgaaggcggcgaagtcggtcgggctttccaggaagctcgggctcatgctcgacagcgggcgcttgccggccgccaccgcgttcgcctggctgccggccaggccgtag

SEQ ID NO: 354820 - DNA, 303 bp, Pseudomonas aeruginosa
atgttcaagacagcgagcgagcatattgcgcgccattgcgtggccgcgttcggcggcgatcgtgaaccaggtccgcgccagggtcgggtcgcgctggatgccttggccgtccagaaggatctgtccgaggagggcctgggcttccgtcaggccctcgcgagcagcgccaaggatggcctgggcaacctcgcccggggtaccggccagttgtgcggcgaaaccttcggcgtccagcgcgtcgtgacgaagcagcaggtggcgcatgttcagagttccgaccagcgccgcaggagattgtggtag

SEQ ID NO: 354821 - DNA, 1338 bp, Pseudomonas aeruginosa
atggctaccgcggctgaagaaggtcttgtcgagcagggccaccttgagcatcgggatctgcatccgaccgatcagggccttcagcgaatcaggcagggtgcggtcatcgagaatgaattcgaacagcatcgacaccaggttgatgacgtcatcgtccacctggccgaccacccgagaacggccgctcttgtggctgacccgctggagcagttggtcgaccccgtcgcggacgtcgaactccgcggcgccagggcccggcaagtgctgttgcaggtgggaaagcaggcgcatcaggtcgttgctggaaatcggcgcggcattctcaggcgtttcgcgacggtagaaggaaggattgtcgcggacctgcgccagcagttcctgcagcgcgccgaagacttcctgctgaccgccgtcgagcagcgcagcctgtgcctgcagggtcccggcatcgcgtaccgcttcgggacggacagcgggctgacgccgcggcagcgcggatttgagttccggcagcacgcccgcagcgaccaggatctggttggcctcggcgtacaactggtcgcaatgggccaggacgtacttctcgaacagcttgagaatgatcagcttgaccttgatctcgacgccgagcccctggcaggcatcgaggaaagccgcggtcagcggacgcggagcgaggggattgctcttctcgtcgaccttccggccgaccaaggtgttcaggcgggtgctcaggtgggccagcgcggtggcatcgcggctcatcacccgcgccaccatcgcgtccaccgcgacggactcctccagttcctcgttctgtaccaggctgaggctgtcgaaggacacggtatccagggtcggcacggatttgccggactgtacctggttgagcgccgagaactcctcgaagaccttctgcaggtagacccgctcgatactcttgcgcttgaggcgcaggtcgcgcatggcttcgaagaaagcgttctgttcgaggttgctggtggctcggtcggccatttcgaagagggtgtcgtcggcgttgtcgaacaacgcctgcaacgcctgtttcagctgcaacgccgccttgtcgcgcacctgcacgaggatgaccggcaggcgccccgctccggcgttcggcgacggctcggaagcgaccctggtcaggtgcaccacattggcatcgttctgcatcgggactctcctgccaccctcgcggccgcgcatggaatggcaaaaatcgggcacagaggatcgattggcgtcgtccgtaacgtcaatttccaggcgtcaaaaacaagtatctacattcattatagagatactttcaaatctagatag

SEQ ID NO: 354822 - DNA, 234 bp, Pseudomonas aeruginosa
atgaccgacactcccgacgatcgaaccggagatgcctccggtctgtcgaagcgccaggcattccatcggcagcaccggcaacgggcggaggaagaggcgcggcgcctgctcgacgcccgcgccgaacagggcggccgctggctggactgggtcgcgggtcaactctacctcctgcgtccgccggaatacgcggccatggtgcgtcgcgaactgcagcgcctgagcggcgactga

SEQ ID NO: 354823 - DNA, 192 bp, Pseudomonas aeruginosa
gtgggcgatctgcggatagcggtggaagacctgggaaatcaggtcctggccgaggtattgggcgccttccgggtcgcgcggcagttcgtccatcagttcgtcgaaacgctcgaggaacagcccgtggttttcttccggcacctgctcggcctcgcccagggcgccgaggatgttgcgcaggtgctggagtag

SEQ ID NO: 354824 - DNA, 822 bp, Pseudomonas aeruginosa
gtgcagggcctcgcgataatcctcccgcgagcgtgggcgggacaataccacctgggtctgggtcagcaaactggtgagcggggtgcgcaactcgtgggcgatgtcggcggagaacgccgagaggcgctggaaggcttcttccaggcgcgccagcatggcgttcagctcgccggccagtccgcgcagctcctctggcatccggctggcgtcgagccgggtggtgagggagttggcggaaacccgcgcggcgacttcgcgcatccgtcgcagcggcgccaggctggcgccggtggcccaggcgccgagcagcgccgtggccagcgccgacaggctcatggtcagccagatcaactggcgcatgcgttgcaggaagtgctggtgatgactgatgtcgaggatcactgtgagttgcggcgaagcgtcgttgccgggctccagcggggcgccgagttcgcggttggcgggcaggccgggatgcgcaggctgcggcaggcgctcgaaccagaggctgccatccgggccgttcaggcgcaggccgaggtcgggatggcgtgccagttcgcgcagcagttccgcttcgcggcggcgcatctgttgttccgagccgaggccgcgcagctcatcgcgaaacaccgcgagcttggcggacatcgccatatggtcgagctcgacgaaatgctcgtcgatggccctgctgaagatcaatccggcgatcagcgagaccgccgccgtgcaggcggcgaacagcaggctcaggcggacgccgagggacatccgcgagccgaacccggcgctcattcgtcgcgctcttcgagaacgtag

SEQ ID NO: 354825 - DNA, 708 bp, Pseudomonas aeruginosa
gtgaacctgctgctcctcgacgacgccgacttcgtgtcggcggatcgtgcggtcctgcacgatcgccgcctcaagcacctgcacgaagtgcaccgcgccgagaacggcgacaccctgcgggtcggccgcctcggcggctggatgggcgaaggtcgcctgctgaagctcgacgccagcgaggcgaccctggaagtgcgcttcgaccagccgccgccggccaagctgccgatcaccctgctgctggccttgccgcgaccgaagatgctccgccgggtgttgcagaccatcgccgcgatgggcgtaccgaggctggtgctgctgaacagctaccgcgtggaaaagagcttctggcagaccccgttcctcgacccggcggcgatccgcgagaacctggtcctcggcctggagcaggcccgcgatacggtgctgccggaaatcatcgtcgagaagcgcttcaaacccttcgtcgaagaccgcctgccggccctggccgccggcagcctcggcctggtcggccatcccggtccctggccggcctgtccgcgcgcggtggagaagccggtgaccctggcgatcggcccggaaggcggctggattccctacgaggtcgacaagctgcgcgaagccggactgcatccggtgcagctcggcgaacgcatcctgcgcgtggaaaccgcggtcagcgccctgcttgcgcggttgttctga

SEQ ID NO: 354826 - DNA, 777 bp, Pseudomonas aeruginosa
gtgcaggtcggccaccgcacggctacgttgcaacgcctgcgggtcgccggcctgctgcgcgaggctggcgtccatcagttcctcgaggcgggcgaagctgtccagcgcctgctgtgcagtgcccaccagcacaccacgggcggcgctgcgttgctgatcggctgcggcgaggtcgtcgaaggccttgcggtaggcttcgatggcttcggcctggtgggccagggcggccgggtcgagctcgctgtcgcgcagcgcctgcaggcgctggagcatcccggccagggtctggcggacctgctcggcctggcgcgggtcgctgccggcttcgaaggccaggcggccttgttcggcttgctggggctgttccatcaggctggcgacttcggcgagctgctcgctgagggcggtctggtgcgtgagggtgcggttgctgctgatcaccaccagcagaagcagcgcgaggaggacaccgaaaccgaccatcagcttgcggctgacgctcagcttggccagttggagaacccaccaatcgtacatcgtcattactccaggcagtgcgacaccctgggttggcagccccatggcgtggcggaacaggtaatggctcagcgtcgtcgcgtccggcgtgcgggcgcggagggccggtacgtggccggcgggcgaggtcttatggttgtcgtgcggagccctgcgcgacagaggatgtcggccgggcggggaaaaccttcagtcttttaccggagttttttcagaacaaccgcgcaagcagggcgctga

SEQ ID NO: 354827 - DNA, 1164 bp, Pseudomonas aeruginosa
atgcaaagcagcacccaggatatggcccgggccggccggaccctcaccgaagccggtcgccagttgcgcgagagcaccgccagccgcgaccgcgccagcctctggctgatcgccgcgctggccctggccttcggctgcgtcgccggctgggcgatcaaccggcagatcgtccggccgctggacgaagccctcgcgcaggccgaggccatcgccgccggcgacctcggcaagcgtccgcagaatcccctgaccctccagcgccgcgacgaactgggccagttgcagcgagtcatgcagcgcatgggcgacagcctgcgcgagctggtcgggcggatcggcgacggcgtcagccagttggccagctccgccgaggaactctcggcggtcaccgagcagacccgcgccggggtcaacagccagaaagtggagaccgaccaggtcgccaccgccatgcatgagatggccgccaccgtgcaggacgtcgcgcgcaacgccgagctggcctcccaggccgctcgccaggccgatgaagaggcgcgccagggcgacgcggtggtcgaccaggcggtgacccgcatcgagcgcctggctagcgaaatggacgtttccagcgaagccatggcgcgcctgaagaacgacagcgagcagatcggcagcgtcctcgacgtgatcaagtcggtggccgagcaaaccaacctgctggcgctcaacgcagccatcgaagcggcacgcgccggcgacgccggacgcggcttcgcggtggtcgccgacgaggtccgcggcctggcccagcgcacccagcagtccaccgccgagatcgagggcctgatccagcgtctccagcagggcgccggcgaagccgccgaacgcctggagaacagccgctcgctgaccgccagcacggtggaactggcgcgccgcgccggcgccgcgctggacagcatcacccgcaccgtctccgacatccagaacatgaacctgcagatcgccactgccgcggagcaacagagcacggtggccgaggagatcaaccgcagcgtcctcagcgtacgcgacgtcgccgagcagtcggccgccgccagcgagcagaccgccgcctccagcggcgagctggcgcgcctgggcacgcagttgcaggcgcaggtgggacgcttccgcctgtaa

SEQ ID NO: 354828 - DNA, 462 bp, Pseudomonas aeruginosa; identical to SEQ ID NO: 318013

SEQ ID NO: 354829 - DNA, 735 bp, Pseudomonas aeruginosa
gtgattgaagtacgcaacctgctgaaggtcttcgatacccgcggccaggtagtgcgcgcggtggacgacgtgagtacccgcgtggccaggggcgaggtactggtggtgatcggtccgtccggttccggcaagtcgaccttcctgcgctgcctgaacggcctggaggagttcgacgaaggctcggtgagcatcgacggcgtcgacctggccgacccgaggaccgacatcaatgcctaccgccgcgaagtcggcatggtgttccagcatttcaacctgttcccgcacatgaccgtgctcgagaacctctgcctggcccagcgcgtggtgcgcaagcgcggcaaggccgagcgcgaggccaaggcgcgggcgctgctggccaaggtcggcatcgggcagaaggccgacgaatatccctcgcgcctgtccggcggccagcagcagcgcgtggcgatcgctcgcgcgttgtgcatggaccccaaggtgatgctgttcgacgaaccgacctcggcgctcgatccggagatggtcggcgaagtcctcgacgtcatgaagaccctggccgtggaaggcatgaccatggtctgcgtgacccacgagatgggctttgcccgcgaagtggccgaccgcgtgctgttcttcgaccacggcaagctgctggaggacgcgccgccggcgcagttcttcgacaatccgcaggacccgcgggcccaggccttcctccgccaggtcctctag

SEQ ID NO: 354830 - DNA, 963 bp, Pseudomonas aeruginosa
gtgaccaagaagaaacgttccgtctggccctggcacctgctgaccgggctgatcctgctggtcctggcctgggcgctgtggttctccacctcgctgatttcctatgaatggcgctggaaccgcgttccgcagtacttcgcctaccaggccgaggagcctttacgggccaacgagatcggccgggtcgaggctatcgaggaacagggcagggacgcgcgcgtcacgctgcttggcgagagcggcgagaagcaggtcgtgaccgttgcccaggacagcctgcaattctccgaaggcgacgacgtggccgagggcgacgcggtcggggtgacccgccactgggccgccggcccactgctctggggcctgtggaccaccctctggctatcgctggtgtccggtgccatcggtctggctatcggcctggtcgccggcctctgccggctgtcgaagaacccgaccctgcacgacctgtcgacgatctacgtcgagctggtgcgcggcacgccgttgctggtgcagatcttcatcttctacttcttcatcggcaccgtgctcaacctgtcccgcgagttcgccggggttgcggcgctggcgctgttcaccggcgcctacgtggccgagatcatccgggccggcgtgcagtccatcgcccgcggacagaacgaggccgcccgctccctgggcctgaacgccggccagtcgatgcgctacgtgatcctgccgcaggccttcaagcgcgtgctgccgccgctggccgggcagttcatcagcctggtcaaggacacctcgctggtctcggtgatcgccatcaccgaactgaccaagagcggccgcgaggcgatcaccacctcgttctccaccttcgagatctggttctgcgtcgccgcgttgtacctgctgttgaacctgcccctttcgcacatggcatcccgactggagcggaggctcggacaaagtgattga

SEQ ID NO: 354831 - DNA, 801 bp, Pseudomonas aeruginosa
atgaaaaagtatcttgcttcattggttctgggcgtctgcgccctggtgggcgtggcttcggtccaggcggccggcgcggtggaggacgcggtcaagcgcggcaccctgcgggtcggcatggacccgacctacatgccgttcgagatgaccaacaagcgtggccagatcatcggcttcgaagtcgacctgctcaaggccatggccaagtccatgggcgtcaagctggagctggtctccaccagctacgacggtatcatcccggcgctgctgaccgacaagttcgacatgatcggctcgggcatgaccctgacccaggagcgcaacctgcgcctgaacttctccgagcccttcatcgtggtcggccagaccctgctggtgcgcaaggaactggaaggcaagatcaagtcctacaaggacctgaacgatccgcagtacagcatcacctcgaagatcggcaccaccggtgagatcgttgcccgcaagctgatcagcaaggccaagtaccacggcttcgacaacgagccggaagcggtgatggacgtggtcaacggcaaggccgacgccttcatctacgactcgccctacaacgtggtggcggtgagcaagttcggcgccggcaagctggtctacctcgaccagccgttcacctacgagccgctggcgttcggcctgaagaaaggcgactacgacagcatcaatttcatcaacaacttcctccatcagatccgcgaagacggcacctatcagcgcatccacgacaagtggttcaagaacaccgagtggctgaaggaaatggaatga

SEQ ID NO: 354832 - DNA, 2586 bp, Pseudomonas aeruginosa
atgaataacccatccactacgaaagcaccgctggccgactacctcgctcatcttcccctggcggaagaggagcgggagcggcttggcgagtccgcttccttctccgagctgcacgctcgcctggcgggagcggaaggcgccgctgccgatgccgggggcgatcccgccctggcctcggtacgcgcccgcctgcagctgggcacccctgagctggacgacgccgagatgttcggcgtcgacgcccagggtcgcaccttcctcaagatttccccgccgatccgccgtaccaaggtgattcccgagccctggcgcaccaacatcctggtgcgcggctggcgtcggctgaccggacgcagcaacccgcccaagcccaagcgtgccctgccgcgggcccgctggcagcgggtcggctcgctgcgccggttcatcctgctgttgttgatgctggcgcagacctcggtcgccacctactacatgaaaggcatcctgccctaccagggctgggccttcgtcgacctggaggagctggcccagcagagcctgctggataccgtccagcaggtgctgccctatgtcatccagttcggcatcctggcgctcttcgcgatcctcttctgctgggtctcggccggcttctggaccgcgctgatgggcttctgggagctgctcaccgggcgtgaccgctaccggatctccggcagcagcgccggcagcgagccgatcgccgccgacgcccgcacggcgatcgtcatgccgatctgcaacgaagacgtgccgcgggtattcgccggcctgcgggcgaccgtcgagtcgatggccgccaccggcgagatggagcgcttcgacttcttcgtcctcagcgacaccaacgacccggatatcgccgtcgccgagcagcaggcctggctcgagctgtgccgcgagaccaagggcttcggcaagatcttctaccgtcgccgccggcgccgggtgaagcgcaagagcggcaacatcgacgacttctgccggcgctggggcggcgactaccgctacatggtggtgatggacgccgacagcgtgatgagcggcgactgcctggccaagctggtgcgcctgatggaggtcaatcctgaggcggggatcatccagaccgcgccgaaggcgtccggcatggacaccctgtatgcgcgcatgcagcagttcgccacccgcgtctacggcccgctgttcaccgccggcctgcacttctggcaactcggcgagtcgcactactggggccacaacgcgatcatccgcatgcagcccttcatcgaccactgcgccctggcgccgttgccgggcaagggctcgttcgccggcgcgatcctgtcccacgacttcgtcgaggctgcgttgatgcgccgtgccggctggggcgtgtggatcgcctacgacctcgacggcagctacgaagaactgccgccgaacctgctcgacgaactcaagcgcgaccgccgctggtgccacggcaacctgatgaacttccgcctgttcctggtcaagggcatgcacccggtgcaccgcgcggtgttcctcaccggggtcatgtcctacctgtcggcgccgttgtggttcttcttcctggtgctttccaccgcgctgctggcggtgcaccaactgatggagccgcagtacttcctggaaccgcggcagctgttcccgatctggccgcagtggcatccggagaaggccatcgcgttgttctccaccaccctgaccctgttgttcctgcccaagctgctcagcgtaatgctgatctgggccaagggcgccaagggtttcggcggggtgatccgggtgaccctgagcatgctcctggagatgttcttctcggtgctgctggcgccggtgcgcatgctcttccacacccgcttcgtgctggccgccttcctcggctggtcggtgcagtggaactcgccgcagcgcgacgacgacgccacgccctggagcgaggcgatccgccggcacggcatgcagaccctgctgggtatcgcctggaccctgctggtggcctggctcaacccgcgcttcctgtggtggctgtcgccgatcgtcggttcgctgatcctgtcgatcccggtatcggtgatctccagccgggtgaagctgggcctgcgcgcccgcgacgaaaagctgttcctgatcccggaggagtacgacacgccgcgcgagctgcgcgccaccgacgagtacacctacgagaaccgctggcatgcgctcaaggatggcttcctcaaggccgccgtcgatccgttgctcaacgccctggcctgcgccatgggcacggctcgccacaaccgtgcgcaagccatcgagacggtgcgcggcgagcgtatcggcaaggccatcgataagggcccggaacagctcgacggcgccacgcgcctggctctgttgagtgacccggtagcactttcgcgcctgcatacgcgggtctgggaagaggaccgcgacgactggctcggccgctggcgcaaggccgaggcggacgacccccacgccgccagcgtaccgctggcccaggtagtgcccggcgacgccggcctgctgcccgccgcccagtcctga

SEQ ID NO: 354833 - DNA, 1578 bp, Pseudomonas aeruginosa
gtgattttccgttccgtttcaaacaccgatttccgcgcccgcgtgcgcaccctgctgcttgccggctcgaccgcgctggcattcgtcgccgccccggtatgggcgttcagcatcgacgacgtggcgagcaaggccaaggacctggccggcgacaagtattccgcgccgaccagcaacctgccatcggaattcagcgaaatgaaattcgccgattaccagcagatccgtttcatcaacgagcgcgcctactggggcaagctgaagacgccgttcaagctgagcttctatcaccagggcatgcacttcgacacgccggtgaagatcaacgaggtgaccgctaccacggtcaagccgatcaagtacgatcgcaccaagttcgatttcggatccctgaagttcgacgagaatgccaccaaggatctcggctatgccggtttccgcgtgctctatccgatcaacaaggccgacaagcaggacgagatcgccaccttcctcggcgcgagctacttccgcgtggtcggcaagggccaggtctacggtctgtcggcgcgcggcctggcgatcgataccgcgctgccttcgggcgaagagttcccgcgcttccgcgaattctggatcgagcggccgaaggcgcaggacaagcaactggtgatctacgccctgctcgactcgccgcgggccaccggcgcctaccgcttcgtgctgcgtccgggcaaggatgcggtgatggatgtccaggcccgcgtgttcctccgcgacaaggtcagcaagctgggcctggcgccgctgaccagcatgtacctgttcggctccaaccagccgtccgagcagcacaacttccggcccgagctgcatgactccagcggcctgcagatccatgccggcaacggcgagtggctgtggcgtccgctgaacaatccgaagcacctgtcggtgagcaccttcagcgtcgagaacccgaaaggcttcggcctgctccagcgcggccgcgagttctcccgctacgaagacctggacgaccgctacgacctgcgtccgagcgcctggatcgagccgaagggcgactggggcaagggcaccgtggaactagtggaaatcccgaccccggacgaaaccaacgacaatatcgtcgcgttctggaaccccgagacccagcctgaggtcggaaagccgctggacttcgcctaccgcctgcactggaccatggatgaagacgagctgcacgacccgaaatcctcctgggtcaagcagaccatgcgctcggtcggcgacgtgaagcagaagaacctgatccgccagcaggacggcagcaccgccctggtcgtcgacttcgaagggccggccctgaaggacctggcgccggacgcgccggtgaccacccaggtcagcaccgacagcaacgccgaggtggtggagaacagcctgcgttacaacccggtcctgaaaggctggcgcctgacgctgcggatcaaggtcaaggatccgaagaagccggtggaaatgcgcgcggcgctggtcgacgaggcgcagaagccactgagcgaaacctggagctatcagctgcctgccgatgaataa

SEQ ID NO: 354834 - DNA, 438 bp, Pseudomonas aeruginosa
atgaaggcattgctgcagcgcgtcggcgcggcgcgggtggaggttggcggcgaaatcgtcggctccatcgatcgcggcctgctggtgctggtcggggtcgagcccgaggatggcgagcgttgcgcggcgaagatgctgcacaagctgctcaactacagggtgttcggcgacgacgagggcaagatgaaccggtccttgctcgacgtgcagggcggcttgctgctggtctcgcaattcaccctggcggcgaacacccgcagcggactgcgtccgagcttctccagcgcggcgccgccggcgcaaggagagacggtgttcgagcacctggtgaaactggcgcgggaggcctatccgcaggtggcgaccgggcgtttcggcgccgacatgcaggtgcacctggtcaacgacgggccggtgaccttcctgctggagagttga

SEQ ID NO: 354835 - DNA, 972 bp, Pseudomonas aeruginosa
atgctagttctgtatccggaaattaaaccctacgctcgccacgagctggccgtcgacgaaccgcatgtgctgtatgccgacgaaagcggttcgccggacggactgccggtcgtcttcgtccacggcggccccggctccggttgcgatgccctgtcgcgtcgcttcttcgatcccaacctctaccgtatcgtcaccttcgaccagcgcggttgcggccgttccacgccccacgccagcctggagaagaacagcacctgggagctggtggcggacatggagcgcctgcgcgagcacctgggtatcgagaagtgggtgctgttcggcggttcctggggctcgaccctgtcgctggcctacgcgcagacccatcccgagcgggtccatgcgctgatcctgcgcggcatcttcctctgccgtccgcaggacatccactggttctaccaggaaggcgccagccgcctgttccccgactattgggaagactatgtcgcgccgatcccgccggaagagcgcggcgacctgctggcggccttccacaagcgcctgaccggtagcgaccagatcgcccagatgcacgccgccaaggcctggtcgacctgggagggccgcaccgccacgctgcgccccaaccccatggtggtggaccgcttcaccgagccgggcagggcgctgtcgatctcgcgcatcgagaaccacttcttcgtcaaccagggcttcctcaggcccaaccagttgctcgaggacatgcaccgcatcgcccatctgcctggcgtgatcgtgcatggccgctacgacgccatctgtccgctggacaatgcctgggccctgcaccaggcctggccgaacagcgaactgcagatcatccgcgacgccgggcataccgccagcgagccggggatagtcgatgcgctggtgcgcgccaccaacgagatcggccggcgactgctcgacctgccgccggaggccgaatga

SEQ ID NO: 354836 - DNA, 477 bp, Pseudomonas aeruginosa
atggccgaggccttgcgacaccgtatccgcgccgccggcctgctggtggtggagcaacgcatcctgctggtccgccacgaggtcggcggcgacatctactggattccgcccggcggcggcttcgagtcggaatgcgacgaatcgacgaaggatgccgtccggcgcgagtttttcgaggagaccggcctgcgggtggacgtcggcccgctggtctacgtgcgcgaattcgccgaacccgccgccgggcgcttccacatggagctgttctaccgcatcgacgcctggcgtggcgagccgaccctggccaacctgaagggcctgggcggcgacgagttcgatatccgcgaggtcggctggatcgcccgcgacgaactgcctggcctgccgtcgttctatccggccgaactggccgacgacgtctggtcgcgcctggacgcgccgacgccgtcgatccgccacctcggcctgcaacgctag

SEQ ID NO: 354837 - DNA, 900 bp, Pseudomonas aeruginosa
atgaaaatccttgtatccagcactctcgcactctccctgtcgctcgccatcggcgccgcgcaggccgaggaactcagcggcaccctgaagaaggttgccgacaacggcacgataaccctgggttatcgcgatgcctcggtgcctttctcctaccttggcgataacagcggccagcccatgggctattcggtggaactggccgacaaggtggtggagcggctcaaaagcaccctcggcaagccggaactcaaggtgaagtacaacctggtcacttcgcagacccgtatccctctggtgcagaatggcaccgtcgacctggagtgcggctccaccggggtcaccgccgagcggcagaaacaggtggcgttctcctacggcttcatctacgtcaagggccagttgctgacccgcaaggacagcggcatcgcccacttcgacgacctcaagggcaagaacgtggtgaccaccgccggcaccaccaacgagcgctacctgaagaactacaacgccgaacacaagctggggatgaacgtggtcagcgccaaggaccacggcgaagccttccagatgctgcaatcgggtcgcgcggtggccttctacatggacgatgcgctgctctacggcgaacgcgccaaggcgcgccagccgcacgactgggtggtggtcggcgagccgcaatcgcgggagatctacagctgcatggtgcgcaaggacgacccgcagttccttgccctggtcaacgagaccctggccgggctgtatcgctcgggcgagatacagggcatctaccagcgctggttccagcagccgatcccgcccaaggggttgaacctggagtttcccatgaccgcggagctgaaggcgatcctcgagaaccccaccagcgatccagtgcagtga

SEQ ID NO: 354838 - DNA, 351 bp, Pseudomonas aeruginosa
atggaaccgacccgtatcgccaccaacgaccgcctgtccgccgcggtctgcttcgacgccctggtatttctttccggccaggtgccgggccaggccgaggatatccatggccagacccgcgaggtgctggcgaagatcgacgcgctgctggccgaggccgggtcgcgcaaggagcgtatcctcagcacgaccatctacctgaaggacatcgcccgcgatttcgccgccctgaacgaggtctggacccagtggttgccgaccggccaggcgcccagccggaccaccgtccaggcggagctggcgcgtccgtcggtgctggtggagatcaccgtggtggcggccaggggctga

SEQ ID NO: 354839 - DNA, 1251 bp, Pseudomonas aeruginosa
atggctcagcgggtttgcatcatcggcgccggcgtggtcggcctggccacggcctacgccctggttcgcgaaggattcgacgtgaccctggtggaagcgcgcgagcggggcgggctggaaaccagctacgccaatggcgggcagttgtcctatcgctacgtggcgccattggccgacagcggcgtgccggcccaggcgctcggctggctgctgcgcaacgatgcgccgttgcgcctgcggccgcgccttgatccggcgcagtggcgctggctgctgggcttcctcgcggcctgccgcggctcgctgaaccgccgcaatgccgcgcacctgctgcgcctggcattgctcagccagcgcaccctgcaggactggcgcgaggaggatggcctcgatggcttcgactggcggcgcaacggcaagctggtggcgtttcgccaaccggccagctttgcgcgggcccgccagggcctggccgatccttcggcgcaattcgtcctgaccgccgccgagtgcctcgcgctggagccggccctgtccgccgcgcccttcgtcggcggcatccacacgccggacgaggaggtcgccgactgccatgccttctgcgtgcaacttgccgagcgcctgcaggcttccggacattgccggcaactgcatggccgcagggtgacgaagatcgtcgagggcggcgcggcggtgcgtggcgtcgaggtcggcggcgatctcatcgaggccgatcatgtggtgctggccgccggctaccgcagcgccgaattgatgctgccgggcctgcgcctgccgctatacccgctcaagggctatagcctgaccctgccggtcggcgcgcagcaccgcgcgccggataccagcatcaccgattacgaccgcaagatcgtctacgcgcgaatcggcgagcggctgcggatcgccgcgatggtcgacatcgtcggcttcgaccccggcctcgagcccgcgcgcctggcactgctgcgccagcaggcgcgggacacgttcccgcagggcggcgatttcgacgccgccgtcgaatgggccggtatgcgcccggccacgcccaccggggtaccgctggtgggcaacggcggctaccgcaacctctggctcaacctcggccacggcgcgctcggcttcaccctggcctgcggcagcgggcgcctgctggccgagcagatcggccgccgcccgccgagcatcgatacctctggcctgcttccgcgcggcgcgctggctggctga

SEQ ID NO: 354840 - DNA, 309 bp, Pseudomonas aeruginosa; identical to SEQ ID NO: 335991

SEQ ID NO: 354841 - DNA, 399 bp, Pseudomonas aeruginosa; identical to SEQ ID NO: 321826

SEQ ID NO: 354842 - DNA, 666 bp, Pseudomonas aeruginosa; identical to SEQ ID NO: 321828

SEQ ID NO: 354843 - DNA, 1158 bp, Pseudomonas aeruginosa
atggccgcagaaggccatggtcaggtccagctcgcgggctatgatctccagcgcccgcgtcactccggcctgccccagcgcgcccagcccatagagatagggacggccgatcatggtcccgcgcgcaccgagggcgatggccttgagcacgtcctgcccggaacggatgccgctgtcgagccagacctcgatgcgctcgcccaccgcctcgacgatcgccggcagcgcgctgatggtcgagggcgcaccgtccagttggcgtccgccatggttgctgacgaccagcgcatcggcgccggagtcggcggccaaccgcgcatcctcggcatcgagaatgcccttgagcaccagcttgccgccccagcggcgcttgatccattcgacgtcgccccagttcagccgcgggtcgaactggcgggcggtccactcggacagcgagcccatgtcgtcgacgcccttgacgtgcccgactatgttgccgaaaccgcgacgccgggtgccgagcatgcccagcgcccagcgcggcttggtggcgatgttcagcaggttggccagggtcggccgcggcggcgccgagagaccgttcttcaggtccttgtggcgctggccgatgatctgcaggtcgagggtcagcaccagcgcgtcgcagccggcggccttggcacggtcgatcaggcgttcgatgaaatcgcggtcgcgcatcacgtagagctggaaccagaacggctggccgacttccgtggcgatgtcctccagggaacagatgctcatggtcgacagggtgtagcgcacgccgaactcggcggcggcgcgggcggcgaggatctcgccgtcggcatgctgcatgccggccagcccggtgggcgcgatggccaccggcatggccatctcctggccgagcatgcgggtgcgcagcgagcggttctcgatattccgcgcgacccgctggcgcagcttgatcgcggcgaagtcgtcctggttggcgcggtaagtgccttcgctccaggaaccggagtcggcgtagtcgtagaacatccgcggcacgcgcttgcgcgccaggcggcgcaggtcttcgatatcggtgatgacgctcatgcagtccactccttcgggggtggctggatggtagagcgcgacgtaccgccgcaggcggaataa

SEQ ID NO: 354844 - DNA, 234 bp, Pseudomonas aeruginosa
atgtccctttccgagtttctatcccctgacgaactcactgaattagttggaaagaaggtcgtgagcaaacagatcgaatggctcgaaaatcaccattggaactatgaaaccaacgcagcgggccgccccatagtcggacgggtgtatgcacggttgcgtctggcaggcgttcatcccacaagaaccacagtttccgaccccgcctggtcgctcgacctgtcgaacgtgtcctga

SEQ ID NO: 354845 - DNA, 1050 bp, Pseudomonas aeruginosa
atgcgcaaactgctggtgctgctggagagtggcctgttgttcgttggcctctgcgtcggcctggctgcatggcagcagcagcgggcgctggagcagcccctgcaattgaccgaggagcgcctgctggacgtttcctcgggctccacgccgggcggcatgctcgcgcgtctggagcaggaaaaggtgctccatggcgcgttctggctgcgcctctactggcgtttcaacctgccgggccaggccctgcacagcggcgaataccgcctcttgccggggatgaagggcgccgacctgctggaactctggcgtgaaggcgaggtggtgcagtacagcctgaccctggtcgagggctggagtttccgccaggtgcgcgaagcgctcgccaggcagggcaagctggagcagaccctggccggcctgagcgacggcgagatcatgcaacgcctcggcaagcccgacgaagtggccgaagggcgcttcttccccgatacctaccgctacacccgtggcatgcgcgacatcgacatactgcgcaaggcctaccagcgcatgcagaccatcctcgccaaggaatgggatggccgcagccaggacctgccttatcgcgacgcctaccaggcgctgatcatggcctcgctggtggaaaaggaaaccggcgtgccggaagagcgttcgcagatcgccggcgtcttcgtccgccgcctgcagcgcggcatgctgttgcagaccgatccgacggtgatctatggcatgggcgagcgctacaacggcaagatcacccgcgccgacctgcgcgaaccgaccccttacaatacctatgtggtgccgggcatgccgccgaccccgatcgccctggccgggcgcgaggcgattcgcgccgcgctgcatccggccgagggtgagaccctgtatttcgtggcgcgcggcgatggcagccatgtattctccagcagcctggacgaacacaacaaggcggtccgcgagtaccagttgaagcgtcgctcggactatcgctccagccccgcgcccatcaccccgccgccacaatga

SEQ ID NO: 354846 - DNA, 816 bp, Pseudomonas aeruginosa
atgctggactgggtcgacggccggcccgccgccgagctgtccgtgcgcgatcgcggactggcctatggcgacgggctgttcgagaccctggcggtgcgcgccggcacgccgcgtctcctggagcgccacctggcgcgcctggaagaggggtgtcggcgcctggcgatccctctcgacgccgcggcgttgcgccaggagttgctggcgttctgcgcggcgctgggcgacggtgtcgccaagctgatcgtcacccgcggcgagggtttgcgtggctacgcgccgcctgccgaggcctcgccgcggcgaatcctctccggatcgccgcgtccggcctatcccgagcgccactggcagcaaggcgtgcgcctgttcgcttgccgcacgcgcctggccgagcagcccctgctggccggcctcaagcacctcaatcgcctggagcaggtcctcgcccgtgccgagtggagcgacgccgggcatgccgaagggctcatgctggacgtgcacgagcgggtagtggagggcgtgttcagcaacctgctgctggttctcgacggcaccctcgtggcgcctgacctgcggcgctgcggcgtcgcgggagtgatgcgcgcggaattgctcgagcgcgccgaaggaatcggcgtcccgctggcgatacgggatgtttccatggctgaactggcgacggccgacgaggtctttctgtgcaacagccagttcggcatctggccggtccgggcattggacgagcacgtctggccggtcggcgagctgacccgtaaactgcaagaccaacttcgcgacgacctggatttctga

SEQ ID NO: 354847 - DNA, 1245 bp, Pseudomonas aeruginosa
gtgtcgcgtagacgcgtcgtcattactggcatgggcatgctgtcgccgctgggcctggatgtcccgagcagttgggaaggtattctcgccggtcgcagcgggatcgccccgatcgagcatatggacctgtccgcctattccacccgcttcggtggttcggtcaagggtttcaatgtcgaggaatacctgtccgccaaggaagcccgcaagctcgacctgttcatccagtacggtctcgccgccagcttccaggccgtgcgcgattccggcctggaggtcaccgacgccaatcgtgagcgtatcggcgtatccatgggttccggtatcggcggcctgaccaatatcgagaacaactgccgatccctgttcgagcaggggccgcggcgcatctcgccgttcttcgtgcccggttcgatcatcaacatggtttccggcttcctgtcgatccacctgggtctgcaggggcccaactacgccctcaccaccgcctgcaccaccggtacccacagcatcggcatggctgctcgcaacatcgcctatggcgaggccgacgtgatggtcgccggcggttccgaaatggctgcctgcggtctcggcctgggtggtttcggcgcggctcgcgcgctctccactcgcaacgacgagccgacccgtgccagccgtccgtgggaccgggatcgcgacggcttcgtcctgtccgacggttccggcgccctggtgctcgaagaactggagcacgcccgtgcccgcggcgcgcggatctatgccgagctggttggcttcggcatgagcggcgacgccttccacatgaccgcgccgccggaagacggcgccggtgccgcccgctgcatgaagaacgcgctgcgcgatgccggcctggatcctcgccaggtcgattacatcaacgcccatggcacctccaccccggccggcgacatcgccgagatcgccgcggtgaagagcgtgttcggcgagcatgcccatgcgctgtcgatgagttcgaccaagtcgatgaccggccacctgttgggtgccgccggtgcggtggaggcgatcttcagcgtgctggccctgcgcgaccaggtcgccccgccgaccatcaacctggacaacccggacgaaggttgcgatctcgacctggtggcccatgaagccaagccgcgcaagatcgacgtggccctgtcgaactcgttcggtttcggcgggaccaacggcaccctggtgttccgcaggttcgccgactga

SEQ ID NO: 354848 - DNA, 237 bp, Pseudomonas aeruginosa; identical to SEQ ID NO: 321132

SEQ ID NO: 354849 - DNA, 744 bp, Pseudomonas aeruginosa; identical to SEQ ID NO: 321133

SEQ ID NO: 354850 - DNA, 939 bp, Pseudomonas aeruginosa
atgtctgcatccctcgcattcgtcttccccggccagggttcgcaatccctcggcatgctggccgagctgggcgcccagcaggcgctggtgcgcgataccttcgccgaggcctccgaggcgctcggttacgacctttgggcgctggtccagaatggtcctgaagagcacctgaaccagaccgacaagacccagccggccatcctcacggtttcgatcgcgctctggcgcctctggctggccgagggcggtgcgcgcccggcgttcgtcgccgggcacagcctgggcgaatattccgcgctggtcgcggccgaaagcctggcgttcgccgatgcggtcaagctggtcgagcgtaggggccaactgatgcagcaggcggttccggcggggcagggcggcatggccgcgatccttggcctggaagacgccgatgtattggcggcctgtgccgaggcggcccagggcgaggtggtcagcgcggtcaacttcaacgcgccggggcaggtagtgatcgccggtgccgcggctgccgttgagcgtgccatcgaggcatgcaaggcacgcggcgccaagcgcgcggtggcgctgccagtcagcgtgccgtcgcattgcgaactgatgcgtccggccgccgagcagttcgccgcctcggtcgaaagcctgcagtggcaggcgccgaagattgcgctggtgcagaacgtcagcgccgccgtgccggctgatctcgatacgctgcgccgcgacctgctggcacagctgtacagcccggttcgctgggtggagagcatccagctgctggcggaaaagggcgtcaccgagctggtcgagtgcgggccgggcaaggtcctggcaggcctcaacaggcgctgcgcgaagggcatcaatacccatggcctggatggcgtcgaggcgttcgccgccacgcgcgccgccctggcctga

SEQ ID NO: 354851 - DNA, 981 bp, Pseudomonas aeruginosa
atgggtggggacttcggtccccactgcgttgttccggcctctattgccttcctggccgagaattcctcttcgcaactgatcctcgtcggtcagcctgccctcctcgaagaactcctttcccgctatccgtcgctcgaccggcagcgcctgcgtgtgcatgcggccagcgaagtgataggttcagacgagcgtccctcccaggccttgcgtggcaagccggacgcttccatgcgcgtggcgctggagctggtccgcgacggtcgggcgcacgcgtgcgtcagcgccggcaataccggggcgttgatggcgctgtcgcggcacctgctgaagaccctgcccggtatcgaccgccctgcgatggtgacggcggttccgaccgagaaggggcattgtcatctgctcgacctcggcgccaacgtggattgcagtgccgagcatctctatcagttcgcggtgatgggcgcggtggcggcagaggccttgggctgcgtctcgccccgggtcgccctgctcaacgtggggaccgaggagatcaagggcaaccagcaggtcaagctggcggcgagtctgttgcagaaggcgcaggggttgaatttcagcggatatatagagggcgatggcctgtatcgcggcgaggccgacgtggtggtctgcgacggtttcgtcggcaacatcctgctgaaagccagcgaaggcctggctgccatggtgtcggcgcggatcgaacagcgcttccgcgatggactggcggcgaagctggtcggtgcgctggcgttgccgctgctgcgccggctgcgcggcgatatcgctccggcacgctataacggcgccagtttcctcggattgcaggggatagtggtgaaaagccatgggtctgccgccgaggagggtttccagagcgccttgcgtcgcgcggcactggaagtccgggaaaacctgccgcaacgattgcatggccgtctcgagcatctgctgctctaa

SEQ ID NO: 354852 - DNA, 183 bp, Pseudomonas aeruginosa; identical to SEQ ID NO: 321136

SEQ ID NO: 354853 - DNA, 537 bp, Pseudomonas aeruginosa; identical to SEQ ID NO: 321137

SEQ ID NO: 354854 - DNA, 579 bp, Pseudomonas aeruginosa
atgcccgacctgatcctcgcctccagctccccctaccgacgcgaactcctgacccgcctgcgccttcccttcgaaagcgccagccccgatatcgacgaaagccatcgcgccggggaaagtgccgaggaactggtgcgccgcctttccgccagcaaggccgaagcgctggccggacgctatccgcaacacctggtgatcggctccgaccaagtcgccgtactcgacggcaacatcctcggcaagccgcacacccccgaacgcgccatccagcagctacgggacgccagcggcaagagcgtgaccttcctcaccggactggccctcctcaacagcgccagccgacgcatccaggtggcatgcgtgccgttcaccgtgcacttccgccacctcgacgagagccgcatccgccgctacgtcgaagcggaacgcccgctggactgcgccggcagcttcaaggcggaaggcctgggcgtcagcctgttccgctccaccgaaggagaggacgccaccagcctggtgggactgcccctgatccgcctggtcgacatgctcctcgaggaaggcgtcgaaatcccctga

SEQ ID NO: 354855 - DNA, 981 bp, Pseudomonas aeruginosa
atgtctgacgagtggaagtcggaaacgccgaaggcgaatgacgacaagagctggaagctgctggaaaaggcggtcctcgccggggtccaggagcagcggcgggcgcggcgctgggggatattcttcaagtcgctgaccttcatctatctctttgtcgtgctgctggccttcagtccgttcggcagcctggagaaatcggcctcgcgcagcggtagccacacggcactgatcgaggtgaagggcatgatcgccgacgatgagccggccagtgccgacaatatcgtcacggccctgcgcgcggcgttcaaggatgagggtaccaaggggatcgtcctgcggatcaacagtccgggcggcagtccggtgcagtcgggctatatctatgacgagattcgtcgcctgcgcggcgagcacccgaacgtcaaggtctatgcggtgatcagcgacctgggtgcctctggcgcctactacatcgccagcgccgccgaccagatctacgccgacaaggccagcctggtcggctccatcggtgtgacggcggccagcttcggtttcgtcggcactatggagaagctcggtgtcgagcggcgcgtctatacctccggcgagcacaagtcgttcctcgatcctttccagccgcaaaagcccgaggagacccagttctggcagcaggtgctggataccacccacaagcagttcatcgacagcgtgaaaaaagggcgcggcgaccggctcaaggtcgaggggcatccggagctgttctcgggtctggtctggtccggcgaacaggcattgcagctcggtttgatcgacggtctgggcaatgccagctatgtggcgcgcgaagtggtgaaggagaagaagatcgaggactacaccgtgcaggagtcgcctttcgatcgcttcgccaagaagttcggtgccagtgtggcggagcgcctcgcgctgtggatgggctggcaggggccggtactgcgctga

SEQ ID NO: 354856 - DNA, 693 bp, Pseudomonas aeruginosa
atgactgactacgcgttgctggtattcgattgggacggcaccctggtcgactcgatcgcgcgcatcgtcgattcgatgaaggcggcggcgcgggaaaccgctctgccggagcgggacgatacccggatcaagggcatcatcggcctcggcttgcccgaggcgatcgcttcgctctatccggaggttggcgatcctgctctggtcgagcgtttccggtgtgcctacagcgagcattacctggcgcaggaagcgcagccgtcgcggttgttccccggcgtggccgaagccatggtgcattttcgcgaggccgggttccgcctggcggtcgccaccggcaagagtcggcgcggcctggaccgggtgctggcggggcatggctggagcgatttcttcgatatcacccgctgcgccgacgaaacggccagcaagccggacccgttgatgctccacgagatcctggcgcactgccgggtcgagccggggcgggcgctgatgatcggtgattcgccgttcgacctggaaatggcgcgacgggcggggatggattcggttgcggtggcctatggcgcccaatcgctggagcagttgcggccttatgcgccgcggctggaagttgagcatttcaccgagttgcgcgcctggttgggcggtgctcgacgtgaggcggtttcaggagtggttgagcatgtctga

SEQ ID NO: 354857 - DNA, 957 bp, Pseudomonas aeruginosa
atgactactcccgcctctccgaccaccggtgtccagctgctcgatgtgccgccggaactggctggtcaacgtatcgacaatttccttatcgcccgtctcaagggtgcgcccaagaccctgatctatcgcatcctgcgtaagggcgaagtgcgcgtgaacaaggggcggatcaagcccgactatcggctccaggccggagaccaggtgcgcgtgccgccgctgcgcctggccgagcgtgatgagccggcgccgctggcgcaggggctgctggagcggatggaggcggcgatcgtctacgaggacaaggcgctgatcgtggtcaacaagcccgccgggatcgccgtgcatggcggcagcggcgtgagcgccggggtcatcgaggtgtttcgccagttgcgccccgatgccaaggatatcgaattggtgcatcgtctcgatcgcgatacctccggcctgctgatgatcgccaagaagcgcagcatgttgcgtcacctgcatgaggccctgcggggcgagaagatcgtcgacaagcgctatcacgccctggtccgtggccactggccggctggcaagaagaacgtgcgcgcgccgctgctgaagaacaatctgcgttcgggcgagcgaatggtcgaggtgaacgtcgagggcaaggacgcgctgaccgagttccgggtgctgcgtcgcttcggcgatttcgccaccctggtggaagcgcgcccgatcaccgggcggacccatcagatccgcgtgcatgccaagcacgccgggcatgccatcgccggcgacccgaagtatggcgacgaggatttctcccgcgagatccgcgagctgggcggcaagcgcctgttcctgcatgccgcgcagttgcgcgtgccgctgcccgacgggcaggtgctggagctggaggcgccggtggacgagatgtggcagcgttcgctggagcgtttgaatgactga

SEQ ID NO: 354858 - DNA, 747 bp, Pseudomonas aeruginosa
atgcgcgcgcgggtacgcagttcgatcttggtgatggcgttgcgcttctcgttgagcaggaaggcggcgacctggaagggcacgcgggcgcggacttccgcggtgcggtccttcagggcttcttcctcgatcaggcgcaggatggccagcgacagcgactcgacgtcgcggatgatgccctggccgttgcagcgcgggcagacgatgccgctggtctcgccgagggacggacgcaggcgctggcgggacatttccagcaggccgaagcgcgagatgcgaccgacctggacgcgcgcgcggtcggcctcgagggcttcgcggacacgctcttccacggcgcgctggttcttcgccggggtcatgtcgatgaagtcgatgacgatcaggccgccgatgtcacgcaggcgcagctggcgggcgatttcctcggccgcttccaggttggtctgcagggcggtttcctcgatgtcgccgcccttggtggcgcgcgccgagttgatgtcgatggaaaccagggcctcggtcgggtcgatgacgatggagccgccggacggcagcttcacttcacgctggaaggcggtctcgatctggctctcgatctggaagcgattgaacagcggaacgctgtcctggtacagcttcaccttgctggcgtactgcggcatcacctggcggatgaagttcagggcttcttcctgggcgtcgatgctatcgatcagcacttcgccgatgtcctggcgcaggtag

SEQ ID NO: 354859 - DNA, 1428 bp, Pseudomonas aeruginosa; identical to SEQ ID NO: 354757

SEQ ID NO: 354860 - DNA, 477 bp, Pseudomonas aeruginosa; identical to SEQ ID NO: 354756

SEQ ID NO: 354861 - DNA, 255 bp, Pseudomonas aeruginosa; identical to SEQ ID NO: 354755

SEQ ID NO: 354862 - DNA, 642 bp, Pseudomonas aeruginosa
atgaacgactacatcgcccggctgcgcgagaaatacgacgcccatttcggttgtgcgcccgccatgaccctggattgccgggacttctggagacactgcgtagcggtgccggaaatggcggtcttcgcttatcgcctggaaagcacccggcggctgcaccatgtggtgatcaccgccgggatgagccaggcaccgatgcatttcgcgccctacatgggcaaggcgcgctggtccgccgagctgatctgctatctcgacgaactgggcggcgatgacctgcgccacctgcaatggctcgccggcctgccattccacgagcgcctcgccctgggacatggacatgcggtggcgttcggcttcccgctctacgagcagagcctgctgcggcacttccttctcctcccggcgccgctggaggaggatgcctccctgttcgacggcttcgccctgtcggcgcatccggtcgacctgctgtgggtcgtgccgttgaccgagcaggaataccaggtgaacgtcaaggaacacctcgagggcatcgccaggctgctgaccgacgccggccacccgctcagcctcgaccggcaccgccattgctacgtcaccggccagtcgccggaagggctcgcacgggtgctgcactag

SEQ ID NO: 354863 - DNA, 435 bp, Pseudomonas aeruginosa
atgaaaaccgtggcacaactgttgaacgccaagcagaaccagcaggtgtacaccatcggaccagacgagatggtgctcgacgccctgcgcctgatggcggaaaagaacatcggcgcgctgctggtggtgaaccatggcgaggtggtcggggtggtcagcgagcgcgactacgcgcgcaagatggtcctcaagggccgttcgtccatcggtacgccgatcagcgcgatcatgagcgcgccggtggtcagcgtggactcgaagcagagcgtcgacacctgcatgaacctgatgaccgatcgccacctgcgccacctgccggtcgtggaagacggccagttgctcggcctgctgtccatcggcgacctggtcaaggcggcgatcgccgagcaggccgagctgatccagcaactggaacagtacatccgcggcgactga

SEQ ID NO: 354864 - DNA, 447 bp, Pseudomonas aeruginosa; identical to SEQ ID NO: 320902

SEQ ID NO: 354865 - DNA, 867 bp, Pseudomonas aeruginosa; identical to SEQ ID NO: 354811

SEQ ID NO: 354866 - DNA, 1185 bp, Pseudomonas aeruginosa; identical to SEQ ID NO: 354812

SEQ ID NO: 354867 - DNA, 1506 bp, Pseudomonas aeruginosa; identical to SEQ ID NO: 354813

SEQ ID NO: 354868 - DNA, 447 bp, Pseudomonas aeruginosa; identical to SEQ ID NO: 320906

SEQ ID NO: 354869 - DNA, 855 bp, Pseudomonas aeruginosa; identical to SEQ ID NO: 354815

SEQ ID NO: 354870 - DNA, 669 bp, Pseudomonas aeruginosa; identical to SEQ ID NO: 354816

SEQ ID NO: 354871 - DNA, 1905 bp, Pseudomonas aeruginosa; identical to SEQ ID NO: 354817

SEQ ID NO: 354872 - DNA, 1326 bp, Pseudomonas aeruginosa; identical to SEQ ID NO: 320910

SEQ ID NO: 354873 - DNA, 780 bp, Pseudomonas aeruginosa; identical to SEQ ID NO: 354769

SEQ ID NO: 354874 - DNA, 501 bp, Pseudomonas aeruginosa; identical to SEQ ID NO: 353625

SEQ ID NO: 354875 - DNA, 789 bp, Pseudomonas aeruginosa
atgcgccctctcctcttcagtgcccttctcctgctttccgggcatacccaggccagcgaatggaacgacagccaggccgtggacaagctattcggcgcggccggggtgaaaggcaccttcgtcctctacgatgtgcagcggcagcgctatgttggccatgaccgggagcgcgcggaaacccgcttcgttcccgcttccacctacaaggtggcgaacagcctgatcggcttatccacaggggcggttagatccgccgacgaggttcttccctatggcggcaagccccagcgcttcaaggcctgggagcacgacatgagcctgcgcgacgcgatcaaggcatcgaacgtaccggtctaccaggaactggcgcggcgcatcggcctggagcggatgcgcgccaatgtctcgcgcctgggttacggcaacgcggaaatcggccaggttgtggataacttctggttggtgggaccgctgaagatcagcgcgatggaacagacccgctttctgctccgactggcgcagggagaattgccattccccgccccggtgcagtccaccgtgcgcgccatgaccctgctggaaagcggcccgggctgggagctgcacggcaagaccggctggtgcttcgactgcacgccggaactcggctggtgggtgggctgggtgaagcgcaacgagcggctctacggcttcgccctgaacatcgacatgcccggcggcgaggccgacatcggcaagcgcgtcgaactgggcaaggccagtctcaaggctctcgggatactgccctga

SEQ ID NO: 354876 - DNA, 879 bp, Pseudomonas aeruginosa; identical to SEQ ID NO: 326434

SEQ ID NO: 354877 - DNA, 1344 bp, Pseudomonas aeruginosa
atgagcgaccaggtgatcttcgtcgacgacgaagcgacgatccgcgaagcggtgcagcaatggctggagctgtcgggcttcgaggtgcgcctgtgcctgcgcgccgaggaatgcctgggagcgttggacaagtccttcgccggggtggtcatcagcgatgtgcgcatgcccggcatggacggcctgcaactgctcgccaacctgcaggcggtcgatcgcgacctgccggtgatcatggtcaccgggcacggcgacgtgccgatggcggtggaggccatgcgccagggtgcctacgacttcatcgagaaacccttcacgcccgagcgcctgctcggcagtttgcggcgcgcgctggaaaagcgccgcctggtgctggagaaccggcgcctgaaggagcaggccagtctcaaggaccaggtcgatgcgcgtctgctcggcgtgtccaagccgatggaagcgttgcgccggcaggttctggccctggcgccgaccccggtgaacgtcctgatccgtggcgagaccggcagcggcaaggaactggttgcccgctgcctgcacgacttcgggccgcgcgccgacaagccgttcgtggcgctgaactgcgcggcgattcccgagcaattgttcgagagcgagctgttcggtcatgagagcggtgcgttcaccggcgcgcagggcaagcgcatcggcaagctcgagcatgcccatggcggcaccctgttcctcgacgagatcgaaagcatgccgttggcgcagcaggtcaagctgctgcgcgtcctgcaggagcagcaactggagcggcttggctcgaaccagagtatccacgtcgacctgcgggtgattgccgcgaccaagcccgacctgctggccgaagcacgtgccggacgcttccgcgaggacctggtgtatcgcctgaacgtcgccgagctgcgcctgccgccgatccgcgagcgtcgcgaggacatcccgctgctcttcgaacatttcgccagcgttgccagccagcgcctcggccgcgagccgcagcccgccgcgccggcggaactggcgcggctgatggcccacgactggccgggcaatgtacgcgagctggccaacgccgccgagcgccatgtcctcggcctggagcgtggggacgccgaggaaggcggcggcctcacctcggggctggcggaacgcatggaagccttcgaggcggagtgcctgcgccaggcgctcggccagtgccgcggggatatcaaggcggtgatggagttgctgcaactgccgcgccggacactcaacgaaaagatgctgcggcatggcctcagccgcagcgatttcgtcggcgaagagccggcctga

SEQ ID NO: 354878 - DNA, 1350 bp, Pseudomonas aeruginosa
atggccatcgaacagttcggataccggcaacagctgcgccgcagcctgtccctgagcgacctgatcatctacgggatgatcttcatgatcccgatcgccccgttcggggtctacggctgggtccatgccgacgcccacggcatggtgccgatggcctacctggtgggcatgctggcgatgctcttcaccgccctcagctacggagccatggccaaggcctttccgattgccggctcggtgtattcctacgcccagcgcggcatccacccccatgtcggcttcatcgccggctgggtgctgctgctcgactacctgctgatcccgccgctgctctacgtgttcagcgcgctggcgctgaaccacttgttcccggcgatccccaagctggcctggatgctgctgttcctggtctcggcgaccctggtcaacctgcgcggcatcaccttcgccgcccgcgccaacctgttgttcctgatcggagagctggtggtgctggcgatcttcctggtggtcggctaccaggcgctggaaggcggcctgggcaacggccggctgaccctcgaaccgctgtatcgcccggaagccttcgatctcggcctggtaatgaaggccgcctcgatcgccgtactgtcgttcctcggcttcgacgccatctccaccctcgccgaggaggtcaagggcgatcccgcccggcagatcggccgcgccgcgctgatcgcgctgttcatcatgggcggcatcttcatcgcgcagacctggctggccaccgacctcgccgccgggatgaacttcaagtcggcggacaccgccttctacgagatcgccgaagcggccggtggccagtggctgtcgatgctgaccgcggtagccaccgcgctggcctggggtgtcacggtgtcgatcacctcgcaggcagcggtctcgcgcctgctctactcgatggcccgcgacggcagactgccgcgcgcgctggccagggtccatccgcgctaccagacgccgcacgtcagcctgtacctggtggcggtgctgtcgctgggaatcggctgggccttcctcgacgcaccggacgtgctcacctcactggtgaacttcggtgccctcaccggcttctgcctgctgcacctgagcgtgatcaaccactactaccgccgccagcgctccggccagtggttgcggcatctactgttcccgctggtgggcctggcgatcatcgcctacgtgctgtacagcatgagcctcgacgcacagttgctcggactggcctggatcgcggtggggctggtctacctggcgttgctgcaacgcggcgggcgccaggcgccaacggagttggcgaaggatctctga

SEQ ID NO: 354879 - DNA, 753 bp, Pseudomonas aeruginosa
atgccgagctttactgacaaccccgaactcggcatctaccagctgccgccctaccacctgctcaatccccaagggcgcagcccggtggtcctggtctgcgagcatgccagccggcacattccgctggagttgcagcgcctcggcctggaccaggccgcggcggaagaacacatcgcctgggatatcggcgccctggcgctggccgaagagctttcccggcggctcgacgcgccattgctggcggccggctactcgcgtctgctgatcgacctgaaccgaccgctggaggcgcccgacagcattccgccgcacagcgaggtctaccccgttcccggcaaccgcgagctgtccgagacggtgcgccgctatcgccaggattgcctgttccatccgttccaccagcgcctgacgcaactgctcgacgagcgccaggccgccggcgtgccgacccgcgtggtcggcgtgcacagttttaccccggtgtaccacggcagaccccgcccgctggttgccggggtgctttatcgcaacgccggcgcctacgccaggcgcatcctcgacggtttgcgccggcacggcctggaagtcgccggcaaccagccctatgcgatcgacccggcggaagacactaccgttccggtgcatggcgacgcacgcggtctggaagcggtgctgctggagatccgcaacgatggattgcgcacgccggatgcggtgtacgcctgggccgagcgtctgtatccctggctctga

SEQ ID NO: 354880 - DNA, 1332 bp, Pseudomonas aeruginosa
gtgaaccgcctgcagccggtacgcctggtcagcttcgtcaccaccgacctggccggcatcacccgcgggcgttcgctgcccctggcgaccctggaggagcaattggccagcggttgcggctgggtaccggcgaacagctcgctgaccccccaggacctgatcgacgagagcagcccctggggcagccacggcgacctgcgcctgctgcccgacccgaacagccgggtgcgcgtcgagcagggtcccgacgccgctgcgccggcgctcgactacctgcacggcaacctggtggaaaccgacggcacgccgtggccggcctgcccgcgcagcctgctgcgggccgaggtggaacgctatcgcgacagcggcctgcaggtcatcgcggcgttcgaacacgaattcagcctgctcggcctgcccggcgagcgtccggccgcggcgttttcgctgcaggcccagcgtgccgccgggcagttccccggctggctggtcagcgccctggcccaggctggcaccgagccggagatgttcctccccgaatacggccagcgccagtacgaggtcacctgccgcccggcgcagggcgtggccgccgccgaccgcgcggtgaacgtccgcgaggtcactcgcgaagtggcgcggcagatgggcctgcgtacctgcttcgcaccgctgccggcacccggcgcggtgaccaacggggtgcacctgcacctgagcctgcaacatgccgacggcagcccgctgctgtacgagcccggtcgacccaacgatctctccgaactcggcgagcactgggccgccggcgtgctcgcgcacctgccagcgctgtgcgcgctgaccgcgcctaccgccgcctcctacctgcgcctgaaaccccaccactggagcgccgcctacgcctgcctgggactgcgcaaccgcgaagcggcgctgcgcatctgcccggtggtgagcgtcggcggcaagccgctgggcaagcagtacaacctggaattccggccgatggacgccaccgcctgtccgcacctggcgatggccgcggtgctgatcgccggccgcctgggcatcgaacgacgcctgccgctgcgcgccctggccgatatcgatccgcacggcctcagcgacgaagagcgccaggcccgcggcatccaggccctgccggcgaccctcggcgatgcgctcgactgcctgcagcgcgacgagacgctctgcgccgagctgccaaagccgctgctggacacctacctcgccatgaagcgccacgaactggcgctgacggcgggcctttccgacgacgacctgtgccgccactatgccgagctttactga

SEQ ID NO: 354881 - DNA, 783 bp, Pseudomonas aeruginosa; identical to SEQ ID NO: 354749

SEQ ID NO: 354882 - DNA, 678 bp, Pseudomonas aeruginosa; identical to SEQ ID NO: 354748

SEQ ID NO: 354883 - DNA, 1008 bp, Pseudomonas aeruginosa; identical to SEQ ID NO: 354747

SEQ ID NO: 354884 - DNA, 1326 bp, Pseudomonas aeruginosa
atgaacgagccgctttccgtcctgatcgtcgaagacgatccgcatgtcttgctcggctgccagcaggcgctggagctggaggacatcccctgcatcggcgtcggcagcgccgaggaggcgctgcaacgggtcgaccgcgacttcgccggcatcgtcgtcagcgacatccgcctgcccggcatcgacggcctgaccctgctggagcgtctcaagtccctcgacccgagcctgccggtggtgctgatcaccggtcacggcgacatctccatggcggtacaggcgatgcacgccggcgcctacgacttcatggagaagcccttctctccggaacgcctggtcgaggtcgcccgccgcgccctggagcagcgcgggctggcccgcgaggtcagcgcgctgcgtcgccagttggccggccgccaggacctggcgcaacggatcatcggccgctcgccggcgatccaggcgttgcgcgagctgatcgccaacgtcggcgacacctcggccaacgtgctgatcctcggcgagaccggcaccggcaaggagctggtggcgcgttgcctccacgactatagccggcgccaccagcatgccttcgtcgcgctgaactgcggcggcctgccggagaacctgttcgacagcgagatattcggccacgaggcgcacgccttcaccggtgccaacaagcggcggatcggcaagatcgagcatgccaacggcggcacgctgttcctcgacgagatcgagagcatgccggtcaacctgcagatcaagctgctgcgggtgttgcaggaacacaccctggaacgcctcggctcgaaccagtcgatcccggtggactgccgggtgatcgcggcgaccaaggcagacctcgccgccatgggcaagagcggccagttccgcagcgacctctactaccggctcaacgtggtgagcctggaactgccggcgctgcgcgaccgccgcgaggacatcctgctgctcttcgaacacttcctccagcagtcctcgctgcgcttcgaccgccccgcgccggaactcgaccgtgccaccgtggccagcctgatggcccacgactggccgggcaatgtacgcgaactgcgcaacgtcgccgaacgcttcgccctcggcctgccggtgttcaacaagggcggccaggccgtacagaccggcggcccgcgcttcgccgaagcggtggaggcattcgagaaggccctgctcggcgacgccctggcccgccaccacggcaacctgacccaggccagccaggacctgggcatggccaagaccacactgttcgacaaggtgaagaagtacggcctgcaatag

SEQ ID NO: 354885 - DNA, 1902 bp, Pseudomonas aeruginosa
atggaatcccccgacccgccctgcagcgtacctccgtcactgaccgtgaagccccgcctcgtccgccagttgctgctccccattcccctgctcctgctgatgctcggcttcggctacggcggctaccggatcagcgagagcgccggcattcgtgccctcgccgagaatggcgaacgccagctggagctgcatgcacggacggtcgagagcgagatcagcaagtacacctacctgcccagcctgctggagctggagcgcagcgtcagtcacctgctcaccgacccgacgccataccggcgcaaccaggtcaacgcctacctcgaaggcctcaaccgccgcgccggcagccgcgcggtgtacctgctggacaccaacggccgggtcctggccaccagcaactggagcgacccggacagctacctcggcgaggacctgtcgttccgcgcctactggcaggacgcgatgaagggcaagccgggccgcttctacggcatcggcagcacccgcggcgagccgggctactacctggcccacggcctggtccacggcggccggatcatcggcgtggcggtggtcaaggtgaagatggacgccctcgaggaacgctgggagaaggcgcgcctggaagccttcgtcagcgacgagaacggcatcatcatcctctccagcaaccccgccctgcgcctgaaggcggtgcgctccctgagcgccgacgacaaggagcgcctggcgcgcagcatgcagtactactggtgggcgctgaacgagtggcaaccgctgcagcgcgagccgctggccgccggtgtggagaagctcagcttccccgccgatgagcagcatccgcgcggcgaagcggtcacctacctggcgcagacccgcgcgctgaacgacacaccgtggaacctgaccctgctcagcccgctggaagacctgcgccgcgacgcggtgcgcaacggcatgctggccgccatcggtttcgccctcctggcattcctgctgatcgcctggaacgagcggcgcaaggtactcgccacccgcctcgccgcgcgcgaggcgctgcaacgggccaacggcgagctggaagtgaagatcgccgaacgtaccgccgacctgcaggccagcaacgcacgcctgaccgccgagatccacgagcgccagcaggccgaggacaccctgcgcaaggcccaggacgaactggtccaggccggcaagctggcggtgatcgggcagatgtccaccagcatcgcccacgaactcaaccaaccgctggcggcgctgcgtacgctgtccggcaacaccgtgcgcttcctccagcgcggcaagctggagaccgccagcaccaacctcgccaccatcaacgaactggtcgaccgcatgggccgcatcaccgccagcctgcgtgccttcgcccggcgcagcgacgacgccggccaggccagcctggccaaggcggtggacgcggcgctgctgatcctgcacgggcgcctggagcaggacccgccgaccctgcaccggcatttcgacgacgtgcgcctgggcatcgaccagacccgcctggaacagatcctggtcaacctgctggccaacgccctcgacgccatgagcgggcaggccgaccgccagctctggctggaaggccggcgcgaggaggagcgctacgtcctgcgcgtgcgcgacaacggccccggtatcccgccggcggcgcgcgtccacctgttcgaacccttcttcaccaccaagcccggcgaacatggcctgggcctcggcctgaccctctcggccagcctggccaccgccgccggcggcagcctcagcgtgcagcaccccgaaagcggcggaaccgccttcgagctgagcctgtccctggttcccgattccccgactgcgagtcccgcccgatga

SEQ ID NO: 354886 - DNA, 1089 bp, Pseudomonas aeruginosa
atgaagccattgctccacgcgttcgcccccggtgttatggccctgatgctcctgctgccgcaggccgcccaggccaaggaagtcgcaccgcaacagaaactgtccaacgtggtcatcctggccaccggcggcaccatcgccggcgccggcgccagcgccgccaacagcgccacctacaccgccgccaaggtgccggtcgaccagttgctggccagcgtgccgcagctcaaggacatcgccaacgtccgcggcgaacaggtgttccagatcgcctcggaaagcttcaccaacgagaacctgctggaactgggcaagaccgtcgccaagctggccgatagcgacgacgtcgacggcatcgtgatcacccacggtaccgacaccctggaagagaccgcctacttcctgaccctggtcgagcacaccgagaagcctatcgtggtggtcggctcgatgcgcccgggcaccgcgatgtccgccgacggcatgctcaacctgtacaacgccgtggcggtggccggcgacaagtcggcacgcggcaagggcgtgctgatcaccatgaacgacgagatcctctccggccgcgacgcgagcaagatggtcaacatcaagaccgaagcgttcaagagcccgtggggcccgctgggcatggtggtcgagggcaagagctactggttccgcgcaccggtgaagcggcacacggtgaactccgagttcgacatcaagcagatctccgcgctggctccggtggaaatcgcctacagctacggcaacgtcagcgacaccgcctacaaggccctggcccaggccggcgccaaggcaatcatccatgccggcaccggcaacggctcggtgcccgcgcgcgtggtgccgaccctgcaggaactgcgcaagcagggcgtgcagatcatccgctcctcgcacgtcaatgccggcggcttcgtcctgcgcaacgccgagcagccggacgacaagaacgactggatcgtcgcccacgacctgaacccgcagaaggcgcgcatcctggccgcggtcgcgatgaccaagacccaggacagcaaggagctgcaacggatcttctgggaatactga

SEQ ID NO: 354887 - DNA, 1674 bp, Pseudomonas aeruginosa
atgcaacctgtgctcttcagaaccctgtccctcggcgtcgccattgccgccgcatcctcctcggccttcgccgccacgctcgacggcggcgccgtcgccgcgcccgacgagtacggcgccaaggtcgccgcgcagatcctcaaggccggcggcaacgcggtggacgccgcggtggccaccgccttcaccctggcggtcacctaccccgaggccggcaacatcggcggcggcggcttcatgaccctgtacatggacggcaagccgtacttcctcgactaccgcgaggtggcgccgaaggccgcgagcaagaccatgtacctggacgacaagggcgaggtgatcgagaacctcagcctggtcggcgccaaggccgccggcgtgccgggcaccgtgatgggcctctgggaagcccacaagcgtttcggcaagctgccctggagcgagctgctgaccccggccatcggctacgcgcaaaagggcttcaaggtcgccgacaagcagttccagtaccgccaggacgccgtcgcgctgttcaacggcaagaccaacttcggcgactacttcggccacatgaaggccggcgaggcgttcctccagccggacctggcgaagaccctggagcgtatcgccgacaagggcccggacgagttctacaaaggccataccgccgacctgctggtggcacagatgcagcaggacaagggactgatcacccaccaggacctcgccgactacaaggtcaggtggcgcgaaccgatgcgcgtcgactggcagggcaacacgctctataccgcgccgctgccaagctccggcgggatcgccctggcccagttgctgggcatcaaggaaaaccgtgccgccgacttcaagggcgtcgagctgaactccgcgcgctacatccacctgctggcggagatcgagaaacgcgtgttcgccgaccgcgccgactacctcggcgatccggacttctccaaggtcccggtggcgcgcctgaccgatccggcatacctgaagcagcgtgccgccgaggtcaacccgacggcgatctcgccgaccgagaaggtccgtcccggcctggagccgcaccagaccacgcacttctccatcgtcgacgccgacggcaacgcggtgagcaacacctacaccctcaactgggacttcggcagcggcgtggtggtcaagggcgctggcttcctgctcaacgacgagatggacgacttcagcgccaaaccgggcgtggccaacgccttcggcgtggtcggcagcgacgccaacgccatcgagccgggcaagcgcatgctctcctcgatgagcccgagcatcgtcacccgcgacggcaaggtcagcctggtggtcggcactcccggcggctcgcggatcttcacctcgatcttccaggtgctgaacaacatctacgacttccacctgccgctggagaaggccgtggccgcgcagcgcgtgcaccaccagttgctgcccaaggacacgatctactacgacgcctacgcgccgctcgccggcaaggtcgccgaggagctgaaggcgatgggctacaccctggaggaccagggctggaacatgggcgatatccaggccatccgcgtcgacggcaaggccctggagaccgcctccgatccccgtggccgcggcgtcggcctggtggtgaaaccctga

SEQ ID NO: 354888 - DNA, 735 bp, Pseudomonas aeruginosa
atgatttccatcaagaatgtcagcaagtggtatggcgacttccaggtcctgaccgactgctccaccgaggttgcgaaaggcgaagtggtggtggtctgcgggccgtccggctcgggcaagtcgaccctgatcaagtgcgtcaacgcactggaacccttccagaagggcgacatcgtcgtcgacggcacctccatcgccgatccgaagaccaacctgcccaagctgcgctcgcgggtcggcatggtgttccagcatttcgagctgtttccccacctgagcatcaccgagaacctgaccatcgcgcagatcaaggtgctcggccgcagcaaggaagaagccaccaagaagggcctggccctgctcgagcgcgtcggtctcaaggagcacgcgcacaagcaccccggccagctctccggcggccagcagcagcgcgtggcgatcgcccgcgcgctggcgatggacccggtggtgatgctgttcgacgagccgacctcggcgctcgacccggaaatggtcaacgaagtgctcgacgtgatggtccagctggcccacgaaggcatgaccatgatgtgcgtgacccacgagatgggcttcgcgcgcaaggtcgccaaccgggtgatcttcatggaccgcgggcagatcgtggaagactgcgagaaggaggagttcttcggcgacgtcagcgcccgctccgaacgcgcccagcagttcctcgccaagatcctcccgcactga

SEQ ID NO: 354889 - DNA, 666 bp, Pseudomonas aeruginosa; identical to SEQ ID NO: 321650

SEQ ID NO: 354890 - DNA, 747 bp, Pseudomonas aeruginosa
atgaattacaactgggactggggcgtgttcttcaagtccaccgggatcggcagcgaaacctacctcgactggtacatcgccggtctgggctggaccatcgccatcgccctggtcggctggatcatcgccctggcgctgggctcgctgctcggcgtcatgcgcaccgtgccgaaccgcctggtatcggggatcgccaccgcctacgtggaaatcttccgcaacgtgccgctgctggtgcagctgttcatctggtacttcctggtacccgacctgctgcccgagggcctgcagacctggttcaagcaggacctcaacccgactacctcggcctacctcagcgtggtcgtctgcctcggcctgttcaccgccgcgcgggtctgcgagcaggtgcgcaccggcatccaggcgctgccctacgggcagacctcggcggcccgcgcgatgggcttccgcctgccgcagatctaccgccacgtgctgctgccgcaggccttccggatcatcatcccgccgctgacctcggagttcctcaacatcttcaagaactcctcggtggcgtcgctgatcggcctgatggagctgctggcgcagaccaagcagaccgccgagttctccgccaacctgttcgaggccttcaccctggccacgctgatctacttcacgctgaacatgagcctgatgctgatcatgcgcctggtggagagaaaggtcgccgtaccgggcctgatctccgtaggaggtaaatga

SEQ ID NO: 354891 - DNA, 909 bp, Pseudomonas aeruginosa; identical to SEQ ID NO: 321652

SEQ ID NO: 354892 - DNA, 459 bp, Pseudomonas aeruginosa; identical to SEQ ID NO: 354765

SEQ ID NO: 354893 - DNA, 795 bp, Pseudomonas aeruginosa; identical to SEQ ID NO: 354766

SEQ ID NO: 354894 - DNA, 1590 bp, Pseudomonas aeruginosa; identical to SEQ ID NO: 354767

SEQ ID NO: 354895 - DNA, 648 bp, Pseudomonas aeruginosa; identical to SEQ ID NO: 354768

SEQ ID NO: 354896 - DNA, 1512 bp, Pseudomonas aeruginosa
atgagcgctgacgacaaggtatcgctgcgtgcctgggtcgccgtcaccggcggcctgttcggctgcttcatggccggcatgaacgtgcacgtcaccagcgcggcgctgccggagatagaaggcgcgctgggagccaccttcgaggagggctcgtggatctccaccgcctatctggtcgcggaaatcagcatgatcccgcttaccgcctggctggtggaagtgttctccttgcgccgggtgatgctcctcggctcgctggtgttcctgctcagttcgctgagctgcgcgctggcgccgaacctgtcgacgctgatcctgatccgggtgatccagggggcttcgggggcggtgctgatcccgctgtcgatgcaactgatcctcaccgagctgccgtccagccggatacccctcggcatggcgctgttcagcctttccaacagcgtggcccaggccgccggcccgtcgatcggcggctggctggcggatgcctattcctggcgctggatctttctcctgcaactgttgccggggatcgccctgctggccgcggtggcctggtcgatccgcccccgcgacggcgaccgcgaacgcctgcgccaggccgactggctcggcatcggcgcgatggtcgccggcctcggcgcgctgcagatcgtgctggaggaaggtggccgccgcgactggttcgagtccggcttcatccgcaccttcgccgtcctcgccgtgctcgccctgctgctcttcgtacagcgccaactgtggggcgcgcggccgttcatcaacctgcgcctgctgggcagctacaacttcggcgtgtccagcctggcgatggcggtgttcggcgcggcgaccttcggcctggtgttcctggtgcccaactacctgtcccagttgcagggtttcaacgcccggcagatcggcgacagcctgatcctctacggcctcgtgcaactgctcctggcgccgctgctgccgcgcctgatgcgctggctgaaccccaagctgctggtggccggcggcttcgcgatcatggccctgggctgctggatgggcgcgcacctgaacgccgacgcgggacgcaacgtgatcatcccctccatcgtcgtacgcggcatcggccagccgctgatcatggtcgcgctctcggtactggcggtgaagggcctggacaaggcccaggccggctcggcctcggcgctgatctcgatgctgcgcaacctcggcggcgcgatcggcaccgcgctgctgacgcaactggtctcgctgcgcgagcgcttccactccgagcggatcggcgagaccctgacgatcttcgacggcgccctgcagcagcgcctgggcggtggccaggtgcggatacaactgccggagcagcagcaggcgctggccctgctcgaccacggggtgcgccagcaggcctacctgatggcctactccgacgccttctacctttcctgcgtggcgctcctggcctgcgccctggcctcgctgatgctgcgccagaaggactga

SEQ ID NO: 354897 - DNA, 783 bp, Pseudomonas aeruginosa
atgctgatcgacctgccttccacccgtccggtcttcgcctatgcccaggattatctccacggcgagcgcgtcgagctgcaccggcattcgcgcgcgcaattgatccatgcgctcagcggggtggtcacggtcggcaccgccgagggcacctgggtggtgccgccgggacgcggtgtctggttgccggccggtatcgagcatgccctgcgtttcgccggccaggtgcgcatgcgcaccttgttcatcgccccgcaggcgcgccacgacctaccgcgggactgccgggtggtggacgtgccgccgttgctgcggcaattgatcgtcgcggcgatgcggatcgccccggactacccgccgggcggccgcgacgagcgggtgatggagctgatcctcgatgaactgcgggtgctgccgatcctcgccctgcacgtgccacagccggtcgatccgcgactggcggcgctgtgccgcagcctgcgcgccgagccggccgccgactggagcctgggcgatgccgcgcgtcgcctgggcgtcagcccgcggaccctgacccgcgccttccagcgcgaaaccggtctcagcttcgtccagtggctgcggcgcatgcgcctgctcgccagcctcgatgcgctggcggcagggcactcgatcctcgaggtcgcactggacctcggctacgacagccagagcgccttcagcgccatgtttcgccggaccctgggcgtttcgccgagcctctatttcggccgcggcgccgcctacggggtggccgagggcgactga

SEQ ID NO: 354898 - DNA, 504 bp, Pseudomonas aeruginosa
atggcctcttacgcggaactgttcgatatcggagaagacttcgccgccttcgtcggccatggcctggccacggaacagggcgcggtcgcgcggttccggcagaagctggaaagcaacgggctgccgagcgcgctgacggaacgcctgcaacgcatcgaacggcgctatcgcctgctggtcgccggggaaatgtggtgcccggactgccagatcaacctggccgcgctggacttcgcgcagcgcctgcaaccgaacatcgagctggcgatcatttccaagggccgcgccgaggacgacctgcgccagcgcctggcgctggagcgaatcccgattccgctggtactggtgctggacgaggagttcaacctgctcggacgcttcgtcgaacggccgcaggcggtgctcgacggcggtccgcaggcgcttgcggcgtacaaggcgggcgactacctggagcacgccatcggcgacgtcctggcgatcatcgaaggcgcggcgcgctga

SEQ ID NO: 354899 - DNA, 258 bp, Pseudomonas aeruginosa; identical to SEQ ID NO: 319996

SEQ ID NO: 354900 - DNA, 2040 bp, Pseudomonas aeruginosa
atggcggcgtcggcgtccggcgggcgcgattggtacgcggcgttgccgttgccctggcggaccgacagcctggactacgtgctgcgcagcatcggcgctgccgctctggcgctcggcctggggctctacctgcaactggattcgccgttttccgcggcgtccactgtgctgttgctgatcaatccggtgcagggagcggtggtcggcaagggctggtggcgcgccgtgggtaccctggtcggcacgctcgctgccttcgtcctgaccgcgctgttcgcccagaagatgctgctgttcgtcgtcgccctgggtttctggctgggtctctgcgtcggcgtcatgagcctggtccggcacttctacgccaccgccgcggtggtcgccggctacaccgtgtgcctggcgctgggatcggccatggtcgagcccgaggcggccttcgagcacatcgtcacccgcgcctcggcggtaatcgtcggggtctgctgcctgagcctggtgaccgtgctcttcagccgcaggaccgtgtccgggcgggtgcgccagcgtctcgtctcgctctgcgcggcgacgctggcgctggtcgctgcgcggcatgccggtgcggctgacggggaactggagcgccgtcgccggacgctggccggcgaggtctacgcggtagacgatctgctgggtgtcggtcgcgccgagtcgcgggcgctgagcgctgcgctcccggcgatccgcggtggcctggcggcgctgttttccacgctgatggagttccgcttcgccggcgagacgcattgggcccggcgcttggcggagcgtggactggcgctgccgatggccgacgacctgcgcctgctgggcggccaactggatcgcggcgagctcgacttcgccggcgccgcgcgacggctcgcgagcttgcgcggtcgcctggcggcgattcggcgcggacttccgacagaccaagcggatgcctgtcgcgaagggctgttcatggagcgtctcgacgagcaactggatgacctgcaggccgccctgcgggggttcgcccggctcgacggccgggcccgcgccgacgtccgcccagcggccttccatcgacattaccgcgaggccttgcgcaacggcgcgcgagcctggctggcgatgctggtcggcggcgccctgtggttcctcagcgggtgggaccaggggccgaccctgctggcggtgctcggcccctactgcacgctgctggcagcctcgccctttcccgccgagggcacgcgcaatttcattcgcggcacgctctacgcgatacctgccgcattgctctgcaaattccttctgctaccgctgatcaacggttttccattgctgctgctgtgcctcgccttcttctggtcgttcggtatccaggccaccacagtgcccaggcgggcgttgcagggaatcgcctacctgatcgccttcaacaccctggtcgccaccggcaatctcgcccgcttcgatttcggcgacttcgccaaccagtcctgcgcctgggtgctggcgctctgcatcagcctgctggtttaccgcctgctgccgaaggacctggaacggcattcggcgtcgctgctcgaccatctgcgccgcgagaccctcgccttgctgcgtcgtcgcgccggtttcgacgcgcatgcctggcaggcccgccagcagcatcgcatcgcccagctgggcgcgctgcatggcatggaacatccgcgcagcgcgctggccctgcgcctcggcttcgtatccctgcaactcggccgcgagtcgcggcgcctgtggcgcgccctggccgggctcgacccggccgccgcggaggcgcggtggatcgagcgcgcactgcgagccatcgccgtccgccatcgcgatccgccgctcgccgcgcggcacgcacgccgtgccggcgcccgcctggcggccgccggcgagtggcgcctggccgcgatcctcaccgacctcgcctggttgctccgggcctattcgcaaagcgtctcgtccgacggggcgcagcatggagaaaagacctcatga

SEQ ID NO: 354901 - DNA, 909 bp, Pseudomonas aeruginosa
atgtccatcgttcgtctttccaaggtggctgcgaccttcgcctgcggcctgctcgccctgtgcctggcgttgcagttgtggcaagcctacgtgctggcgccctggacccgcgacgggcgggtcagcgcgcaggtgatccgcatcgcgccggaagtctccggcagcgtcgaggcggtgttcgtcgcagataaccagcgggtggcccgcggcgatccgctgtaccgcatcgatccgcgcagctatcgcctggccgtgcgccagcgcgaggcggagctggagcaggcgcgggaaaccctgcgccaacgtgacgagcaatggcgccgacgcatgcagttggccggcgcggtttcgcgcgaggaggtcgccaacgccggtcgcgccctgcgtatcgcccgcgcccgcgccgaggccgccggggcggcgctcgaccaggcgcggctggacctgcggcgcagcgagttgcgctcgccggtggacggctatgtgacgcagttgcgcgtgcagcccggcgattacgcggcggcgggccggaccaacatcttcatcgtcgatcggcgaagcttctgggtcaccggctatttcgaggaaaccaagctgcgcaatgtacaggtcggcgcgccggcgacgatcaagctgatggggttcgatccgctgctcgacggccatgtcgcgagcatcggtcgcggtgtcgccgacctcaacgaaagccgtgccgacagcggcctgccgcaggtcagcccgaacttcagctggatacgcctggcgcagcgcgtgccggtgcgcatcgaactcgaccgggtaccggcgggcgtggtgcttgccgccggcatgaccggcagtgtcgaggtgctgcaggcggggaccgcgcggcactggcggctgacccgctggttgcaggagtacctttga

SEQ ID NO: 354902 - DNA, 189 bp, Pseudomonas aeruginosa; identical to SEQ ID NO: 319999

SEQ ID NO: 354903 - DNA, 891 bp, Pseudomonas aeruginosa
gtgaaggaaccgcgtgccctggaggaatatcgccgggcgatagtggcggcctgtccggagctggcggacgccacgttcgccatcctggcctcgggctggcattccacggcggtggaggtcggagggcgctgggtgttcaagtttccgcgcggcgcggaggccgaggcggcgctgctgcgcgaggccgccgtgctacgcctggtgcgtccggcggtgagcctggcggtgccggcgccgcaggtgtttgcgggaccgccgctgttttcccgccacgagaaactgcctggcggttacctcctgggcgaggactaccggcgcctggacgaacccgcacggcaggcggtcggcgatgcgttggggcgcttctacgccgagctgcatcgactgccaccggcgcgcatgcgggcggttggagccttgccggtgcgtccctgggagtcgcccacggcgatgcgcaggcgcgccttgccgctgctgcctgcggcctggcgcgaacgcgcggaacgcttggtgcgggaatatgccaagctgcctgccgatccgctgggttcgatcttcggcttcttcgacggccatggctggaacatggcattcgatagcgaggccgggcggctgaacggtgtgtacgacttcgccgacgcgggcatcggtccgctgcaccaggaattcatctattccgcgttcatcgatgccgacctcaccgagcgcatcgtcgccgcctacgagcgcttcagcggtcggcgcctggagcgtcggcggatcgccttgctgacggcggcgcatcggttgtcggagctggccgagctggccgacgagccgcgccatctgccggacatgctcgccggcgccctcgacggcctggccctggcggaggcgcagggcctggcctga

SEQ ID NO: 354904 - DNA, 609 bp, Pseudomonas aeruginosa
atgtcaacgcactccccagacgacccgtcgccacgccgccgcctgtcccgcgacgagcgccagcgccagttgctcgaggtggcctggcggctggtccgcgaagaaggtaccgaggcgctgaccctcggacgcctggccgagcaggccggggtgaccaagccggtggtctatgaccacttcggcacccgcgccggcctgctggcggcgctctaccaggattacgacctgcgccagacggcgctgatggaggctgccctggaagcgagcgaggcgaccctggaggggcgcgccgacgtcatcgcccgcgcctatgtcgactgcgtgatgcaacaaggccgggagattcccggggtggtcgcggccctcgccagctcgccggagctggagcggatcaagcgcgactacgaggttctcttcatggacaagtgccgcgccgtgctggagcccttcgccggcggcggacggctgaccgtcgccgctctgcgcgcaatgatcggcgccgccgaagcgctgtcgcacgcggccgccaccgaagagatcgccccggaagaggcgcggcgggaactgtacgaggcgatcgtggcgatggtcgcgcggagtcgtcggtga

SEQ ID NO: 354905 - DNA, 657 bp, Pseudomonas aeruginosa
atgcaggcggatttttggcacgcccgctgggcgaacaaccagatcggcttccacctggacgagatcaatccctacctgatgcgccacctgtcgcggctgcgactgcaagcgggcgaacggatcctggtgccgttgtgcggcaagaccctggacctggcctggctggccgcccagggactggaggtgctgggggtggagctttcggaaaaggccgtgagcgacttcttcgaggagcacgacctgcaccccgagatcgatcaactggatggtttccgccgctaccgggtcgccggcatcaccctgctgcagggtgatttcttcgccttgcaggcagagcacctggcgcagtgcagggcgttctacgaccgcgccgccctgatcgccctgccgccggagatgcgcgagcgctatgccgggcatctccaggcggtcctgccgacgcgcagcctcggcttgctggtcaccatcgactacccgcaggcggagatggccggtccgccgttcgccgtgcccgacgaggaggtgcgtggctactacgctggcggttggcggatcgaggaactggagcgcggcgacgtgctcggcgtcaactggaaattcctcgagcgcggggtgtcctggctggacgaggccgtctacctgctggagagaggctga

SEQ ID NO: 354906 - DNA, 1128 bp, Pseudomonas aeruginosa
atgcagatccgcgccgatttcgacagcggcaacatccaggtcatcgatgccagcgatccccgccggatccgcctggcgatccgtcccgacctggccagccagcatttccagtggttccacttcaaggtcgagggcatggctgccgccaccgagcactgcttcaccctggtcaacgccggccagtcggcctacagccatgcctggagcggctaccaggcagtcgcctcgtacgatggcgaacgctggttccgcgtgccgtcgcaatacgacgccgacggcctgcatttccagctggaaccggaggaaagcgaagtccgcttcgcctacttcgagccctacagccgcgaacggcatgcccgcctggtcgaacgtgcgctcggcatcgagggcgtcgaacggctcgccgtcggcaccagcgtgcaaggccgcgacatcgaattgctgcgggtcaggcgccatcccggcagccacctgaagctgtgggtcatcgcccagcagcatcccggcgaacacatggccgaatggttcatggaaggcctgatcgagcgcctgcagcggccggatgatacggaaatgcagcgcctgctggaaaaggccgacctgtacctggtgccgaacatgaacccggacggcgcgttccacggcaacctgcgcaccaacgccgccggccaggatctcaaccgggcctggctggagccgagcgccgagcgcagcccggaagtctggttcgtccagcaggagatgaagcgccatggcgtcgacctgttcctcgacatccacggcgacgaggaaatcccccacgtattcgccgccggctgcgagggcaacccgggctatacgccccgcctggaacggctcgagcaacgcttccgcgaggaactgatggcgcgcggcgaattccagatccgccatggctacccacgcagtgcgccgggccaggccaacctggcgctggcctgcaacttcgtcgggcagacctacgactgcctggcgttcaccatcgagatgccgttcaaggaccacgacgacaacccggagcccgggaccggctggtccggcgcccgctccaagcggctcggccaggacgtcctgagcacccttgcggtgctggttgacgaactccgctga

SEQ ID NO: 354907 - DNA, 960 bp, Pseudomonas aeruginosa
atgattatcaggagcccgttcgcccgccccggcggcctgcgaaccgcgctccgtgccttcagccgtgaggagaagctttacaccatgatgcgcatcctgttgttcctggccaccaacctggcagtcctggtgattgccagcatcaccctgaaactgctcggggtggaccgcttcaccggccagaattacggcagcctgctggtcttctgcgccgtgttcggtttcgccggttcgctggtctcgctgttcatctccaagtggatggcgaagatgagcaccggtaccgaagtcatcagccagccgcgcacccgtcacgaacagtggctgctgcaaaccgtcgaagagctgtcccgcgaagccggcatcaagatgccggaggtcggcatcttccccgcctacgaggccaacgccttcgccaccggctggaacaagaacgacgcgctggtcgcggtcagccagggcctgctcgaacgtttctcgcccgatgaggtgaaagccgtcctcgcccacgagatcggtcacgtcgccaacggcgacatggtcaccctggcattgatccagggcgtggtgaacaccttcgtgatgttcttcgcgcggatcttcggcaacttcgtcgacaaggccatcctgaagaacgaggacggcccgggcatcggctacttcgtcgcgaccatcttcgccgaactggtgctcggcatcctcgccagcatcatcgtcatgtggttctcgcgccgccgcgagttccgcgctgacgccgccggcgcccacctggccggcaccggcgcgatgatcgccgcgctgcaacgcctgcgttcggaacagggcgtgccggtgcagatgcccgacaccctgaacgccttcggcatcaatggcggcctcaagcacggcctggccggcctgctgatgagccacccgccgctggaagatcgtatcgaagcgctgcgcgccagcgcacgctga

SEQ ID NO: 354908 - DNA, 399 bp, Pseudomonas aeruginosa
atgagcaagatcgacaaacccctggactcctggcgcgaggagttgaccgaagagcagttccacatctgtcgcctgggcggtaccgaacgcgccttcagtggcgaataccacgccaccaagacccccgggatctatcattgcacctgctgcggcacggcgttgttcgactccgacgccaagtacgactccggcagcggttggccgagctatttccagccggtggacgccgaggcggtccgcgaactggacgacttcagccacggcatgcaccgcatcgaagtccgctgcggccgctgcgatgcccacctggggcacgtcttcccggatggcccccggcccaccgggttgcgttactgcatcaactcggcctcgctgaagctggtgccgcgggagagctag

SEQ ID NO: 354909 - DNA, 486 bp, Pseudomonas aeruginosa
atgagcgattcgctgctgagcattccctgcaccaccatcaagggcgaacagaagaccctggccgacttcggcggcaaggcgctgctggtggtgaacaccgccagcaagtgcggcttcaccccgcagtaccaggggctggaggccttgtgggaaaaataccgtgagcgcggactggtggtgctcgggttcccctgcaaccagttcggcaagcaggaaccgggcgacgagggcgagatttcgcagttctgcgaactgaactacggggtgagcttcccgctgttcaggaagatcgaggtcaacggcgccggcgcccacccgttgttcgtcagcctgaagaagcgcgcgccgggcctgctcggcagccagggcatcaagtggaacttcaccaagttcctgatcggccgcgatggccaggtggtgaagcgctatgcgccgaccaccaagccggaggagctgagctcggcgatcgaggcgctgcttgaatga

SEQ ID NO: 354910 - DNA, 492 bp, Pseudomonas aeruginosa; identical to SEQ ID NO: 322920

SEQ ID NO: 354911 - DNA, 2361 bp, Pseudomonas aeruginosa
atgctaggcggcagaacctcgccaaggctgatccccgcccccatggatatagcgctgacccatcgcctgtcgttcaaacaggccagcctcaccgtgctggtggcctttatcctgggaaccctgctcagcctgattcaggttggcgtcgattatgccagccaggacgcatccatcaatcgcgaagtgcgcgcgctgctggacgtcagccacaaccccgccgcgcgaatcgcctacaacatcgatgcggagctggcccaggagctggtcctcggcctgctgcgctcgcccgccgtggtccgcgcggaaatcatcgacacctccggcctgccgctggccagcgcctcgcgcgaacccgccgaaagccgcctgcggccgctcagcgacttcctcttcggccacaagcgggtctacgaggacccgttgcatgtcgaccatgcgccgggcgaggccctcggcgtactgcacctggaaatcgacaccttcgtgttcggcaacgacttcctccgtcgcgccggcatcaccctgctctccggcttcatgcgcagcctgctgctgtcgctgatcctgctggtgctcttctataccctgctgaccaagcccctggtcagcctgatccaggccctcagcggacacgatccacgctcgccggcacgcatgcgcctgccctgccccaagggccacgaacgcgacgagatcggcgtgctggtggaagtcatcaaccgccagctcgggcgcatctcggtagagatcgaacagcgccgggaggcggagaaccgcctgacccagtacctggaggagctggaaagcatcgtcgccgcccgtaccgccgagctgaaggccgccaacgcgcgcctgacgctatccaaccaggaactcgaagaagcccgccagaccgctctcgatatggcccaggcccgcgccagcttcctggccaacatgagccacgagatccgcacgccgctgaacggcctgctcggcatgctctcgctgagcctcgacggcccgctcaccccggaacagcgccagcaactgtcgatcgcccacgactccggcaaggtgctggtggaattgctcaacgacgtgctcgacctctccaagttcgaggccgggcaactggtcctggaacagatcccgttcgacctgggcgtcctggtggaagacaccgccagcctcctctcgcagaacgccgcggccggcgtggagctgacctgcctggtcgaccccgccctgcccgcccaggtttccggcgacccgacgcggattcgccaggtcgtcagcaacctgctgtccaacgcgctgaagttcacccgcctggggcgggtcgacgttcgcgtggaagccaccgccgagggtgtgcgcatcagtgtgcgcgacaccggcatcggcatcgcccaggaggcgctggatcgcatcttccaaccgttcacccaggccgacgcgggtatcacccgccaatacggcggcacaggcctcggcctggccctcacgcgcaagctgtgcgaggccatgcagggcgagctgacggtggagtcgacggtcggcctgggcagcctgttcagcgtcggcctgccgctggcgccggtcagccctccgctgcaggcgctgccgctgcgcggccgggtgatcgcgcaatgctcggccaacagcgggctggcgcagctgctgcaaacctggctgccgcgctggggcctggagtacaagcgtctggagaccgacgacagcctgctcggccactcgctcgacgtactgatatcggattgcccggactgtctgatgggactgcgtccgagcatcggtacgccgatcctgctggtcaccgcctacggcagtttcctcgaaccggagctggcccgccgcctgtcgccgctgcgccaactggccaggccgctgagtcgcaaccagttgtaccaggccctgaaacacgtgctcgaacacactgccatagccccgtcgagcgcctcggacaccacgggagaacagcgcaacacccgggtcctgctggtggaggacaacccggtcaaccagttggtcgccaagggcctgctgcacaagctcggctgccaggtatggatcgccgaacacgggctgaatgccctgaagatgctggaggagcatcccatcgacctggtcctgatggactgcaacatgccagtgatggacggctacgaagcgacccggcagatccgcgacagcggacgctggtgcggcctgccgatcatcgcgctgaccgccaacgccctgccggacgagcgcgaacgttgtcgtgccgccggcatggacgactacctggccaagcctttccaccgcgacgaactgaaagccatcctcgaccgttggtgcccgctcaccgcgagcgactag

SEQ ID NO: 354912 - DNA, 891 bp, Pseudomonas aeruginosa
gtggattcccgattgagcgattttcttgcccgcgccgaaagcgtgctcgcgcgcctggagccgctgctgccggccgtacgcgaagccgtcgactgggagcgcagcctggcggcgcgctggcaccgcgacggccgtagcggctacctgcagccgctggaggtcagcctcgacctgcgcctggccgacctgctgggcgtagagcggcagcgcgagcaactggaacgcaacacccgccagttcgtcgccggccagccggccaaccacgccttgctctggggggcccgcgggaccggcaagtcctccctggttcgtgcgctgctggccgagctggccggcgccgggctgcgcctgatcgagatcgagcgcgaccacctggccgacctgccgcgcgtggtcgagcaactgcaaggcctgccgcagcgcttcgtactgttctgcgacgacctctcgttcgatgccggggaaggcgactaccgggtactcaagagcgtgctcgacggctcgctggaacaggcgccggagaatgtgctgctctacgccacctccaaccgccggcacctggtttcggagaagcagagcgacaacgagaactggaagatggtggacggcgagctgcatcccaacgaagcggtggaggacaagatcgccttgtccgaccgtttcggcctgtggctgtcgttctatcccttcacccaggagcatttcctcagcgtggttcgccactgggtggacgtgctcgcggagaaggccgggctggcctggagctggagcgaggaactggagaaggaagcgatccgctgggcgcttggccgcggcaaccgcaacggccgttgcgcctatcagttctcccgctactgggtgggcaagcaactgctggagcgccaggcatga

SEQ ID NO: 354913 - DNA, 483 bp, Pseudomonas aeruginosa
atgatcgatctgcagcaatctggcgccgggctggccggctacgccctgctggcggcgcaggccgaggcgctgttcgccgacgagcgcgatttcatcgccaacgccgcgcagttctccgcctttctcttccatgagctgggcgacctgaactgggccggcttctatctgaaccgcaacgaggaactggtcctgggaccgttccagggcaaggtcgcctgcgtccgcatccccttctccaagggcgtctgcggcgccgcggcgcgtacccggctgacccagcgggtcgacgacgtccacgcgtttcccggccacatcgcctgcgacagcgcttccagcagcgaactggtggtgcctctgctcaaggacggccgcctggtcgctgtgctcgatctggacagcccgagcgtgggacgcttcagcgccgaggaccaggccgggatcgaaggcctggtggagatattcctgcgcctgacggactgctga

SEQ ID NO: 354914 - DNA, 663 bp, Pseudomonas aeruginosa
atgagcctgacactctacggagccccgctgtctccgttcgtccgcaaggtccgcctgctcctggccgaaaagggcctcgactaccagttggaagcgatcgccccgttcggccagccggcctggtatcgcgagatcagtccgctgggccgcatcccggcgttgcgcgacggcgacctggccctcgccgactccagcgtgatctgccagtacctggaagaacgctatcccgaaccgccgaatctccagggcgacgcccccgccggccgcgcagcggtgcgctggctggaaaaatacgccgactacgagatcgctcccctggccacgctgacgatcttccgcaaccggatactcaagccggcgatgggccaggcctgcgaggagaacgacgtgcgtcgcgcgctggaggaaaagctgccagcgcacttcgattacctggaaaaccatctcgacggccgggccttcttcgtcggcgagcgactgaccctcgccgacctggcgatcgccagccagttggtcaacctgcgtcacgccggcgaaaacctggacgagcaacgctggccggccctcgccgcgcatttcgcgcggatgctcgaacgcccggcgatgcaagcgctgctgccgggggaacgacggaccctcgacaagctcgcagcgaaagcctga

SEQ ID NO: 354915 - DNA, 774 bp, Pseudomonas aeruginosa
gtgtcgccactcctcattaccgccctcatcatcggcgggatcgccctcctcatcgccattggctatatcaaccacgtggtggaaaacagcaagctggagaaagcgcgcctgaaagccgaactcaacgaccgggtccggcgctgcgcgcagatttccgagagccttcccggccagttcgtcagcccgtcgctgaagctgttgatgagccagatcgagctcagcctcagcgagcagcaactggcgctgcagaagaaagccgatgccgggctcaaggctcgtatagaagagttgcgcgcgctggtcgccaagggcgagtcgatcccggtgcgcaatccgccccaggcgatcctgaccgaggacaaggccaaggaagtccgcttcctcttcgaagccctgcatgcccagctcacccgtttcacccaggacggccacctgccgcgcagcgaggcgcagatctgggtcaaggagattcgccacctcctggtgcgcctgcatatcgagttcttcggcaatctcggccagcaggccctgcagcagaacgaaccgcgccaggcgcgcctggccttcgaacgcggcgcccagtacctgcgcaagcagcccgagctggcgcgctaccaggcggagctgcagcagatggaaacgcagctggcccgcgccaacgcgatggtgctgaacaacagccagccggcgagcgaggagcccagcgaactcaacgagggattgaaggccctcgatgcagacgacctgtggaagaagaagaacgtctacgactga

SEQ ID NO: 354916 - DNA, 633 bp, Pseudomonas aeruginosa
atgtacatcgggttgctcgacagtcacaatgaggttcgcccggttacactagagaaaaatttggcttcaagtccagcttttttctgtgaattagtgcgtgctgtgtatgctccaaaacatcggcccgaggagaccgatgcaactgtagtggatagtaatgttgctctcaatgcgtatcgccttcttcagcggtggagcctagttcctggggtaaaagaagatggatcattttgctctgaagagttcaggtgctggcttgcagaggtagacaaattgtcgaatgagacagggcatcatgatatggcaatgagttgtctgggaagtgtcttaattcatgcgccaacgaccgatgatttatggatggcacctgtcattgctgaggttctgaatgaaaaggatagagattcgctaagagaggggtatgcgatttctttattcaactctcgtggcgcacattgggtcgatcctgagggtaaacctgagaaagaattagccgaaaaatatcggcaacaagcgatgctgatggaaactggtggctttcagagattctcaaggaccttgttggatattgccgaagactacgaaaggcaagctgagaggcacattgcgcgttttggtaaaacggatcattga

SEQ ID NO: 354917 - DNA, 2514 bp, Pseudomonas aeruginosa
atgaccgaaacggaagggtcgtcggccgcgcatcgtttgacgatgtcgctaatcgaggaagcgacgcaggtcggacctcgcttcggcttcgaggtgtcaaagacactggcggattggaatctgattggctggccgaaccgtgttgacctgctcatgacggggatggtgcggcgaagccctgaactcgtcttggcttgcgcgacggtctggtgcggtctgtgtctgccgttctacatggaaccgtactaccgggacccgcaccacgtcggtgacttcatcgacatcgccgccgacgccgcaggacctggacagattgaaccgctcgcgcggatgtttttggcggtgatcgaggtagccagcagggcacacgagagggtcggactgctccagcgccttcgcaccgctgccggaagacatgggttttcatcggccgagctcgacgccgccgtagcccggtggatgtcagaagcgccggaacctcgacactcgtatacgccaagcaagtacgactcggagaccactctcgagcagcttgagcgcgcgtttgaagcggatggcgacgaactgaactacaacgccccgtaccgcttcagagatctggccgatacggccccgcttcatctggcgcggaggatatttgagcgctggcaggtcttgctggacgacgcgcgctgccgcttcctgatggttaaaaggttggctgcggcgggggaggtcgagtacgccaagaggctgatgcaaggctacgagtcaagcaaggacccctggagttcctggagccagtggatgggtggcggtaagttcttctactttgaggcgaagaagctcttgcagggaccatccacatgcccagccgccttcgagaacattgtcgattcagtaacggcgggccaggagaacacccagtcactgctgacagagctggattcgatactgccggtaatcagcgcgacgccggattggccggccatctggtcgctacttgaggagcagatggcctgcactcgcgagttccagctggggcgacccttccagccgagcgagctaccgctcagcgacacggaacttttggaggatctgctgcactttgcctatcggctgcccgttgcagaagttcagcgacacgcacgcaattgcacgttgagcctggcaaggcaagccggattcggccaagctttgttcaagtcccttatgcggcgacttatagccggcgaattagatgcccccttgcaggcgctcggaacgctgctggctgctgacagcgcggaccttgcccccgagttgggcagcgccgtggctgcgttggtcagtcaccgtgacatcgcggtggcagagtcagccgcgctcttgtcgcatcggtggaggcaggctgtccccttggacgcgataccactgccgctcttctatcgccttgaactcgagcacccgccagagggcgaccaggcattcacggacgaaagaactggtgcaatgcgcgtcgagtcgccgcttggctggaccgagatgttgcgctcaacggcacttcacatcgcgagggcggcaggcattgaggagatgacagtccgccgacgcgcagcgatgttcatccaggattggggtggacttgaggcattcgggccctctggcatcaaaaggcttgagactcagcttcgcgtgctcgacatgcagatcacttacctgaagccccacgcctacattgccattgtcgcacttcgccacgtcgcgggagaactgcggctggccggcaaagtgaaaggcagcgacatgcccacgcttttggaacgtttgggctgcccgcttccgcctcgaccgctgaagctcccgcgagggcgccccgagtggatccgaatgccgctgttgaaccgaagtgcgggttggtccgagcgagaacggaagtggattgacgaagtcgacggtgacgttgcccccttcccagcagacagccacggccaactcgtggccgaagtatcccgcttcaagattctcaagccacggctgtcggagcaccgcctctaccgctttagagcaccctcggcagagattgacagtgaagacttcgacgactgctatgccaggctgcccatcgctgtttggcttggccagtacgtcgcatttgacaatgatctggcgccaacgctggtaaggagagttgtttgctcggtggacatgggctttgacgcagcggcctattcgttcgctttgtgcccgaactgggtgaagcggcttcgctggagcgcgcatgacgaggagcccggcgtcttcctcgacccgagcggcgctgtggtcgcaaggctctgctggtggcgtgatgccggcccggttgatatcgatgcggagtccttgtggggcgagggttgctacctcgtcctgacgtcattaggcatcgaacaggtcaccactgcccgtgggaagccggatctggacatcagcgtgttcgcaagcaggcagatcgagcaaccgagcagctacggggagtctctcttgaagactgcgaagaacggttactcaatctaa
